(19) United States
(12) Patent Application Publication
(10) Pub. No.: US 2011/0179523 A1
(43) Pub. Date: Jul. 21, 2011

(54) Method for Producing a Transgenic Plant Cell, a Plant or a Part Thereof with Increased Resistance Biotic Stress

(75) Inventors: Markus Frank, Neustadt (DE); Gunnar Plesch, Potsdam (DE); Piotr Puzio, Mariakerke (Gent) (BE)

(73) Assignee: BASF PLANT SCIENCE GMBH, Ludwigshafen (DE)

(21) Appl. No.: 13/121,515

(22) PCT Filed: Sep. 28, 2009
(86) PCT No.: PCT/EP2009/062533

§ 371 Date: Mar. 29, 2011

(30) Foreign Application Priority Data
Sep. 30, 2008 (EP) 08165513.6

(51) Int. Cl. A01H 1/06; C12N 15/82; C07H 21/04; C07H 21/00; C12N 15/63; C12N 5/10; A01H 5/00; A01H 5/10

(52) U.S. Cl. 800/279; 435/468; 536/23.7; 536/23.1; 435/320.1; 435/419; 800/298

(57) ABSTRACT

The invention relates to the control of pathogens. Disclosed herein are methods of producing transgenic plants with increased pathogen resistance, expression vectors comprising polynucleotides encoding for functional proteins, and transgenic plants and seeds generated thereof.

[0001] The invention relates to the control of pathogens. Disclosed herein are methods of producing transgenic plants with increased pathogen resistance, expression vectors comprising polynucleotides encoding for functional proteins, and transgenic plants and seeds generated thereof.

[0002] In particular, this invention relates to a transgenic plant cell, a plant or a part thereof with increased resistance to biotic stress, preferably pathogenic fungi as compared to a corresponding non-transformed wild type control, by increasing or generating one or more activities of biotic stress related protein (BSRP) and to a method for producing said plant cell, a plant or a part thereof.

[0003] The invention also deals with methods of producing and screening for and breeding such plant cells or plants.

[0004] Population increases and climate change have brought the possibility of global food, feed, and fuel shortages into sharp focus in recent years. Additionally, plant performance in terms of growth, development, biomass accumulation and yield depends under field conditions on acclimation ability to the environmental changes and tolerance to plant diseases.

[0005] Stresses, biotic and abiotic, exert a critical influence on crop yields. Pathogen attacks are sometimes the most devastating biotic stresses. The enhancement of disease resistance in crops can contributed significantly to increasing the productivity of crops and decreasing the application of pesticides, which can adversely affect human health and the environment when applicated in excess.

[0006] Plant diseases are infectious diseases which are caused by biotic stress and noninfectious diseases caused by abiotic stress.

[0007] Biotic stress is caused by phytopathogenes respective bacteria, fungi, nematodes, ylruses, mollicutes (mycoplasmas, spiroplasmas), protozoa, phanerogams; rickettsias, and viroids, insects and parasitic plants.

[0008] Abiotic stress means “sub-optimal growing condition”, referring to environmental stress, damages by weather and other environmental factors, limited water and nutrient availability and sub-optimal disposability. Limited water availability can induce drought, heat, cold or salt stress.

[0009] Plants infectious diseases, in other words biotic stress, are responsible for significant crop losses worldwide, resulting from both infection of growing plants and destruction of harvested crops. Crop losses and crop yield losses of major crops such as rice, maize (corn) and wheat caused by these stresses represent a significant economic and political factor and contribute to food shortages worldwide.

[0010] Agricultural biotechnology has attempted to meet humanity's growing needs through genetic modifications of plants that could increase crop yield, for example, by conferring better tolerance to biotic and abiotic stress or by increasing biomass. The plants' natural defense mechanisms against pathogens are frequently insufficient. At the moment many genetical and biotechnological approaches are known in order to obtain plants growing under conditions of biotic stress.

[0011] The introduction of foreign genes from plants, animals or microbial sources can increase the defenses. Examples are the protection against feeding damage by insects by expressing Bacillus thuringiensis endotoxins (Vaeck et al. (1987) Nature 328:33-37) or the protection against fungal infection by expressing a bean chitinase (Broglie et al. (1991) Science 254:1194-1197).

[0012] Most pathogens are host-specific to a particular plant species, genus or family. For instance, blackspot of rose will not attack marigolds or lettuce. Therefore, most of the approaches described only offer resistance to a single pathogen or a narrow spectrum of pathogens.

[0013] Plant-pathogen interactions are sometimes controlled by specific interactions between avirulence genes of pathogens and gene-for-gene disease resistance (R) genes of plants. Many authors have reported the enhancement of disease resistance by transgenic approaches, as increasing the expression of the disease resistance (R) genes of plants. The characteristic defense reaction of R-gene mediated resistance is the hypersensitive response (HR), a strong resistance reaction comprising a programmed cell death of the attacked plant cell. Small antimicrobial peptides play an important role as part of the natural defense systems of plants against infectious microorganisms. Antimicrobial peptides are usually small, cationic, and amphipathic and have open-chain forms. Various types of antimicrobial peptides have been identified in plants, including thionins, maize zeamatin, coffee circulin, and wheat puroindoline and plant defensins (Kawata et. al, JARQ 37 (2), 71-76 (2003)).

[0014] Only a few approaches exist which impart a resistance to a broader spectrum of pathogens to plants. Systemic acquired resistance (SAR)—a defense mechanism in a variety of plant/pathogen interactions—can be conferred by the application of endogenous messenger substances such as jasmonic acid (JA) or salicylic acid (SA) (Ward, et al. (1991) Plant Cell 3:1085-1694; Uknes, et al. (1992) Plant Cell 4(6):645-656). Similar effects can also be achieved by synthetic compounds such as 2,6-dichloroisonicotinic acid (INA) or S-methyl benzo(1,2,3)thiadiazole-7-thiocarboxylate (BTH; Bion200) (Friedrich et al. (1996) Plant J 10(1):61-70; Lawton et al. (1996) Plant J. 10:71-82). The expression of pathogenesis-related (PR) proteins, which are upregulated in the case of SAR, may also cause pathogen resistance in some cases.

[0015] In barley, the loss of the Mlo gene causes an increased and, above all, race-unspecific resistance against a large number of mildew species (Buschges R et al. (1997) Cell 88:695-705; Jorgensen J H (1977) Euphytica 26:55-62; Lyngkjaer M F et al. (1995) Plant Pathol 44:786-790). mlo-like resistances in other plants, in particular in cereal species, are not described. Various methods using the Mlo gene and homologs from other cereal species for obtaining a pathogen resistance are described (WO 98/04586; WO 00/01722; WO 99/47552). The disadvantage is that the mlo-mediated defense mechanism comprises a spontaneous die-off of leaf cells (Wolter M et al. (1993) Mol Gen Genet 239: 122-128). Another disadvantage is that the Mlo-deficient genotypes show hypersensitivity to hemibiotrophic pathogens such as Magnaporte grisea (M. grisea) and Cochliobolus sativus (Bipolaris sorokiniana) (Jarosch B et al. (1999) Mol Plant Microbe Interact 12:508-514; Kumar J et al. (2001) Phytopathology 91:127-133).

[0016] The liberation of reactive oxygen species (ROSi) is ascribed an important protection function in the reaction on plant pathogens (Wojtaszek P (1997). It has been shown that mutations in the catalytic subunit of NADPH oxidase in Arabidopsis thaliana show a reduced accumulation of reactive oxygen intermediates (ROI). With regard to the hypersensitive reaction (HR), the results were heterogeneous: while infection with the aviralulent and bactrium Pseudomonas syringae showed a reduced HR in a double mutant, the virulent oomycete Peronospora parasitica showed an increased HR. (Torres M A et al. (2002) Proc Natl Acad Sci USA 99:517-522). In US 20080047033 methods for generating or increasing a pathogen resistance in plants by reducing the expression, activity or function of an NADPH oxidase is disclosed.

[0017] An other approach is directed to pathogenesis-related proteins (PRPs), in particular to the constitutive expression in transgenic plants of DNA sequences which encode the PRPs The pathogenesis-related proteins are plant proteins induced following infection by a pathogen.

[0018] Such PRPs are disclosed in US 20080120747 or US 20080090294, whereby the species of origin of these nematicidal and antifungal polypeptides are plant species. Further plant genes involved in plant resistance are known from U.S. Pat. No. 7,320,892; US 20080184397 or US 20070226839 for example.

[0019] With view to the fact that plant disease constitutes a major and ongoing threat to human food stocks and animal feed, a need exists to identify methods conferring a resistance and/or tolerance to a broad spectrum of plant diseases. Most ideal such a resistance and/or tolerance should be conferred by a protein, which can be formed by plant cells directly by translation of at least one gene, two or more or combination of genes.

[0020] Accordingly, in a first embodiment, the present invention provides a method for producing a transgenic plant cell with these traits by placing the “biotic stress related protein” BSRP at disposal.

[0021] Some approaches which impart a resistance to a broader spectrum of pathogens to plants are based on enhanced tolerance to abiotic environmental factors that cause a plant to be stressed. This stress may result in the plant's gradual decline. Decline results in the plant being more susceptible to infectious diseases. So the real cause of a problem is the abiotic stress factors, with the infectious disease simply being a secondary factor.

[0022] There is still a need to identify genes coding for polypeptides with a activity, which, when generated or increased, confers increased biotic stress resistance in plants or plant cells as compared to a corresponding non-transformed wild type control not only under conditions of abiotic stress. The increased biotic stress resistance should be directed primarily and straight to the biotic stress factor.

[0023] Accordingly, in one embodiment, the present invention provides the “disease resistance conferring protein” BSRP which confers increased biotic stress resistance primarily and straight to the biotic stress factor.

[0024] Biotic stress is caused and induced by pathogens.

[0025] A large group of plant pathogens of agro-economical importance are fungi. Fungi are responsible for devastating epidemics which can result in substantial losses of crops of various plant species. Fungal infection of crop plants has repeatedly resulted in catastrophic harvest failures that have caused major economic and social problems in the affected countries. Among the causal agents of infectious crop plant diseases, phytopathogenic fungi play a dominant role. The potential for serious crop epidemics still persists today. In addition to causing food shortages, fungal infection of plants can directly affect the health of humans and livestock through poisoning by toxins.

[0026] The classes with plant disease-causing fungi are Plasmodiophoromycetes, Chytridiomycetes, Zygomycetes, Oomycetes, Ascomycetes, Basidiomycetes, and Deuteromycetes.

[0027] Additionally, many fungal species may be significant as potential contaminants of food.

[0028] From the genus of ascomycete fungi Alternaria species are known as major plant pathogens. At least 20% of agricultural spoilage is caused by Alternaria species. They are also common allergens in humans, growing indoors and causing hay fever or hypersensitivity reactions that sometimes lead to asthma.

[0029] Species in the genus Alternaria (Dematiaceae family, Hyphomycetes order, Fungi Imperfecti;

[0030] Kingdom: Fungi; Phylum: Ascomycota; Class: Euascomycetes; Order: Pleosporales;

[0031] Family: Pleosporaceae; Genus: Alternaria) are very common and abundant. Alternaria infects the plant in the field and may contaminate wheat, sorghum, and barley. Alternaria species also infect various fruits and vegetables and can cause spoilage of these foods in refrigerated storage. Alternaria in general, have a world-wide geographic distribution.

[0032] A. brassicicola causes black spot disease (also called dark leaf spot) on virtually every important cultivated Brassica species including broccoli, cabbage, canola, and mustard. It is of worldwide economic importance resulting occasionally in 20-50% yield reductions in crops such as canola, mustard or rape.

[0033] A. alternata causes foliage and pod blight of pea, leaf spot on Calathea spp. as well as late blight on tomato and potato.

[0034] Dark symptoms are signs of the pathogen, Alternaria spp., that have dark-colored mycelium and erect conidiophores that bear single or branched chains of conidia. Seed, seedlings, leaves and pods can be damaged. Infection can occurs when seeds are sown in infected soils, but can also occur when the seeds themselves are infected.

[0035] Therefore, there is a need to identify safe and effective compositions and methods for controlling plant pathogens, in particular pathogenic fungi, specially from the genus Alternaria and for the production of plants, in particular seeds, having increased resistance to plant pathogens, and ultimately for the increased yield.

[0036] The present invention fulfills the need for plants that are resistance to biotic stress, preferably pathogenic fungi as compared to a corresponding non-transformed wild type control, and concomitantly, demonstrate increased yield. The transgenic plants of the present invention comprise microbial genes and their homologs that confer the phenotype of increased pathogen resistance when expressed in the plant.

[0037] Accordingly, in a first embodiment, the present invention provides a method for producing a transgenic plant cell, a plant or a part thereof with increased resistance to biotic stress, preferably pathogenic fungi as compared to a corresponding non-transformed wild type control, wherein the method comprises the steps of:

a) introducing into a plant cell a polynucleotide encoding a “disease resistance conferring protein” BSRP from yeast and/or Escherichia
b) generating from the plant cell the transgenic plant expressing the polynucleotide.

[0038] In one embodiment, the present invention provides a method for producing a trans-genic plant cell, a plant or a part thereof with increased resistance to biotic stress, preferably pathogenic fungi as compared to a corresponding non-transformed wild type control, wherein the method comprises the overexpression of microbial genes coding for BSRP.

[0039] In one embodiment, the present invention provides a method for producing a trans-genic plant cell, a plant or a part thereof with increased resistance to biotic stress, preferably pathogenic fungi as compared to a corresponding non-transformed wild type control, wherein the method comprises the overexpression homologs of the of microbial genes coding for BSRP.

[0040] The term “increased expression” or “overexpression” as used herein means any form of expression that is additional to the original wild-type expression level.

[0041] In one embodiment of the invention said BSRP has an activity selected from the group consisting of: b3262-protein, b3644-protein, chloramphenicol resistance protein homolog ydeA, chorismate mutase-T and prephenate dehydrogenase, Gamma subunit of the translation initiation factor eIF2B, glucose dehydrogenase, glucose-6-phosphate 1-dehydrogenase, peptidyl-prolyl cis-trans isomerase A (rotamase A), recombinase A, ribosomal protein, RNA polymerase sigma-E factor (sigma-24), Splicing factor that is found in the Cef1p subcomplex of the spliceosome (Prp46p), sulfite reductase (NADPH), flavoprotein beta subunit, transcription regulator farR, fatty acyl-responsive, transmembrane pore-generating protein mglC, YCR087W-protein, YGR150c-protein, YIL172C-protein, YLR168C-protein, YLR407W-protein, and YOR299W-protein.

[0042] In one embodiment the present invention provides a method for producing a transgenic plant cell, a plant or a part thereof with increased resistance to plant disease and ultimately increased yield; as compared to a corresponding non-transformed wild type control.

[0043] In one embodiment the present invention provides a method for producing a transgenic plant cell, a plant or a part thereof with increased resistance and/or tolerance to stress as compared to a corresponding non-transformed wild type control.

[0044] In one embodiment the present invention provides a method for producing a transgenic plant cell, a plant or a part thereof with increased yield as compared to a corresponding non-transformed wild type control, preferably under stress conditions.

[0045] In one embodiment the term “increased yield” refers to any biomass increase.

[0046] In one embodiment increased yield and/or increased biomass production includes higher seed yield, higher photosynthesis and/or higher dry matter production. In one embodiment of the invention the terms “increased yield”, “increased biomass” or “increased biomass production” means that the plants exhibit an increased growth rate from the starting of first stress condition as compared to a corresponding non-transformed wild type plant. An increased growth rate comprises an increased in biomass production of the whole plant, an increase in biomass of the visible part of the plant, e.g. of stem and leaves and florescence, visible higher and larger stem.

[0047] In one embodiment increased yield and/or increased biomass production includes higher seed yield, higher photosynthesis and/or higher dry matter production.

[0048] Said increased yield in accordance with the present invention can typically be achieved by enhancing or improving, in comparison to a non-transformed starting or wild-type plant, one or more yield-related traits of a plant. Such yield-related traits of a plant the improvement of which results in increased yield comprise, without limitation, the increase of the intrinsic yield capacity of a plant, improved nutrient use efficiency, and/or increased stress tolerance.

[0049] According to the present invention, yield-related traits concerning an increase of the intrinsic yield capacity of a plant may be manifested by improving the specific (intrinsic) seed yield (e.g. in terms of increased seed/grain size, increased ear number, increased seed number per ear, improvement of seed filling, improvement of seed composition, embryo and/or endosperm improvements, or the like); modification and improvement of inherent growth and development mechanisms of a plant (such as plant height, plant growth rate, pod number, pod position on the plant, number of internodes, incidence of pod shatter, efficiency of nodulation and nitrogen fixation, efficiency of carbon assimilation, improvement of seedling vigour/early vigour, enhanced efficiency of germination (under stressed or non-stressed conditions), improvement in plant architecture, cell cycle modifications, photosynthesis modifications, various signalling pathway modifications, modification of transcriptional regulation, modification of translational regulation, modification of enzyme activities, and the like); and/or the like.

[0050] According to the present invention, yield-related traits concerning an improvement or increase in nutrient use efficiency of a plant may be manifested by improving a plant's general efficiency of nutrient assimilation (e.g. in terms of improvement of general nutrient uptake and/or transport, improving a plant's general transport mechanisms, assimilation pathway improvements, and the like), and/or by improving specific nutrient use efficiency of nutrients including, but not limited to, phosphorus, potassium, and nitrogen.

[0051] According to the present invention, yield-related traits concerning an improvement or increase of stress tolerance of a plant may be manifested by improving or increasing a plant's tolerance against biotic and/or abiotic stress. In the present application, biotic stress refers generally to plant pathogens and plant pests comprising, but not limited to, fungal diseases (including oomycete diseases), viral diseases, bacterial diseases, insect infestation, nematode infestation, and the like. In the present application, abiotic stress refers generally to abiotic environmental conditions a plant is typically confronted with, including conditions which are typically referred to as “abiotic stress” conditions including, but not limited to, drought (tolerance to drought may be achieved as a result of improved water use efficiency), heat, low temperatures and cold conditions (such as freezing and chilling conditions), salinity, osmotic stress, shade, high plant density, mechanical stress, oxidative stress, and the like.

[0052] The term “yield” as used herein generally refers to a measurable produce from a plant, particularly a crop.

[0053] Yield and yield increase (in comparison to a non-transformed starting or wild-type plant) can be measured in a number of ways, and it is understood that a skilled person will be able to apply the correct meaning in view of the particular embodiments, the particular crop concerned and the specific purpose or application concerned.

[0054] In the preferred embodiments of the present invention described herein, an increase in yield refers to increased biomass yield, increased seed yield, and/or increased yield regarding one or more specific content(s) of a whole plant or parts thereof or plant seed(s).

[0055] In preferred embodiments, “yield” refers to biomass yield comprising dry weight biomass yield and/or freshweight biomass yield, each with regard to the aerial and/or underground parts of a plant, depending on the specific circumstances (test conditions, specific crop of interest, application of interest, and the like). In each case, biomass yield may be calculated as freshweight, dry weight or a moisture adjusted basis, and on the other hand on a per plant basis or in relation to a specific area (e.g. biomass yield per acre/square meter/or the like).

[0056] In other preferred embodiments, “yield” refers to seed yield which can be measured by one or more of the following parameters: number of seed or number of filled seed (per plant or per area (acre/square meter/or the like)); seed filling rate (ratio between number of filled seeds and total number of seeds); number of flowers per plant; seed biomass or total seed weight (per plant or per area (acre/square meter/or the like); thousand kernel weight (TKW; extrapolated from the number of filled seeds counted and their total weight; an increase in TKW may be caused by an increased seed size, an increased seed weight, an increased embryo size, and/or an increased endosperm); or other parameters allowing to measure seed yield. Seed yield may be determined on a dry weight or on a fresh weight basis, or typically on a moisture adjusted basis, e.g. at 15.5 percent moisture.

[0057] In further preferred embodiments, yield refers to the specific content and/or composition of a harvestable product, including, without limitation, an enhanced and/or improved sugar content or sugar composition, an enhanced or improved starch content and/or starch composition, an enhanced and/or improved oil content and/or oil composition (such as enhanced seed oil content), an enhanced or improved protein content and/or protein composition (such as enhanced seed protein content), an enhanced and/or improved vitamin content and/or vitamin composition, or the like.

[0058] In further preferred embodiments, yield refers to the specific content and/or composition of a harvestable product, preferably an enhanced and/or improved content of at least one fine chemical selected from the group consisting of:

3,4-dihydroxyphenylalanine (dopa), alanine, a-linolenic acid (c18:cis[9,12,15]3), a-linolenic acid, c18:3 (c9,c12,c15), alpha-linolenic acid, alpha-tocopherol, arginine, aspartic acid, beta-carotene, beta-sitosterol, campesterol, cerotic acid (c26:0), citrulline, coenzyme q10, coenzyme q9, ferulic acid, fructose, fumarate, fumaric acid, gamma-tocopherol/beta-tocopherol/2,3-dimethyl-5-phytyl-quinol, gamma-tocopherol/beta-tocopherol, gamma-tocopherol/beta-tocopherol/2,3-dimethyl-5-phytylquinol, glucose, glutamate, glyceric acid, glycerol, glycine, hexadeca-dienoic acid (c16:cis [7,10]2), hexadeca-trienoic acid (c16:cis [7,10,13]3), homoserine, isoleucine, isopentenyl pyrophosphate, lacton of trihydroxybutyric acid, leucine, lignoceric acid (c24:0), linoleic acid (c18:cis[9,12]2), linoleic acid c18:2 (c9,c12), lutein, malic acid, methylgalactopyranosid, myo-inositol, palmitic acid (c16:0), phenylalanine, proline, putrescine, raffinose, salicylic acid, serine, shikimic acid, sinapic acid, stearic acid (c18:0), succinate, succinic acid, threonine, trihydroxybutanoic acid, tryptophane, tyrosine, valine and zeaxanthin, or any combination of 2, 3, 4, 5, 6, 7, 8, 9, 10, 11, 12, 13, 14, 15, 16, 17, 18, 19, 20 or more of the above mentioned fine chemicals.

[0059] In one embodiment, the yield of the transgenic plants of the invention is increased by an enhanced nitrogen use efficiency (NUE). An improvement or increase in nitrogen use efficiency of a plant may be manifested by improving a plant's general efficiency of nitrogen assimilation (e.g. in terms of improvement of general nitrogen uptake and/or transport, improving a plant's general transport mechanisms, assimilation pathway improvements, and the like), and/or by improving specific nitrogen use efficiency.

[0060] In a preferred meaning according to the present application, “yield” as described herein may also refer to the harvestable yield of a plant, which largely depends on the specific plant/crop of interest as well as its intended application (such as food production, feed production, processed food production, biofuel, biogas or alcohol production, or the like) of interest in each particular case. Thus, yield may also be calculated as harvest index (expressed as a ratio of the weight of the respective harvestable parts divided by the total biomass), harvestable parts weight per area (acre, squaremeter, or the like); and the like.

[0061] Preferably, the preferred enhanced or improved yield characteristics of a plant described herein according to the present invention can be achieved in the absence or presence of stress conditions.

[0062] The meaning of “yield” is, thus, mainly dependent on the crop of interest and the intended application, and it is understood, that the skilled person will understand in each particular case what is meant from the circumstances of the description.

[0063] As used herein, the term “stress” refers to any sub-optimal growing condition and includes biotic and abiotic stress.

[0064] Generally, the term “increased tolerance to stress” can be defined as survival of plants, and/or higher yield production, under stress conditions as compared to a non-transformed wild type or starting plant.

[0065] The resistance and/or tolerance to abiotic stress of the transformed cells of the invention is disclosed in WO2004/092398, which is incorporated by reference.

[0066] In one embodiment the term “increased yield” refers to increased yield under condition of abiotic stress as compared to a corresponding non-transformed wild type control.

[0067] Increased yield is achieved due to enhanced resistance and/or tolerance to abiotic stress as compared to a corresponding non-transformed wild type control.

[0068] Abiotic stress preferably includes sub-optimal conditions associated with drought, cold or salinity or combinations thereof. In preferred embodiments, abiotic stress is drought and low water content. Wherein drought stress means any environmental stress which leads to a lack of water in plants or reduction of water supply to plants.

[0069] In one embodiment of the invention the term “increased resistance to abiotic stress” relates to an increased resistance to water stress, which is produced as a secondary stress by cold, and/or salt, and/or, of course, as a primary stress during drought.

[0070] In one embodiment increased abiotic stress resistance refers to resistance to drought.

[0071] In the present invention, enhanced tolerance to drought may, for example and preferably, be determined according to the following method:

[0072] Transformed plants are grown in pots in a growth chamber (e.g. York, Mannheim, Germany). In case the plants are Arabidopsis thaliana soil is prepared as 4:1 (v/v) mixture of soil and quartz sand. Standard growth conditions are: photoperiod of 16 h light and 8 h dark, 20° C., 60% relative humidity, and a photon flux density of 150 μE. To induce germination, sown seeds are kept at 4° C., in the dark, for 3 days. Plants are watered daily until they were approximately 3 weeks old at which time drought was imposed by withholding water. Parallely, the relative humidity was reduced in 10% increments every second day to 20%. After approximately 12 days of withholding water, most plants show visual symptoms of injury, such as wilting and leaf browning, whereas tolerant plants can be identified as being visually turgid and healthy green in color. Plants are scored for symptoms of drought injury in comparison to neighbouring plants for 3 days in succession.

[0073] Three successive experiments can be conducted. In the first experiment, 10 independent T2 lines are sown for each gene being tested. The percentage of plants not showing visual symptoms of injury is determined. In the second experiment, the lines that are scored as tolerant in the first experiment are put through a confirmation screen according to the same experimental procedures. In this experiment, plants of each tolerant line are grown and treated as before. In the third experiment, at least 7 replicates of the most tolerant line are grown and treated as before. The average and maximum number of days of drought survival after wild-type control have visually died are determined. Additionally measurements of chlorophyll fluorescence are made in stressed and non-stressed plants using a Mini-PAM (Heinz Walz GmbH, Effeltrich, Germany).

[0074] In one embodiment the term “increased yield” refers to increased yield under condition of biotic stress, e.g. increased resistance and/or tolerance to plant disease, preferably pathogenic fungi as compared to a corresponding non-transformed wild type control.

[0075] Increased yield is achieved due to enhanced resistance and/or tolerance to biotic stress as compared to a corresponding non-transformed wild type control.

[0076] In one embodiment the term “increased yield” refers to increased yield under condition of biotic and abiotic stress.

[0077] In further preferred embodiments, increased yield refers under stress conditions to enhanced biomass and/or the specific content and/or composition of a harvestable product, preferably an enhanced and/or improved content of at least one fine chemical selected from the group consisting of:

3,4-dihydroxyphenylalanine (dopa), alanine, a-linolenic acid (c18:cis[9,12,15]3), a-linolenic acid, c18:3 (c9,c12,c15), alpha-linolenic acid, alpha-tocopherol, arginine, aspartic acid, beta-carotene, beta-sitosterol, campesterol, cerotic acid (c26:0), citrulline, coenzyme q10, coenzyme q9, ferulic acid, fructose, fumarate, fumaric acid, gamma-tocopherol/beta-tocopherol/2,3-dimethyl-5-phytyl-quinol, gamma-tocopherol/beta-tocopherol, gamma-tocopherol/beta-tocopherol/2,3-dimethyl-5-phytylquinol, glucose, glutamate, glyceric acid, glycerol, glycine, hexadeca-dienoic acid (c16:cis [7,10]2), hexadeca-trienoic acid (c16:cis [7,10,13]3), homoserine, isoleucine, isopentenyl pyrophosphate, lacton of trihydroxybutyric acid, leucine, lignoceric acid (c24:0), linoleic acid (c18:cis[9,12]2), linoleic acid c18:2 (c9,c12), lutein, malic acid, methylgalactopyranosid, myo-inositol, palmitic acid (c16:0), phenylalanine, proline, putrescine, raffinose, salicylic acid, serine, shikimic acid, sinapic acid, stearic acid (c18:0), succinate, succinic acid, threonine, trihydroxybutanoic acid, tryptophane, tyrosine, valine and zeaxanthin, or any combination of 2, 3, 4, 5, 6, 7, 8, 9, 10, 11, 12, 13, 14, 15, 16,17, 18, 19, 20 or more of the above mentioned fine chemicals.

[0078] Biotic stress preferably includes sub-optimal conditions associated with plant disease.

[0079] Resistance to biotic stress refers to resistance of a plant to plant disease as compared to a corresponding non-transformed wild type control. Biotic stress and concomitantly the plant disease are caused by pathogens, that include insects, fungi, bacteria, ylruses, nematodes, viroids, mycloplasmas, etc, preferably pathogenic fungi and/or nematodes.

[0080] “Plant pathogen” refers to any agent that causes a disease state in a plant, including viruses, fungi, bacteria, nematodes, and other microorganisms.

[0081] Resistance to biotic stress or “pathogen resistance” denotes the reduction or weakening of disease symptoms of a plant following infection by a pathogen. The symptoms can be manifold, but preferably comprise those which directly or indirectly have an adverse effect on the quality of the plant, the quantity of the yield, the suitability for use as feedstuff or foodstuff, or else which make sowing, planting, harvesting or processing of the crop difficult. Pathogen caused disease symptoms include size and/or frequency of necrotic or chlorotic lesions on plant tissue, brown lesions, often with light tan to whitish centers, with dark purplish to black outer margin, eventually with chlorotic zone surrounding the lesion; size and/or frequency of cankers, black spot disease (also called dark leaf spot), foliage, blight etc.

[0082] In one embodiment increased biotic stress resistance refers to resistance to plant disease, preferably pathogenic fungi.

[0083] In the present invention, enhanced tolerance to pathogenic fungi may, for example and preferably, be determined according to the following method:

[0084] Transformed plants are grown in pots in a growth chamber (e.g. York, Mannheim, Germany). In case the plants are Arabidopsis thaliana nutrient rich soil (GS90, Tantau, Wansdorf, Germany) is used. Pots are filled with soil and placed into trays. Water is added to the trays to let the soil take up appropriate amount of water for the sowing procedure. The seeds for transgenic Arabidopsis thaliana C24 plants are sown in pots (10 cm diameter). Then the filled tray is covered with a transparent lid without holes and transferred into the shelf system of the growth chamber. Lid and pots are sprayed daily. Stratification is established for a period of 4 days in the dark at 4° C. for 8 h, in the light (220 μmol/m²s) at 20° C. for 16 h, relative humidity with 68%. After 4 days the parameter are changed to 12 h light and 12 h darkness and covers are removed. In case the transgenic plants contain the bar marker gene, BASTA selection is done at day 5, 7, 10 and 12 after sowing by spraying pots with plantlets from the top. Therefore, a 0.02% (v/v) solution of BASTA concentrate (183 g/l glufosinate-ammonium) in tap water is sprayed. The location of the trays inside the chambers is changed on working days after sowing. Watering is done as necessary after covers is removed from the trays. Plants are piqued 14 days after sowing in another pot with GS90, 5 plants together in 1 pot and 3 pots per line. 4 lines and 1 wild type (in the middle) can be placed together in 1 tray. The tray is covered with the lid and sprayed for 3 days. Positive (sensitive=pad3-1-wt-F1-(1)) and negative (resistant=Col-O-Lehle-F1-(1)) controls can be in an extra tray. 28 days after sowing phenotypic information is valued in case of plants differ from the wild type control. 31 days after sowing tap water is added in the tray in a height of 1 cm. A day later plants are sprayed 3 times with the fungal spore suspensions preferably Alternaria brassicicola or Alternaria alternate (1.5×10⁶ spores/ml) and covered again. Lid are sprayed 2 times a day with water for 2 days. 3 and 4 days after inoculation the evaluation were done.

[0085] The disease symptoms can be scored in comparison to untransformed wild type control plants. The range of scoring can be between 1 and 5. Leafs with symptoms of chlorotic areas and mazaration of the tissue are counted of all three pots. The phenotype (bigness and habitus) of the plants have an influence to the final scoring.

[0086] In one embodiment the invention provides plants with broad spectrum stress resistance as compared to a corresponding non-transformed wild type control.

[0087] In one embodiment “broad spectrum” resistance refers to enhanced resistance against at least two, three, four, or more stress conditions. Stress conditions can be abiotic and/or biotic stress. Preferably the plants according to the invention have a increased resistance to pathogenic fungi and preferably a further increased yield related trait.

[0088] In one embodiment “broad spectrum” resistance refers to enhanced resistance against at least two, three, four, or more pathogens of different pathogen species. Preferably the pathogens are selected from the group consisting of pathogenic fungi.

[0089] In one embodiment of the invention pathogenic fungi and the disease with which they are associated are selected from the group consisting of:

[0090] Plasmodiophoromycota such as Plasmodiophora brassicae (clubroot of crucifers), Spongospora subterranea (powdery scab of potato tubers), Polymyxa graminis (root disease of cereals and grasses),

[0091] Oomycota such as Bremia lactucae (downy mildew of lettuce), Peronospora (downy mildew) in snapdragon (P. antirrhini), onion (P. destructor), spinach (P. effusa), soybean (P. manchurica), tobacco (“blue mold”; P. tabacina), alfalfa and clover (P. trifolium), Pseudoperonospora humuli (downy mildew of hops), Plasmopara (downy mildew in grapevines) (P. viticola) and sunflower (P. halstedii), Sclerophtohra macrospora (downy mildew in cereals and grasses), Pythium (seed rot, seedling damping-off, and root rot of all types of plants, for example damping-off of Beta beet caused by P. debaryanum), Phytophthora infestans (blight in potato, brown rot in tomato and the like), Albugo spec. (white rust on cruciferous plants) or Phytophthora sojae.

[0092] Ascomycota such as Microdochium nivale (snow mold of rye and wheat), Fusarium graminearum, Fusarium culmorum (partial ear sterility mainly in wheat), Fusarium oxysporum (Fusarium wilt of tomato), Blumeria graminis (powdery mildew of barley (f. sp. hordei) and wheat (f. sp. tritici)), Erysiphe pisi (powdery mildew of pea), Nectria galligena (Nectria canker of fruit trees), Uncinula necator (powdery mildew of grapevine), Pseudopeziza tracheiphila (red fire disease of grapevine), Claviceps purpurea (ergot on, for example, rye and grasses), Gaeumannomyces graminis (take-all on wheat, rye and other grasses), Magnaporthe grisea (rice blast disease), Pyrenophora graminea (leaf stripe of barley), Pyrenophora teres (net blotch of barley), Pyrenophora tritici-repentis (leaf blight of wheat), Venturia inaequalis (apple scab), Sclerotinia sclerotium (stalk break, stem rot), Pseudopeziza medicaginis (leaf spot of alfalfa, white and red clover) or Mycoshaerella fijiensis (Black Sigatoka disease), Fusarium rots (Fusarium moniliforme and F. graminearum) and Anthracnose stalk rot (Colletotrichum graminicola), Diplodia stalk rot (Diplodia maydis), charcoal stalk rot (Macrophomina phaseolina).

[0093] Basidiomycetes such as Typhula incarnata (typhula blight on barley, rye, wheat), Ustilago maydis (blister smut on maize), Ustilago nuda (loose smut on barley), Ustilago tritici (loose smut on wheat, spelt), Ustilago avenae (loose smut on oats), Rhizoctonia solani (rhizoctonia root rot of potato), Sphacelotheca spp. (head smut of sorghum), Melampsora lini (rust of flax), Puccinia graminis (stem rust of wheat, barley, rye, oats), Puccinia recondita (leaf rust on wheat), Puccinia dispersa (brown rust on rye), Puccinia hordei (leaf rust of barley), Puccinia coronata (crown rust of oats), Puccinia striiformis (yellow rust of wheat, barley, rye and a large number of grasses), Uromyces appendiculatus (brown rust of bean), Sclerotium rolfsii (root and stem rots of many plants) or Phakopsora pachyrhizi (soybean rust).

[0094] Deuteromycetes (Fungi imperfecti) such as Septoria nodorum (glume blotch) of wheat (Septoria tritici), Pseudocercosporella herpotrichoides (eyespot of wheat, barley, rye), Rynchosporium secalis (leaf spot on rye and barley), Alternaria solani (early blight of potato, tomato), Phoma betae (blackleg on Beta beet), Cercospora beticola (leaf spot on Beta beet), Alternaria brassicae (black spot on oilseed rape, cabbage and other crucifers), Alternaria alternata (Alternaria leaf spot; Tobacco brown spot; Apple core rot; Tomato fruit rot; Bean leaf blight; Apple storage rot; Pear storage rot) Verticillium dahliae (verticillium wilt), Colletotrichum lindemuthianum (bean anthracnose), Phoma lingam (blackleg of cabbage and oilseed rape), Botrytis cinerea (gray mold of grapevine, strawberry, tomato, hops and the like).

[0095] More preferred are Phytophthora infestans (potato blight, brown rot in tomato and the like), Microdochium nivale (previously Fusarium nivale; snow mold of rye and wheat), Fusarium graminearum, Fusarium culmorum (partial ear sterility of wheat), Fusarium oxysporum (Fusarium wilt of tomato), Blumeria graminis (powdery mildew of barley (f. sp. hordei) and wheat (f. sp. tritici)), Magnaporthe grisea (rice blast disease), Sclerotinia sclerotium (stalk break, stem rot), Septoria nodorum and Septoria tritici (glume blotch of wheat), Alternaria brassicae (black spot of oilseed rape, cabbage and other crucifers), Phoma lingam (blackleg of cabbage and oilseed rape) and Alternaria alternata (Alternaria leaf spot; Tobacco brown spot; Apple core rot; Tomato fruit rot; Bean leaf blight; Apple storage rot; Pear storage rot).

[0096] Most preferred are Alternaria brassicae and Alternaria alternata.

[0097] In one embodiment this invention fulfills in part the need to identify new, unique genes capable of conferring increased resistance to abiotic stress, preferably to pathogenic fungi as compared to a corresponding non-transformed wild type control, upon expression or over-expression of endogenous and/or exogenous genes.

[0098] Accordingly, the present invention relates to a method for producing a transgenic plant cell, a plant or a part thereof with increased resistance to biotic abiotic stress, preferably to pathogenic fungi as compared to a corresponding non-transformed wild type control, which comprises
[0099] (a) increasing or generating one or more activities selected from the group consisting of: b3262-protein, b3644-protein, chloramphenicol resistance protein homolog ydeA, chorismate mutase-T and prephenate dehydrogenase, Gamma subunit of the translation initiation factor eIF2B, glucose dehydrogenase, glucose-6-phosphate 1-dehydrogenase, peptidyl-prolyl cis-trans isomerase A (rotamase A), recombinase A, ribosomal protein, RNA polymerase sigma-E factor (sigma-24), Splicing factor that is found in the Cef1p subcomplex of the spliceosome (Prp46p), sulfite reductase (NADPH), flavoprotein beta subunit, transcription regulator farR, fatty acyl-responsive, transmembrane pore-generating protein mglC, YCR087W-protein, YGR150c-protein, YIL172C-protein, YLR168C-protein, YLR407W-protein, and YOR299W-protein. in plant cell, a plant or a part thereof,
[0100] and
[0101] (b) growing the plant cell, a plant or a part thereof under conditions which permit the development of a plant with increased resistance to abiotic stress, preferably to pathogenic fungi abiotic stress, preferably to pathogenic fungi as compared to a corresponding non-transformed wild type plant.

[0102] In a preferred embodiment the present invention relates to a method for producing a transgenic plant cell, a plant or a part thereof with increased resistance to abiotic stress, preferably to pathogenic fungi abiotic stress, preferably to pathogenic fungi as compared to a corresponding non-transformed wild type plant cell, a plant or a part thereof, which comprises increasing or generating one or more activities of a polypeptide selected from the group consisting of:

(i) a polypeptide comprising a polypeptide, a consensus sequence or at least one polypeptide motif as depicted in column 5 or 7 of Table II or of Table IV, respectively; or
(ii) an expression product of a nucleic acid molecule comprising a polynucleotide as depicted in column 5 or 7 of Table I,
(iii) or a functional equivalent of (i) or (ii).

[0103] In a preferred embodiment the present invention relates to a method for producing a transgenic plant cell, a plant or a part thereof with increased resistance to abiotic stress, preferably to pathogenic fungi as compared to a corresponding non-transformed wild type plant cell, a plant or a part thereof, which comprises increasing or generating the expression of at least one nucleic acid molecule comprising a nucleic acid molecule selected from the group consisting of:

(a) a nucleic acid molecule encoding the polypeptide shown in column 5 or 7 of Table II;
(b) a nucleic acid molecule shown in column 5 or 7 of Table I
(c) a nucleic acid molecule, which, as a result of the degeneracy of the genetic code, can be derived from a polypeptide sequence depicted in column 5 or 7 of Table II and confers an increased resistance to biotic stress, preferably pathogenic as compared to a corresponding non-transformed wild type control plant cell, a plant or a part thereof;
(d) a nucleic acid molecule having at least 30% identity with the nucleic acid molecule sequence of a polynucleotide comprising the nucleic acid molecule shown in column 5 or 7 of Table I and confers an increased resistance to biotic stress, preferably pathogenic fungi as compared to a corresponding non-transformed wild type control plant cell, a plant or a part thereof;
(e) a nucleic acid molecule encoding a polypeptide having at least 30% identity with the amino acid sequence of the polypeptide encoded by the nucleic acid molecule of (a) to (c) and having the activity of a polypeptide encoded by a nucleic acid molecule comprising a polynucleotide as depicted in column 5 of Table I and confers an increased resistance to biotic stress, preferably pathogenic fungi as compared to a corresponding non-transformed wild type control plant cell, a plant or a part thereof;
(f) nucleic acid molecule which hybridizes with a nucleic acid molecule of (a) to (c) under stringent hybridization conditions and confers an increased resistance to biotic stress, preferably pathogenic fungi as compared to a corresponding non-transformed wild type control plant cell, a plant or a part thereof;
(g) a nucleic acid molecule encoding a polypeptide which can be isolated with the aid of monoclonal or polyclonal antibodies made against a polypeptide encoded by one of the nucleic acid molecules of (a) to (e) and having the activity represented by the nucleic acid molecule comprising a polynucleotide as depicted in column 5 of Table I;
(h) a nucleic acid molecule encoding a polypeptide comprising the consensus sequence or one or more polypeptide motifs as shown in column 7 of Table IV and preferably having the activity represented by a polypeptide comprising a polypeptide as depicted in column 5 of Table II or IV;
(i) a nucleic acid molecule encoding a polypeptide having the activity represented by a protein as depicted in column 5 of Table II and confers an increased resistance to biotic stress, preferably pathogenic fungi as compared to a corresponding non-transformed wild type control plant cell, a plant or a part thereof;
(j) nucleic acid molecule which comprises a polynucleotide, which is obtained by amplifying a cDNA library or a genomic library using the primers in column 7 of Table III and preferably having the activity represented by a polypeptide comprising a polypeptide as depicted in column 5 of Table II or IV;

[0104] and

(k) a nucleic acid molecule which is obtainable by screening a suitable nucleic acid library under stringent hybridization conditions with a probe comprising a complementary sequence of a nucleic acid molecule of (a) or (b) or with a fragment thereof, having at least 15 nt, preferably 20 nt, 30 nt, 50 nt, 100 nt, 200 nt or 500 nt of a nucleic acid molecule complementary to a nucleic acid molecule sequence characterized in (a) to (e) and encoding a polypeptide having the activity represented by a protein comprising a polypeptide as depicted in column 5 of Table II.

[0105] Unless otherwise noted, the terms used herein are to be understood according to conventional usage by those of ordinary skill in molecular biology. In addition to the definitions of terms provided below, definitions of common terms in molecular biology may also be found in Rieger et al., 1991 Glossary of genetics: classical and molecular, 5^{th} Ed., Berlin: Springer-Verlag; and in Current Protocols in Molecular Biology, F. M. Ausubel et al., Eds., Current Protocols, a joint venture between Greene Publishing Associates, Inc. and John Wiley & Sons, Inc., (1998 Supplement).

[0106] Throughout this application, various publications are referenced. The disclosures of all of these publications and those references cited within those publications in their entireties are hereby incorporated by reference into this application in order to more fully describe the state of the art to which this invention pertains. A number of standard molecular biology techniques are described in Sambrook and Russell, 2001 Molecular Cloning, Third Edition, Cold Spring Harbor, Plainview, N.Y.; Sambrook et al., 1989 Molecular Cloning, Second Edition, Cold Spring Harbor Laboratory, Plainview, N.Y.; Maniatis et al., 1982 Molecular Cloning, Cold Spring Harbor Laboratory, Plainview, N.Y.; Wu (Ed.) 1993 Meth. Enzymol. 218, Part I; Wu (Ed.) 1979 Meth Enzymol. 68; Wu et al., (Eds.) 1983 Meth. Enzymol. 100 and 101; Grossman and Moldave (Eds.) 1980 Meth. Enzymol. 65; Miller (Ed.) 1972 Experiments in Molecular Genetics, Cold Spring Harbor Laboratory, Cold Spring Harbor, N.Y.; Old and Primrose, 1981 Principles of Gene Manipulation, University of California Press, Berkeley; Schleif and Wensink, 1982 Practical Methods in Molecular Biology; Glover (Ed.) 1985 DNA Cloning Vol. I and II, IRL Press, Oxford, UK; Hames and Higgins (Eds.) 1985 Nucleic Acid Hybridization, IRL Press, Oxford, UK; and Setlow and Hollaender 1979 Genetic Engineering: Principles and Methods, Vols. 1-4, Plenum Press, New York.

[0107] As used herein and in the appended claims, the singular form “a”, “an”, or “the” includes plural reference unless the context clearly dictates otherwise. As used herein, the word “or” means any one member of a particular list and also includes any combination of members of that list.

[0108] The term “cell” or “plant cell” as used herein refers to single cell, and also includes a population of cells. The population may be a pure population comprising one cell type. Likewise, the population may comprise more than one cell type. A plant cell within the meaning of the invention may be isolated (e.g., in suspension culture) or comprised in a plant tissue, plant organ or plant at any developmental stage.

[0109] The term “tissue” with respect to a plant (or “plant tissue”) means arrangement of multiple plant cells, including differentiated and undifferentiated tissues of plants. Plant tissues may constitute part of a plant organ (e.g., the epidermis of a plant leaf) but may also constitute tumor tissues (e.g., callus tissue) and various types of cells in culture (e.g., single cells, protoplasts, embryos, calli, protocorm-like bodies, etc.). Plant tissues may be in planta, in organ culture, tissue culture, or cell culture.

[0110] The term “organ” with respect to a plant (or “plant organ”) means parts of a plant and may include, but not limited to, for example roots, fruits, shoots, stems, leaves, hypocotyls, cotyledons, anthers, sepals, petals, pollen, seeds, etc.

[0111] The term “plant” as used herein can, depending on context, be understood to refer to whole plants, plant cells, plant organs, plant seeds, and progeny of same. The word “plant” also refers to any plant, particularly, to seed plant, and may include, but not limited to, crop plants. Plant parts include, but are not limited to, stems, roots, shoots, fruits, ovules, stamens, leaves, embryos, meristematic regions, callus tissue, gametophytes, sporophytes, pollen, microspores, hypocotyls, cotyledons, anthers, sepals, petals, pollen, seeds and the like. The term “plant” as used herein can be monocotyledonous crop plants, such as, for example, cereals including wheat, barley, sorghum, rye, triticale, maize, rice, sugarcane, and trees including apple, pear, quince, plum, cherry, peach, nectarine, apricot, papaya, mango, poplar, pine, sequoia, cedar, and oak. The term “plant” as used herein can be dicotyledonous crop plants, such as pea, alfalfa, soybean, carrot, celery, tomato, potato, cotton, tobacco, pepper, canola, oilseed rape, beet, cabbage, cauliflower, broccoli, lettuce and Arabidopsis thaliana. The class of plants that can be used in the method of the invention is generally as broad as the class of higher and lower plants amenable to transformation techniques, including angiosperms (monocotyledonous and dicotyledonous plants), gymnosperms, ferns, horsetails, psilophytes, bryophytes, and multicellular algae. The plant can be from a genus selected from the group consisting of Medicago, Solanum, Brassica, Cucumis, Solanum, Juglans, Gossypium, Malus, Vitis, Antirrhinum, Populus, Fragaria, Arabidopsis, Picea, Capsicum, Chenopodium, Dendranthema, Pharbitis, Pinus, Pisum, Oryza, Zea, Triticum, Triticale, Secale, Lolium, Hordeum, Glycine, Pseudotsuga, Kalanchoe, Beta, Helianthus, Nicotiana, Cucurbita, Rosa, Fragaria, Lotus, Medicago, Onobrychis, trifolium, Trigonella, Vigna, Citrus, Linum, Geranium, Manihot, Daucus, Raphanus, Sinapis, Atropa, Datura, Hyoscyamus, Nicotiana, Petunia, Digitalis, Majorana, Ciahorium, Lactuca, Bromus, Asparagus, Antirrhinum, Heterocallis, Nemesis, Pelargonium, Panieum, Pennisetum, Ranunculus, Senecio, Salpiglossis, Browaalia, Phaseolus, Avena, and Allium.

[0112] The term “transgenic” as used herein is intended to refer to cells and/or plants which contain a transgene, or whose genome has been altered by the introduction of at least one transgene, or that have incorporated exogenous genes or polynucleotides. Transgenic cells, tissues, organs and plants may be produced by several methods including the introduction of a “transgene” comprising at least one polynucleotide (usually DNA) into a target cell or integration of the transgene into a chromosome of a target cell by way of human intervention, such as by the methods described herein.

[0113] The term “wild type” as used herein refers to a plant cell, seed, plant component, plant tissue, plant organ, or whole plant that has not been genetically modified or treated in an experimental sense.

[0114] The term “control plant” as used herein refers to a plant cell, an explant, seed, plant component, plant tissue, plant organ, or whole plant used to compare against trans-genic or genetically modified plant for the purpose of identifying an enhanced pheno-type or a desirable trait in the transgenic or genetically modified plant. A “control plant” may in some cases be a transgenic plant line that comprises an empty vector or marker gene, but does not contain the recombinant polynucleotide of interest that is present in the transgenic or genetically modified plant being evaluated. A control plant may be a plant of the same line or variety as the transgenic or genetically modified plant being tested, or it may be another line or variety, such as a plant known to have a specific phenotype, characteristic, or known genotype. A suitable control plant would include a genetically unaltered or non-transgenic plant of the parental line used to generate a transgenic plant herein. The term “non-transformed wild type control” according to the invention is a wild type which was genetically modified or treated by the method of the invention, so that it can be used as a control for the plant cell of the invention.

[0115] In accordance with the invention, the plant may be a plant selected from the group consisting of monocotyledonous plants and dicotyledonous plants. The plant can be from a genus selected from the group consisting of maize, wheat, rice, barley, oat, rye, sorghum, banana, and ryegrass. The plant can be from a genus selected from the group consisting of pea, alfalfa, soybean, carrot, celery, tomato, potato, cotton, tobacco, pepper, oilseed rape, beet, cabbage, cauliflower, broccoli, lettuce and Arabidopsis thaliana.

[0116] The present invention also provides a transgenic seed which is true breeding for a polynucleotide described above, parts from the transgenic plant described above, and progeny plants from such a plant, including hybrids and inbreds. The invention also provides a method of plant breeding, e.g., to develop or propagate a crossed transgenic plant. The method comprises crossing a transgenic plant comprising a particular expression vector of the invention with itself or with a second plant, e.g., one lacking the particular expression vector, and harvesting the resulting seed of a crossed plant whereby the harvested seed comprises the particular expression vector. The seed is then planted to obtain a crossed transgenic progeny plant. The plant may be a monocot or a dicot. The crossed transgenic progeny plant may have the particular expression vector inherited through a female parent or through a male parent. The second plant may be an inbred plant. The crossed transgenic plant may be an inbred or a hybrid. Also included within the present invention are seeds of any of these crossed transgenic plants and their progeny.

[0117] Accordingly, the present invention relates to a method for producing a transgenic plant cell, a plant or a part thereof with increased tolerance and/or resistance to environmental stress and increased biomass production as compared to a corresponding non-transformed wild type plant cell, a plant or a part thereof, which comprises

(a) increasing or generating one or more activities selected from the group consisting of: b3262-protein, b3644-protein, chloramphenicol resistance protein homolog ydeA, chorismate mutase-T and prephenate dehydrogenase, Gamma subunit of the translation initiation factor eIF2B, glucose dehydrogenase, glucose-6-phosphate 1-dehydrogenase, peptidyl-prolyl cis-trans isomerase A (rotamase A), recombinase A, ribosomal protein, RNA polymerase sigma-E factor (sigma-24), Splicing factor that is found in the Cef1p subcomplex of the spliceosome (Prp46p), sulfite reductase (NADPH), flavoprotein beta subunit, transcription regulator farR, fatty acyl-responsive, transmembrane pore-generating protein mglC, YCR087W-protein, YGR150c-protein, YIL172C-protein, YLR168C-protein, YLR407W-protein, and YOR299W-protein. in the plastid of a plant cell,
and
(b) growing the plant cell under conditions which permit the development of a plant with increased tolerance and/or resistance to environmental stress and increased biomass production as compared to a corresponding non-transformed wild type plant.

[0118] In one embodiment the present invention relates to a method for producing a transgenic plant cell, a plant or a part thereof with increased tolerance and/or resistance to environmental stress and increased biomass production as compared to a corresponding non-transformed wild type plant cell, a plant or a part thereof, which comprises

(a) increasing or generating the activity of a protein as shown in table II, column 3 encoded by the nucleic acid sequences as shown in table I, column 5 or 7, in the plastid of a plant cell,
and
(b) growing the plant cell under conditions which permit the development of a plant with increased tolerance and/or resistance to environmental stress and increased biomass production as compared to a corresponding non-transformed wild type plant.

[0119] In another embodiment the present invention is related to a method for producing a transgenic plant cell, a plant or a part thereof with increased tolerance and/or resistance to environmental stress and increased biomass production as compared to a corresponding non-transformed wild type plant cell, a plant or a part thereof, which comprises

a. increasing or generating one or more activities selected from the group consisting of: b3262-protein, b3644-protein, chloramphenicol resistance protein homolog ydeA, chorismate mutase-T and prephenate dehydrogenase, Gamma subunit of the translation initiation factor eIF2B, glucose dehydrogenase, glucose-6-phosphate 1-dehydrogenase, peptidyl-prolyl cis-trans isomerase A (rotamase A), recombinase A, ribosomal protein, RNA polymerase sigma-E factor (sigma-24), Splicing factor that is found in the Cef1p subcomplex of the spliceosome (Prp46p), sulfite reductase (NADPH), flavoprotein beta subunit, transcription regulator farR, fatty acyl-responsive, transmembrane pore-generating protein mglC, YCR087W-protein, YGR150c-protein, YIL172C-protein, YLR168C-protein, YLR407W-protein, and YOR299W-protein. in an organelle of a plant cell or
b. increasing or generating the activity of a protein as shown in table II, column 3 encoded by the nucleic acid sequences as shown in table I, column 5 or 7, which are joined to a nucleic acid sequence encoding a transit peptide in a plant cell; or
c. increasing or generating the activity of a protein as shown in table II, column 3 encoded by the nucleic acid sequences as shown in table I, column 5 or 7, which are joined to a nucleic acid sequence encoding chloroplast localization sequence, in a plant cell, and
d. growing the plant cell under conditions which permit the development of a plant with increased tolerance and/or resistance to environmental stress and increased biomass production as compared to a corresponding non-transformed wild type plant.

[0120] In another embodiment, the present invention relates to a method for producing a transgenic plant cell, a plant or a part thereof with increased tolerance and/or resistance to environmental stress and increased biomass production as compared to a corresponding non-transformed wild type plant cell, a plant or a part thereof, which comprises

a) increasing or generating the activity of a protein as shown in table II, column 3 encoded by the nucleic acid sequences as shown in table I, column 5 or 7, in an organelle of a plant through the transformation of the organelle, or
b) increasing or generating the activity of a protein as shown in table II, column 3 encoded by the nucleic acid sequences as shown in table I, column 5 or 7 in the plastid of a plant, or in one or more parts thereof through the transformation of the plastids; and
c) growing the plant cell under conditions which permit the development of a plant with increased tolerance and/or resistance to environmental stress and increased biomass production as compared to a corresponding non-transformed wild type plant.

[0121] In principle the nucleic acid sequence encoding a transit peptide can be isolated from every organism such as microorganisms such as algae or plants containing plastids preferably chloroplasts. A “transit peptide” is an amino acid sequence, whose encoding nucleic acid sequence is translated together with the corresponding structural gene. That means the transit peptide is an integral part of the translated protein and forms an amino terminal extension of the protein. Both are translated as so called “preprotein”. In general the transit peptide is cleaved off from the preprotein during or just after import of the protein into the correct cell organelle such as a plastid to yield the mature protein. The transit peptide ensures correct localization of the mature protein by facilitating the transport of proteins through intracellular membranes. Preferred nucleic acid sequences encoding a transit peptide are derived from a nucleic acid sequence encoding a protein finally resided in the plastid and stemming from an organism selected from the group consisting of the genera

Acetabularia, Arabidopsis, Brassica, Capsicum, Chlamydomonas, Cururbita, Dunaliella, Euglena, Flaveria, Glycine, Helianthus, Hordeum, Lemna, Lolium, Lycopersion, Malus, Medicago, Mesembryanthemum, Nicotiana, Oenotherea, Oryza, Petunia, Phaseolus, Physcomitrella, Pinus, Pisum, Raphanus, Silene, Sinapis, Solanum, Spinacea, Stevia, Synechococcus, Triticum and Zea.

[0122] Advantageously such transit peptides, which are beneficially used in the inventive process, are derived from the nucleic acid sequence encoding a protein selected from the group consisting of

ribulose bisphosphate carboxylase/oxygenase, 5-enolpyruvyl-shikimate-3-phosphate synthase, acetolactate synthase, chloroplast ribosomal protein CS17, Cs protein, ferredoxin, plastocyanin, ribulose bisphosphate carboxylase activase, tryptophan synthase, acyl carrier protein, plastid chaperonin-60, cytochrome c₅₅₂, 22-kDA heat shock protein, 33-kDa Oxygen-evolving enhancer protein 1, ATP synthase γ subunit, ATP synthase δ subunit, chlorophyll-a/b-binding proteinII-1, Oxygen-evolving enhancer protein 2, Oxygen-evolving enhancer protein 3, photosystem I: P21, photosystem I: P28, photosystem I: P30, photosystem I: P35, photosystem I: P37, glycerol-3-phosphate acyltransferases, chlorophyll a/b binding protein, CAB2 protein, hydroxymethyl-bilane synthase, pyruvate-orthophosphate dikinase, CAB3 protein, plastid ferritin, ferritin, early lightinducible protein, glutamate-1-semialdehyde aminotransferase, protochlorophyllide reductase, starch-granule-bound amylase synthase, light-harvesting chlorophyll a/b-binding protein of photosystem II, major pollen allergen Lol p 5a, plastid CIpB ATP-dependent protease, superoxide dismutase, ferredoxin NADP oxidoreductase, 28-kDa ribonucleoprotein, 31-kDa ribonucleoprotein, 33-kDa ribonucleoprotein, acetolactate synthase, ATP synthase CF₀ subunit 1, ATP synthase CF₀ subunit 2, ATP synthase CF₀ subunit 3, ATP synthase CF₀ subunit 4, cytochrome f, ADP-glucose pyrophosphorylase, glutamine synthase, glutamine synthase 2, carbonic anhydrase, GapA protein, heat-shock-protein hsp21, phosphate translocator, plastid CIpA ATP-dependent protease, plastid ribosomal protein CL24, plastid ribosomal protein CL9, plastid ribosomal protein PsCL18, plastid ribosomal protein PsCL25, DAHP synthase, starch phosphorylase, root acyl carrier protein II, betaine-aldehyde dehydrogenase, GapB protein, glutamine synthetase 2, phosphoribulokinase, nitrite reductase, ribosomal protein L12, ribosomal protein L13, ribosomal protein L21, ribosomal protein L35, ribosomal protein L40, triose phosphate-3-phosphoglyerate-phosphate translocator, ferredoxin-dependent glutamate synthase, glyceraldehyde-3-phosphate dehydrogenase, NADP-dependent malic enzyme and NADP-malate dehydrogenase.

[0123] More preferred the nucleic acid sequence encoding a transit peptide is derived from a nucleic acid sequence encoding a protein finally resided in the plastid and stemming from an organism selected from the group consisting of the species:

Acetabularia mediterranea, Arabidopsis thaliana, Brassica campestris, Brassica napus, Capsicum annuum, Chlamydomonas reinhardtii, Cururbita moschata, Dunaliella salina, Dunaliella tertiolecta, Euglena gracilis, Flayeria trinervia, Glycine max, Helianthus annuus, Hordeum vulgare, Lemna gibba, Lolium perenne, Lycopersion esculentum, Malus domestica, Medicago falcata, Medicago sativa, Mesembryanthemum crystallinum, Nicotiana plumbaginifolia, Nicotiana sylvestris, Nicotiana tabacum, Oenotherea hookeri, Oryza sativa, Petunia hybrida, Phaseolus vulgaris, Physcomitrella patens, Pinus tunbergii, Pisum sativum, Raphanus sativus, Silene pratensis, Sinapis alba, Solanum tuberosum, Spinacea oleracea, Stevia rebaudiana, Synechococcus, Synechocystis, Triticum aestivum and Zea mays.

[0124] Even more preferred nucleic acid sequences are encoding transit peptides as disclosed by von Heijne et al. [Plant Molecular Biology Reporter, Vol. 9 (2), 1991: 104-126], which are hereby incorporated by reference. Table V shows some examples of the transit peptide sequences disclosed by von Heijne et al. According to the disclosure of the invention especially in the examples the skilled worker is able to link other nucleic acid sequences disclosed by von Heijne et al. to the nucleic acid sequences shown in table I, columns 5 and 7. Most preferred nucleic acid sequences encoding transit peptides are derived from the genus Spinacia such as chlorplast 30S ribosomal protein PSrp-1, root acyl carrier protein II, acyl carrier protein, ATP synthase: γ subunit, ATP synthase: δ subunit, cytochrom f, ferredoxin I, ferredoxin NADP oxidoreductase (=FNR), nitrite reductase, phosphoribulokinase, plastocyanin or carbonic anhydrase. The skilled worker will recognize that various other nucleic acid sequences encoding transit peptides can easely isolated from plastid-localized proteins, which are expressed from nuclear genes as precursors and are then targeted to plastids. Such transit peptides encoding sequences can be used for the construction of other expression constructs. The transit peptides advantageously used in the inventive process and which are part of the inventive nucleic acid sequences and proteins are typically 20 to 120 amino acids, preferably 25 to 110, 30 to 100 or 35 to 90 amino acids, more preferably 40 to 85 amino acids and most preferably 45 to 80 amino acids in length and functions post-translationally to direct the protein to the plastid preferably to the chloroplast. The nucleic acid sequences encoding such transit peptides are localized upstream of nucleic acid sequence encoding the mature protein. For the correct molecular joining of the transit peptide encoding nucleic acid and the nucleic acid encoding the protein to be targeted it is sometimes necessary to introduce additional base pairs at the joining position, which forms restriction enzyme recognition sequences useful for the molecular joining of the different nucleic acid molecules. This procedure might lead to very few additional amino acids at the N-terminal of the mature imported protein, which usually and preferably do not interfere with the protein function. In any case, the additional base pairs at the joining position which forms restriction enzyme recognition sequences have to be chosen with care, in order to avoid the formation of stop codons or codons which encode amino acids with a strong influence on protein folding, like e.g. proline. It is preferred that such additional codons encode small structural flexible amino acids such as glycine or alanine.

[0125] As mentioned above the nucleic acid sequences coding for the proteins as shown in table II, column 3 and its homologs as disclosed in table I, columns 5 and 7 can be joined to a nucleic acid sequence encoding a transit peptide. This nucleic acid sequence encoding a transit peptide ensures transport of the protein to the plastid. The nucleic acid sequence of the gene to be expressed and the nucleic acid sequence encoding the transit peptide are operably linked. Therefore the transit peptide is fused in frame to the nucleic acid sequence coding for proteins as shown in table II, column 3 and its homologs as disclosed in table I, columns 5 and 7.

[0126] The term “organelle” according to the invention shall mean for example “mitochondria” or preferably “plastid” (throughout the specification the “plural” shall comprise the “singular” and vice versa). The term “plastid” according to the invention are intended to include various forms of plastids including proplastids, chloroplasts, chromoplasts, gerontoplasts, leucoplasts, amyloplasts, elaioplasts and etioplasts preferably chloroplasts. They all have as a common ancestor the aforementioned proplasts.

[0127] Other transit peptides are disclosed by Schmidt et al. [J. Biol. Chem., Vol. 268, No. 36, 1993: 27447-27457], Della-Cioppa et al. [Plant. Physiol. 84, 1987: 965-968], de Castro Silva Filho et al. [Plant Mol. Biol., 30, 1996: 769-780], Zhao et al. [J. Biol. Chem. Vol. 270, No. 11, 1995: 6081-6087], Römer et al. [Biochem. Biophys. Res. Commun., Vol. 196, No. 3, 1993: 1414-1421], Keegstra et al. [Annu. Rev. Plant Physiol. Plant Mol. Biol., 40, 1989: 471-501], Lubben et al. [Photosynthesis Res., 17, 1988: 173-194] and Lawrence et al. [J. Biol. Chem., Vol. 272, No. 33, 1997: 20357-20363]. A general review about targeting is disclosed by Kermode Allison R. in Critical Reviews in Plant Science 15 (4): 285-423 (1996) under the title “Mechanisms of Intracellular Protein Transport and Targeting in Plant Cells.”

[0128] Favored transit peptide sequences, which are used in the inventive process and which forms part of the inventive nucleic acid sequences are generally enriched in hydroxylated amino acid residues (serine and threonine), with these two residues generally constituting 20-35% of the total. They often have an amino-terminal region empty of Gly, Pro, and charged residues. Furthermore they have a number of small hydrophobic amino acids such as valine and alanine and generally acidic amino acids are lacking. In addition they generally have a middle region rich in Ser, Thr, Lys and Arg. Overall they have very often a net positive charge.

[0129] Alternatively, nucleic acid sequences coding for the transit peptides may be chemically synthesized either in part or wholly according to structure of transit peptide sequences disclosed in the prior art. Said natural or chemically synthesized sequences can be directly linked to the sequences encoding the mature protein or via a linker nucleic acid sequence, which may be typically less than 500 base pairs, preferably less than 450, 400, 350, 300, 250 or 200 base pairs, more preferably less than 150, 100, 90, 80, 70, 60, 50, 40 or 30 base pairs and most preferably less than 25, 20, 15, 12, 9, 6 or 3 base pairs in length and are in frame to the coding sequence. Furthermore favorable nucleic acid sequences encoding transit peptides may comprise sequences derived from more than one biological and/or chemical source and may include a nucleic acid sequence derived from the amino-terminal region of the mature protein, which in its native state is linked to the transit peptide. In a preferred embodiment of the invention said amino-terminal region of the mature protein is typically less than 150 amino acids, preferably less than 140, 130, 120, 110, 100 or 90 amino acids, more preferably less than 80, 70, 60, 50, 40, 35, 30, 25 or 20 amino acids and most preferably less than 19, 18, 17, 16, 15, 14, 13, 12, 11 or 10 amino acids in length. But even shorter or longer stretches are also possible. In addition target sequences, which facilitate the transport of proteins to other cell compartments such as the vacuole, endoplasmic reticulum, golgi complex, glyoxysomes, peroxisomes or mitochondria may be also part of the inventive nucleic acid sequence. The proteins translated from said inventive nucleic acid sequences are a kind of fusion proteins that means the nucleic acid sequences encoding the transit peptide for example the ones shown in table V, preferably the last one of the table are joint to the nucleic acid sequences shown in table I, columns 5 and 7. The person skilled in the art is able to join said sequences in a functional manner. Advantageously the transit peptide part is cleaved off from the protein part shown in table II, columns 5 and 7 during the transport preferably into the plastids. All products of the cleavage of the preferred transit peptide shown in the last line of table V have preferably the N-terminal amino acid sequences QIA CSS or QIA EFQLTT in front of the start methionine of the protein mentioned in table II, columns 5 and 7. Other short amino acid sequences of an range of 1 to 20 amino acids preferable 2 to 15 amino acids, more preferable 3 to 10 amino acids most preferably 4 to 8 amino acids are also possible in front of the start methionine of the protein mentioned in table II, columns 5 and 7. In case of the amino acid sequence QIA CSS the three amino acids in front of the start methionine are stemming from the LIC (=ligatation independent cloning) cassette. Said short amino acid sequence is preferred in the case of the expression of E. coli genes. In case of the amino acid sequence QIA EFQLTT the six amino acids in front of the start methionine are stemming from the LIC cassette. Said short amino acid sequence is preferred in the case of the expression of S. cerevisiae genes. The skilled worker knows that other short sequences are also useful in the expression of the genes mentioned in table I, columns 5 and 7. Furthermore the skilled worker is aware of the fact that there is not a need for such short sequences in the expression of the genes.

TABLE V
Examples of transit peptides disclosed by von Heijne et al.

| Trans | | | SEQ ID | |
|---|---|---|---|---|
| Pep | Organism | Transit Peptide | NO: | Reference |
| 1 | Acetabularia | MASIMMNKSVVLSKECAKPLATPK | 19 | Mol. Gen. |
| | mediterranea | VTLNKRGFATTIATKNREMMVWQP | | Genet. |
| | | FNNKMFETFSFLPP | | 218:445 - |
| | | | | 452(1989) |

| | | | | |
|---|---|---|---|---|
| 2 | Arabidopsis | MAASLQSTATFLQSAKIATAPSRG | 20 | EMBO J. |
| | thaliana | SSHLRSTQAVGKSFGLETSSARLT | | 8:3187 - |
| | | CSFQSDFKDFTGKCSDAVKIAGFA | | 3194(1989) |
| | | LATSALVVSGASAEGAPK | | |
| 3 | Arabidopsis | MAQVSRICNGVQNPSLICNLSKSS | 21 | Mol. Gen. |
| | thaliana | QRKSPLSVSLKTQQHPRAYPISSS | | Genet. |
| | | WGLKKSGMTLIGSELRPLKVMSSV | | 210: 437 - |
| | | STAEKASEIVLQPIREISGLIKLP | | 442(1987) |
| 4 | Arabidopsis | MAAATTTTTTSSSISFSTKPSPSS | 22 | Plant |
| | thaliana | SKSPLPISRFSLPFSLNPNKSSSS | | Physiol. |
| | | SRRRGIKSSSPSSISAVLNTTTNV | | 85:1110 - |
| | | TTTPSPTKPTKPETFISRFAPDQP | | 1117 |
| | | RKGA | | (1987) |
| 5 | Arabidopsis | MITSSLTCSLQALKLSSPFAHGST | 23 | J. Biol. |
| | thaliana | PLSSLSKPNSFPNHRMPALVPV | | Chem. |
| | | | | 2652763 - |
| | | | | 2767 |
| | | | | (1990) |
| 6 | Arabidopsis | MASLLGTSSSAIWASPSLSSPSSK | 24 | EMBO J. |
| | thaliana | PSSSPICFRPGKLFGSKLNAGIQI | | 9:1337 - |
| | | RPKKNRSRYHVSVMNVATEINSTE | | 1346 |
| | | QVVGKFDSKKSARPVYPFAAI | | (1990) |
| 7 | Arabidopsis | MASTALSSAIVGTSFIRRSPAPIS | 25 | Plant |
| | thaliana | LRSLPSANTQSLFGLKSGTARGGR | | Physiol. |
| | | VVAM | | 93: 572 - |
| | | | | 577(1990) |
| 8 | Arabidopsis | MAASTMALSSPAFAGKAVNLSPAA | 26 | Nucl. |
| | thaliana | SEVLGSGRVTNRKTV | | Acids Res. |
| | | | | 14:4051 - |
| | | | | 4064 |
| | | | | (1986) |
| 9 | Arabidopsis | MAAITSATVTIPSFTGLKLAVSSK | 27 | Gene 65: |
| | thaliana | PKTLSTISRSSSATRAPPKLALKS | | 59 - 69 |
| | | SLKDFGVIAVATAASIVLAGNAMA | | (1988) |
| | | MEVLLGSDDGSLAFVPSEFT | | |
| 10 | Arabidopsis | MAAAVSTVGAINRAPLSLNGSGSG | 28 | Nucl. Ac- |
| | thaliana | AVSAPASTFLGKKWTVSRFAQSNK | | ids Res. |
| | | KSNGSFKVLAVKEDKQTDGDRWRG | | 17: 2871 |
| | | LAYDTSDDQIDI | | (1989) |
| 11 | Arabidopsis | MkSSMLSSTAWTSPAQATMVAPFT | 29 | Plant Mol. |
| | thaliana | GLKSSASFPVTRKANNDITSITSN | | Biol. 11: |
| | | GGRVSC | | 745 - 759 |
| | | | | (1988) |
| 12 | Arabidopsis | MAASGTSATFRASVSSAPSSSSQL | 30 | Proc. Natl. |
| | thaliana | THLKSPFKAVKYTPLPSSRSKSSS | | Acad. Sci. |
| | | FSVSCTIAKDPPVLMAAGSDPALW | | USA, 86: |
| | | QRPDSFGRFGKFGGKYVPE | | 4604 - |
| | | | | 4608 |
| | | | | (1989) |
| 13 | Brassica | MSTTFCSSVCMQATSLAATTRISF | 31 | Nucl. Ac- |
| | campestris | QKPALVSTTNLSFNLRRSIPTRFS | | ids Res. |
| | | ISCAAKPETVEKVSKIVKKQLSLK | | 15: 7197 - |
| | | DDQKVVAE | | (1987) |
| 14 | Brassica napus | MATTFSASVSMQATSLATTTRISF | 32 | Eur. J. |
| | | QKPVLVSNHGRTNLSFNLSRTRLS | | Biochem. |
| | | ISC | | 174: 287 - |
| | | | | 295 (1988) |
| 15 | Chlamydomonas | MQALSSRVNIAAKPQRAQRLWRA | 33 | Plant Mol. |
| | reinhardtii | EEVKAAPKKEVGPKRGSLVK | | Biol. 12: |
| | | | | 463-474 |
| | | | | (1989) |
| 16 | Cucurbita | MAELIQDKESAQSAATAAAASSGY | 32 | FEBS Lett. |
| | moschata | ERRNEPAHSRKFLEVRSEEELL- | | 238: 424 - |
| | | SCIKK | | 430 (1988) |
| 17 | Spinacea | MSTINGCLTSISPSRTQLKNTSTL | 34 | J. Biol. |
| | oleracea | RPTFIANSRVNPSSSVPPSLIRNQ | | Chem. |
| | | PVFAAPAPIITPTL | | 265: |
| | | | | 105414 - |
| | | | | 5417 |
| | | | | (1990) |
| 18 | Spinacea | MTTAVTAAVSFPSTKTTSLSARCS | 35 | Curr. |
| | oleracea | SVISPDKISYKKVPLYYRNVSATG | | Genet. 13: |
| | | KMGPIRAQIASDVEAPPPAPAK- | | 517 - 522 |
| | | VEKMS | | (1988) |
| 19 | Spinacea | MTTAVTAAVSFPSTKTTSLSARSS | 36 | |
| | oleracea | SVISPDKISYKKVPLYYRNVSATG | | |
| | | KMGPIRA | | |

[0130] Alternatively to the targeting of the sequences shown in table II, columns 5 and 7 preferably of sequences in general encoded in the nucleus with the aid of the targeting sequences mentioned for example in table V alone or in combination with other targeting sequences preferably into the plastids, the nucleic acids of the invention can directly be introduced into the plastidal genome. Therefore in a preferred embodiment the nucleic acid sequences shown in table I, columns 5 and 7 are directly introduced and expressed in plastids.

[0131] The term “introduced” in the context of this specification shall mean the insertion of a nucleic acid sequence into the organism by means of a “transfection”, “transduction” or preferably by “transformation”.

[0132] A plastid, such as a chloroplast, has been “transformed” by an exogenous (preferably foreign) nucleic acid sequence if nucleic acid sequence has been introduced into the plastid that means that this sequence has crossed the membrane or the membranes of the plastid. The foreign DNA may be integrated (covalently linked) into plastid DNA making up the genome of the plastid, or it may remain unintegrated (e.g., by including a chloroplast origin of replication). “Stably” integrated DNA sequences are those, which are inherited through plastid replication, thereby transferring new plastids, with the features of the integrated DNA sequence to the progeny.

[0133] For expression a person skilled in the art is familiar with different methods to introduce the nucleic acid sequences into different organelles such as the preferred plastids. Such methods are for example disclosed by Pal Maiga (Annu. Rev. Plant Biol., 2004, 55: 289-313), Thomas Evans (WO 2004/040973), Kevin E. McBride et al. (U.S. Pat. No. 5,455,818), Henry Daniell et al. (U.S. Pat. No. 5,932,479 and U.S. Pat. No. 5,693,507) and Jeffrey M. Straub et al. (U.S. Pat. No. 6,781,033). A preferred method is the transformation of microspore-derived hypocotyl or cotyledonary tissue (which are green and thus contain numerous plastids) leaf tissue and afterwards the regeneration of shoots from said transformed plant material on selective medium. As methods for the transformation bombarding of the plant material or the use of independently replicating shuttle vectors are well known by the skilled worker. But also a PEG-mediated transformation of the plastids or Agrobacterium transformation with binary vectors is possible. Useful markers for the transformation of plastids are positive selection markers for example the chloramphenicol-, streptomycin-, kanamycin-, neomycin-, amikamycin-, spectinomycin-, triazine- and/or lincomycin-resistance genes. As additional markers named in the literature often as secondary markers, genes coding for the resistance against herbicides such as phosphinothricin (=glufosinate, BASTA™, Liberty™, encoded by the bar gene), glyphosate (=N-(phosphonomethyl)glycine, Roundup Ready™, encoded by the 5-enolpyruvylshikimate-3-phosphate synthase gene=epsps), sulfonylurea (=Staple™, encoded by the acetolactate synthase gene), imidazolinone [=IMI, imazethapyr, imazamox, Clearfield™, encoded by the acetohydroxyacid synthase (AHAS) gene, also known as acetolactate synthase (ALS) gene] or bromoxynil (=Buctril™, encoded by the oxy gene) or genes coding for antibiotics such as hygromycin or G418 are useful for further selection. Such secondary markers are useful in the case when most genome copies are transformed. In addition negative selection markers such as the bacterial cytosine deaminase (encoded by the codA gene) are also useful for the transformation of plastids.

[0134] To increase the possibility of identification of transformants it is also desirable to use reporter genes other then the aforementioned resistance genes or in addition to said genes. Reporter genes are for example β-galactosidase-, β-glucuronidase-(GUS), alkaline phosphatase- and/or green-fluorescent protein-genes (GFP).

[0135] For the inventive process it is of great advantage that by transforming the plastids the intraspecies specific transgene flow is blocked, because a lot of species such as corn, cotton and rice have a strict maternal inheritance of plastids. By placing the genes specified in table I, columns 5 and 7 or active fragments thereof in the plastids of plants, these genes will not be present in the pollen of said plants. A further preferred embodiment of the invention relates to the use of so called “chloroplast localization sequences”, in which a first RNA sequence or molecule is capable of transporting or “chaperoning” a second RNA sequence, such as a RNA sequence transcribed from the sequences depicted in table I, columns 5 and 7 or a sequence encoding a protein, as depicted in table II, columns 5 and 7, from an external environment inside a cell or outside a plastid into a chloroplast. In one embodiment the chloroplast localization signal is substantially similar or complementary to a complete or intact viroid sequence. The chloroplast localization signal may be encoded by a DNA sequence, which is transcribed into the chloroplast localization RNA. The term “viroid” refers to a naturally occurring single stranded RNA molecule (Flores, C R Acad Sci III. 2001 October; 324(10):943-52). Viroids usually contain about 200-500 nucleotides and generally exist as circular molecules. Examples of viroids that contain chloroplast localization signals include but are not limited to ASBVd, PLMVd, CChMVd and ELVd. The viroid sequence or a functional part of it can be fused to the sequences depicted in table I, columns 5 and 7 or a sequence encoding a protein, as depicted in table II, columns 5 and 7 in such a manner that the viroid sequence transports a sequence transcribed from a sequence as depicted in table I, columns 5 and 7 or a sequence encoding a protein as depicted in table II, columns 5 and 7 into the chloroplasts. A preferred embodiment uses a modified ASBVd (Navarro et al., Virology. 2000 Mar. 1; 268(1):218-25).

[0136] In a further specific embodiment the protein to be expressed in the plastids such as the proteins depicted in table II, columns 5 and 7 are encoded by different nucleic acids. Such a method is disclosed in WO 2004/040973, which shall be incorporated by reference. WO 2004/040973 teaches a method, which relates to the translocation of an RNA corresponding to a gene or gene fragment into the chloroplast by means of a chloroplast localization sequence. The genes, which should be expressed in the plant or plants cells, are split into nucleic acid fragments, which are introduced into different compartments in the plant e.g. the nucleus, the plastids and/or mitochondria. Additionally plant cells are described in which the chloroplast contains a ribozyme fused at one end to an RNA encoding a fragment of a protein used in the inventive process such that the ribozyme can trans-splice the translocated fusion RNA to the RNA encoding the gene fragment to form and as the case may be reunite the nucleic acid fragments to an intact mRNA encoding a functional protein for example as disclosed in table II, columns 5 and 7.

[0137] In a preferred embodiment of the invention the nucleic acid sequences as shown in table I, columns 5 and 7 used in the inventive process are transformed into plastids, which are metabolical active. Those plastids should preferably maintain at a high copy number in the plant or plant tissue of interest, most preferably the chloroplasts found in green plant tissues, such as leaves or cotyledons or in seeds.

[0138] For a good expression in the plastids the nucleic acid sequences as shown in table I, columns 5 and 7 are introduced into an expression cassette using a preferably a promoter and terminator, which are active in plastids preferably a chloroplast promoter. Examples of such promoters include the psbA promoter from the gene from spinach or pea, the rbcL promoter, and the atpB promoter from corn.

[0139] For the purposes of the description of the present invention, the terms “cytoplasmic” and “non-targeted” are exchangeable and shall indicate, that the nucleic acid of the invention is expressed without the addition of an non-natural transit peptide encoding sequence. A non-natural transit peptide encoding sequence is a sequence which is not a natural part of a nucleic acid of the invention, e.g. of the nucleic acids depicted in table I column 5 or 7, but is rather added by molecular manipulation steps as for example described in the example under “plastid targeted expression”. Therefore the terms “cytoplasmic” and “non-targeted” shall not exclude a targeted localisation to any cell compartment for the products of the inventive nucleic acid sequences by their naturally occurring sequence properties within the background of the transgenic organism. The subcellular location of the mature polypeptide derived from the enclosed sequences can be predicted by a skilled person for the organism (plant) by using software tools like TargetP (Emanuelsson et al., (2000), Predicting subcellular localization of proteins based on their N-terminal amino acid sequence., J. Mol. Biol. 300, 1005-1016.), ChloroP (Emanuelsson et al. (1999), ChloroP, a neural network-based method for predicting chloroplast transit peptides and their cleavage sites., Protein Science, 8: 978-984.) or other predictive software tools (Emanuelsson et al. (2007), Locating proteins in the cell using TargetP, SignalP, and related tools., Nature Protocols 2, 953-971).

[0140] Comprises/comprising and grammatical variations thereof when used in this specification are to be taken to specify the presence of stated features, integers, steps or components or groups thereof, but not to preclude the presence or addition of one or more other features, integers, steps, components or groups thereof.

[0141] In accordance with the invention, the term “plant cell” or the term “organism” as understood herein relates always to a plant cell or a organelle thereof, preferably a plastid, more preferably chloroplast.

[0142] As used herein, “plant” is meant to include not only a whole plant but also a part thereof i.e., one or more cells, and tissues, including for example, leaves, stems, shoots, roots, flowers, fruits and seeds.

[0143] Surprisingly it was found, that the transgenic expression of the Saccaromyces cerevisiae protein as shown in table II, column 3 and/or the transgenic expression of the E. coli protein as shown in table II, column 3 in a plant such as Arabidopsis thaliana for example, conferred to the transgenic a plant cell, a plant or a part thereof increased resistance to biotic stress, preferably pathogenic fungi as compared to a corresponding non-transformed wild type control plant cell, a plant or a part thereof

[0144] Accordingly, in one embodiment, in case the activity of the Escherichia coli nucleic acid molecule or a polypeptide comprising the nucleic acid SEQ ID NO.: 38 or polypeptide SEQ ID NO.: 39, respectively is increased or generated, e.g. if the activity of a nucleic acid molecule or a polypeptide comprising the nucleic acid or polypeptide or the consensus sequence or the polypeptide motif, as depicted in Table I, II or IV, column 7 in the respective same line as the nucleic acid molecule SEQ ID NO.: 38 or polypeptide SEQ ID NO.: 39, respectively is increased or generated or if the activity “glucose dehydrogenase” is increased or generated in an plant cell, plant or part thereof an increased resistance to biotic stress, preferably pathogenic fungi as compared to a corresponding non-transformed wild type control plant cell, a plant or a part thereof is conferred.

[0145] Accordingly, in one embodiment, in case the activity of the Escherichia coli nucleic acid molecule or a polypeptide comprising the nucleic acid SEQ ID NO.: 146 or polypeptide SEQ ID NO.: 147, respectively is increased or generated, e.g. if the activity of a nucleic acid molecule or a polypeptide comprising the nucleic acid or polypeptide or the consensus sequence or the polypeptide motif, as depicted in Table I, II or IV, column 7 in the respective same line as the nucleic acid molecule SEQ ID NO.: 146 or polypeptide SEQ ID NO.: 147, respectively is increased or generated or if the activity “transcription regulator farR, fatty acyl-responsive” is increased or generated in an plant cell, plant or part thereof an increased resistance to biotic stress, preferably pathogenic fungi as compared to a corresponding non-transformed wild type control plant cell, a plant or a part thereof is conferred.

[0146] Accordingly, in one embodiment, in case the activity of the Escherichia coli nucleic acid molecule or a polypeptide comprising the nucleic acid SEQ ID NO.: 165 or polypeptide SEQ ID NO.: 166, respectively is increased or generated, e.g. if the activity of a nucleic acid molecule or a polypeptide comprising the nucleic acid or polypeptide or the consensus sequence or the polypeptide motif, as depicted in Table I, II or IV, column 7 in the respective same line as the nucleic acid molecule SEQ ID NO.: 165 or polypeptide SEQ ID NO.: 166, respectively is increased or generated or if the activity “chloramphenicol resistance protein homolog ydeA” is increased or generated in an plant cell, plant or part thereof an increased resistance to biotic stress, preferably pathogenic fungi as compared to a corresponding non-transformed wild type control plant cell, a plant or a part thereof is conferred.

[0147] Accordingly, in one embodiment, in case the activity of the Escherichia coli nucleic acid molecule or a polypeptide comprising the nucleic acid SEQ ID NO.: 242 or polypeptide SEQ ID NO.: 243, respectively is increased or generated, e.g. if the activity of a nucleic acid molecule or a polypeptide comprising the nucleic acid or polypeptide or the consensus sequence or the polypeptide motif, as depicted in Table I, II or IV, column 7 in the respective same line as the nucleic acid molecule SEQ ID NO.: 242 or polypeptide SEQ ID NO.: 243, respectively is increased or generated or if the activity “transmembrane pore-generating protein mglC” is increased or generated in an plant cell, plant or part thereof an increased resistance to biotic stress, preferably pathogenic fungi as compared to a corresponding non-transformed wild type control plant cell, a plant or a part thereof is conferred.

[0148] Accordingly, in one embodiment, in case the activity of the Escherichia coli nucleic acid molecule or a polypeptide comprising the nucleic acid SEQ ID NO.: 312 or polypeptide SEQ ID NO.: 313, respectively is increased or generated, e.g. if the activity of a nucleic acid molecule or a polypeptide comprising the nucleic acid or polypeptide or the consensus sequence or the polypeptide motif, as depicted in Table I, II or IV, column 7 in the respective same line as the nucleic acid molecule SEQ ID NO.: 312 or polypeptide SEQ ID NO.: 313, respectively is increased or generated or if the activity “RNA polymerase sigma-E factor (sigma-24)” is increased or generated in an plant cell, plant or part thereof an increased resistance to biotic stress, preferably pathogenic fungi as compared to a corresponding non-transformed wild type control plant cell, a plant or a part thereof is conferred.

[0149] Accordingly, in one embodiment, in case the activity of the Escherichia coli nucleic acid molecule or a polypeptide comprising the nucleic acid SEQ ID NO.: 468 or polypeptide SEQ ID NO.: 469, respectively is increased or generated, e.g. if the activity of a nucleic acid molecule or a polypeptide comprising the nucleic acid or polypeptide or the consensus sequence or the polypeptide motif, as depicted in Table I, II or IV, column 7 in the respective same line as the nucleic acid molecule SEQ ID NO.: 468 or polypeptide SEQ ID NO.: 469, respectively is increased or generated or if the activity “chorismate mutase-T and prephenate dehydrogenase” is increased or generated in an plant cell, plant or part thereof an increased resistance to biotic stress, preferably pathogenic fungi as compared to a corresponding non-transformed wild type control plant cell, a plant or a part thereof is conferred.

[0150] Accordingly, in one embodiment, in case the activity of the Escherichia coli nucleic acid molecule or a polypeptide comprising the nucleic acid SEQ ID NO.: 534 or polypeptide SEQ ID NO.: 535, respectively is increased or generated, e.g. if the activity of a nucleic acid molecule or a polypeptide comprising the nucleic acid or polypeptide or the consensus sequence or the polypeptide motif, as depicted in Table I, II or IV, column 7 in the respective same line as the nucleic acid molecule SEQ ID NO.: 534 or polypeptide SEQ ID NO.: 535, respectively is increased or generated or if the activity “recombinase A” is increased or generated in an plant cell, plant or part thereof an increased resistance to biotic stress, preferably pathogenic fungi as compared to a corresponding non-transformed wild type control plant cell, a plant or a part thereof is conferred.

[0151] Accordingly, in one embodiment, in case the activity of the Escherichia coli nucleic acid molecule or a polypeptide comprising the nucleic acid SEQ ID NO.: 970 or polypeptide SEQ ID NO.: 971, respectively is increased or generated, e.g. if the activity of a nucleic acid molecule or a polypeptide comprising the nucleic acid or polypeptide or the consensus sequence or the polypeptide motif, as depicted in Table I, II or IV, column 7 in the respective same line as the nucleic acid molecule SEQ ID NO.: 970 or polypeptide SEQ ID NO.: 971, respectively is increased or generated or if the activity “sulfite reductase (NADPH), flavoprotein beta subunit” is increased or generated in an plant cell, plant or part thereof an increased resistance to biotic stress, preferably pathogenic fungi as compared to a corresponding non-transformed wild type control plant cell, a plant or a part thereof is conferred.

[0152] Accordingly, in one embodiment, in case the activity of the Escherichia coli nucleic acid molecule or a polypeptide comprising the nucleic acid SEQ ID NO.: 1143 or polypeptide SEQ ID NO.: 1144, respectively is increased or generated, e.g. if the activity of a nucleic acid molecule or a polypeptide comprising the nucleic acid or polypeptide or the consensus sequence or the polypeptide motif, as depicted in Table I, II or IV, column 7 in the respective same line as the nucleic acid molecule SEQ ID NO.: 1143 or polypeptide SEQ ID NO.: 1144, respectively is increased or generated or if the activity “b3262-protein” is increased or generated in an plant cell, plant or part thereof an increased resistance to biotic stress, preferably pathogenic fungi as compared to a corresponding non-transformed wild type control plant cell, a plant or a part thereof is conferred. Accordingly, in one embodiment, in case the activity of the Escherichia coli nucleic acid molecule or a polypeptide comprising the nucleic acid SEQ ID NO.: 1174 or polypeptide SEQ ID NO.: 1175, respectively is increased or generated, e.g. if the activity of a nucleic acid molecule or a polypeptide comprising the nucleic acid or polypeptide or the consensus sequence or the polypeptide motif, as depicted in Table I, II or IV, column 7 in the respective same line as the nucleic acid molecule SEQ ID NO.: 1174 or polypeptide SEQ ID NO.: 1175, respectively is increased or generated or if the activity “peptidyl-prolyl cis-trans isomerase A (rotamase A)” is increased or generated in an plant cell, plant or part thereof an increased resistance to biotic stress, preferably pathogenic fungi as compared to a corresponding non-transformed wild type control plant cell, a plant or a part thereof is conferred.

[0153] Accordingly, in one embodiment, in case the activity of the Escherichia coli nucleic acid molecule or a polypeptide comprising the nucleic acid SEQ ID NO.: 1521 or polypeptide SEQ ID NO.: 1522, respectively is increased or generated, e.g. if the activity of a nucleic acid molecule or a polypeptide comprising the nucleic acid or polypeptide or the consensus sequence or the polypeptide motif, as depicted in Table I, II or IV, column 7 in the respective same line as the nucleic acid molecule SEQ ID NO.: 1521 or polypeptide SEQ ID NO.: 1522, respectively is increased or generated or if the activity “b3644-protein” is increased or generated in an plant cell, plant or part thereof an increased resistance to biotic stress, preferably pathogenic fungi as compared to a corresponding non-transformed wild type control plant cell, a plant or a part thereof is conferred.

[0154] Accordingly, in one embodiment, in case the activity of the Saccharomyces cerevisiae nucleic acid molecule or a polypeptide comprising the nucleic acid SEQ ID NO.: 1660 or polypeptide SEQ ID NO.: 1661, respectively is increased or generated, e.g. if the activity of a nucleic acid molecule or a polypeptide comprising the nucleic acid or polypeptide or the consensus sequence or the polypeptide motif, as depicted in Table I, II or IV, column 7 in the respective same line as the nucleic acid molecule SEQ ID NO.: 1660 or polypeptide SEQ ID NO.: 1661, respectively is increased or generated or if the activity “YCR087W-protein” is increased or generated in an plant cell, plant or part thereof an increased resistance to biotic stress, preferably pathogenic fungi as compared to a corresponding non-transformed wild type control plant cell, a plant or a part thereof is conferred.

[0155] Accordingly, in one embodiment, in case the activity of the Saccharomyces cerevisiae nucleic acid molecule or a polypeptide comprising the nucleic acid SEQ ID NO.: 1664 or polypeptide SEQ ID NO.: 1665, respectively is increased or generated, e.g. if the activity of a nucleic acid molecule or a polypeptide comprising the nucleic acid or polypeptide or the consensus sequence or the polypeptide motif, as depicted in Table I, II or IV, column 7 in the respective same line as the nucleic acid molecule SEQ ID NO.: 1664 or polypeptide SEQ ID NO.: 1665, respectively is increased or generated or if the activity “YGR150c-protein” is increased or generated in an plant cell, plant or part thereof an increased resistance to biotic stress, preferably pathogenic fungi as compared to a corresponding non-transformed wild type control plant cell, a plant or a part thereof is conferred.

[0156] Accordingly, in one embodiment, in case the activity of the Saccharomyces cerevisiae nucleic acid molecule or a polypeptide comprising the nucleic acid SEQ ID NO.: 1691 or polypeptide SEQ ID NO.: 1692, respectively is increased or generated, e.g. if the activity of a nucleic acid molecule or a polypeptide comprising the nucleic acid or polypeptide or the consensus sequence or the polypeptide motif, as depicted in Table I, II or IV, column 7 in the respective same line as the nucleic acid molecule SEQ ID NO.: 1691 or polypeptide SEQ ID NO.: 1692, respectively is increased or generated or if the activity “YIL172C-protein” is increased or generated in an plant cell, plant or part thereof an increased resistance to biotic stress, preferably pathogenic fungi as compared to a corresponding non-transformed wild type control plant cell, a plant or a part thereof is conferred.

[0157] Accordingly, in one embodiment, in case the activity of the Saccharomyces cerevisiae nucleic acid molecule or a polypeptide comprising the nucleic acid SEQ ID NO.: 1859 or polypeptide SEQ ID NO.: 1860, respectively is increased or generated, e.g. if the activity of a nucleic acid molecule or a polypeptide comprising the nucleic acid or polypeptide or the consensus sequence or the polypeptide motif, as depicted in Table I, II or IV, column 7 in the respective same line as the nucleic acid molecule SEQ ID NO.: 1859 or polypeptide SEQ ID NO.: 1860, respectively is increased or generated or if the activity “YLR168C-protein” is increased or generated in an plant cell, plant or part thereof an increased resistance to biotic stress, preferably pathogenic fungi as compared to a corresponding non-transformed wild type control plant cell, a plant or a part thereof is conferred.

[0158] Accordingly, in one embodiment, in case the activity of the Saccharomyces cerevisiae nucleic acid molecule or a polypeptide comprising the nucleic acid SEQ ID NO.: 1904 or polypeptide SEQ ID NO.: 1905, respectively is increased or generated, e.g. if the activity of a nucleic acid molecule or a polypeptide comprising the nucleic acid or polypeptide or the consensus sequence or the polypeptide motif, as depicted in Table I, II or IV, column 7 in the respective same line as the nucleic acid molecule SEQ ID NO.: 1904 or polypeptide SEQ ID NO.: 1905, respectively is increased or generated or if the activity “YLR407W-protein” is increased or generated in an plant cell, plant or part thereof an increased resistance to biotic stress, preferably pathogenic fungi as compared to a corresponding non-transformed wild type control plant cell, a plant or a part thereof is conferred.

[0159] Accordingly, in one embodiment, in case the activity of the Saccharomyces cerevisiae nucleic acid molecule or a polypeptide comprising the nucleic acid SEQ ID NO.: 1920 or polypeptide SEQ ID NO.: 1921, respectively is increased or generated, e.g. if the activity of a nucleic acid molecule or a polypeptide comprising the nucleic acid or polypeptide or the consensus sequence or the polypeptide motif, as depicted in Table I, II or IV, column 7 in the respective same line as the nucleic acid molecule SEQ ID NO.: 1920 or polypeptide SEQ ID NO.: 1921, respectively is increased or generated or if the activity “glucose-6-phosphate 1-dehydrogenase” is increased or generated in an plant cell, plant or part thereof an increased resistance to biotic stress, preferably pathogenic fungi as compared to a corresponding non-transformed wild type control plant cell, a plant or a part thereof is conferred.

[0160] Accordingly, in one embodiment, in case the activity of the Saccharomyces cerevisiae nucleic acid molecule or a polypeptide comprising the nucleic acid SEQ ID NO.: 2455 or polypeptide SEQ ID NO.: 2456, respectively is increased or generated, e.g. if the activity of a nucleic acid molecule or a polypeptide comprising the nucleic acid or polypeptide or the consensus sequence or the polypeptide motif, as depicted in Table I, II or IV, column 7 in the respective same line as the nucleic acid molecule SEQ ID NO.: 2455 or polypeptide SEQ ID NO.: 2456, respectively is increased or generated or if the activity “Gamma subunit of the translation initiation factor eIF2B” is increased or generated in an plant cell, plant or part thereof an increased resistance to biotic stress, preferably pathogenic fungi as compared to a corresponding non-transformed wild type control plant cell, a plant or a part thereof is conferred.

[0161] Accordingly, in one embodiment, in case the activity of the Saccharomyces cerevisiae nucleic acid molecule or a polypeptide comprising the nucleic acid SEQ ID NO.: 2477 or polypeptide SEQ ID NO.: 2478, respectively is increased or generated, e.g. if the activity of a nucleic acid molecule or a polypeptide comprising the nucleic acid or polypeptide or the consensus sequence or the polypeptide motif, as depicted in Table I, II or IV, column 7 in the respective same line as the nucleic acid molecule SEQ ID NO.: 2477 or polypeptide SEQ ID NO.: 2478, respectively is increased or generated or if the activity “YOR299W-protein” is increased or generated in an plant cell, plant or part thereof an increased resistance to biotic stress, preferably pathogenic fungi as compared to a corresponding non-transformed wild type control plant cell, a plant or a part thereof is conferred.

[0162] Accordingly, in one embodiment, in case the activity of the Saccharomyces cerevisiae nucleic acid molecule or a polypeptide comprising the nucleic acid SEQ ID NO.: 2507 or polypeptide SEQ ID NO.: 2508, respectively is increased or generated, e.g. if the activity of a nucleic acid molecule or a polypeptide comprising the nucleic acid or polypeptide or the consensus sequence or the polypeptide motif, as depicted in Table I, II or IV, column 7 in the respective same line as the nucleic acid molecule SEQ ID NO.: 2507 or polypeptide SEQ ID NO.: 2508, respectively is increased or generated or if the activity “ribosomal protein” is increased or generated in an plant cell, plant or part thereof an increased resistance to biotic stress, preferably pathogenic fungi as compared to a corresponding non-transformed wild type control plant cell, a plant or a part thereof is conferred.

[0163] Accordingly, in one embodiment, in case the activity of the Saccharomyces cerevisiae nucleic acid molecule or a polypeptide comprising the nucleic acid SEQ ID NO.: 2683 or polypeptide SEQ ID NO.: 2684, respectively is increased or generated, e.g. if the activity of a nucleic acid molecule or a polypeptide comprising the nucleic acid or polypeptide or the consensus sequence or the polypeptide motif, as depicted in Table I, II or IV, column 7 in the respective same line as the nucleic acid molecule SEQ ID NO.: 2683 or polypeptide SEQ ID NO.: 2684, respectively is increased or generated or if the activity “Splicing factor that is found in the Cef1p subcomplex of the spliceosome (Prp46p)” is increased or generated in an plant cell, plant or part thereof an increased resistance to biotic stress, preferably pathogenic fungi as compared to a corresponding non-transformed wild type control plant cell, a plant or a part thereof is conferred.

[0164] For the purposes of the invention, as a rule the plural is intended to encompass the singular and vice versa.

[0165] Unless otherwise specified, the terms “polynucleotides”, “nucleic acid” and “nucleic acid molecule” are interchangeably in the present context. Unless otherwise specified, the terms “peptide”, “polypeptide” and “protein” are interchangeably in the present context. The term “sequence” may relate to polynucleotides, nucleic acids, nucleic acid molecules, peptides, polypeptides and proteins, depending on the context in which the term “sequence” is used. The terms “gene(s)”, “polynucleotide”, “nucleic acid sequence”, “nucleotide sequence”, or “nucleic acid molecule(s)” as used herein refers to a polymeric form of nucleotides of any length, either ribonucleotides or deoxyribonucleotides. The terms refer only to the primary structure of the molecule.

[0166] Thus, the terms “gene(s)”, “polynucleotide”, “nucleic acid sequence”, “nucleotide sequence”, or “nucleic acid molecule(s)” as used herein include double- and single-stranded DNA and/or RNA. They also include known types of modifications, for example, methylation, “caps”, substitutions of one or more of the naturally occurring nucleotides with an analog. Preferably, the DNA or RNA sequence comprises a coding sequence encoding the herein defined polypeptide.

[0167] A “coding sequence” is a nucleotide sequence, which is transcribed into an RNA, e.g. a regulatory RNA, such as a miRNA, a ta-siRNA, cosuppression molecule, an RNAi, a ribozyme, etc. or into a mRNA which is translated into a polypeptide when placed under the control of appropriate regulatory sequences. The boundaries of the coding sequence are determined by a translation start codon at the 5′-terminus and a translation stop codon at the 3′-terminus. A coding sequence can include, but is not limited to mRNA, cDNA, recombinant nucleotide sequences or genomic DNA, while introns may be present as well under certain circumstances.

[0168] As used in the present context a nucleic acid molecule may also encompass the untranslated sequence located at the 3′ and at the 5′ end of the coding gene region, for example at least 500, preferably 200, especially preferably 100, nucleotides of the sequence upstream of the 5′ end of the coding region and at least 100, preferably 50, especially preferably 20, nucleotides of the sequence downstream of the 3′ end of the coding gene region. In the event for example the antisense, RNAi, snRNA, dsRNA, siRNA, miRNA, ta-siRNA, cosuppression molecule, ribozyme etc. technology is used coding regions as well as the 5′- and/or 3′-regions can advantageously be used.

[0169] However, it is often advantageous only to choose the coding region for cloning and expression purposes.

[0170] “Polypeptide” refers to a polymer of amino acid (amino acid sequence) and does not refer to a specific length of the molecule. Thus, peptides and oligopeptides are included within the definition of polypeptide. This term does also refer to or include posttranslational modifications of the polypeptide, for example, glycosylations, acetylations, phosphorylations and the like. Included within the definition are, for example, polypeptides containing one or more analogs of an amino acid (including, for example, unnatural amino acids, etc.), polypeptides with substituted linkages, as well as other modifications known in the art, both naturally occurring and non-naturally occurring.

[0171] The term “Table I” used in this specification is to be taken to specify the content of Table I A and Table I B. The term “Table II” used in this specification is to be taken to specify the content of Table II A and Table II B. The term “Table I A” used in this specification is to be taken to specify the content of Table I A. The term “Table I B” used in this specification is to be taken to specify the content of Table I B. The term “Table II A” used in this specification is to be taken to specify the content of Table II A. The term “Table II B” used in this specification is to be taken to specify the content of Table II B. In one preferred embodiment, the term “Table I” means Table I B. In one preferred embodiment, the term “Table II” means Table II B.

[0172] The terms “comprise” or “comprising” and grammatical variations thereof when used in this specification are to be taken to specify the presence of stated features, integers, steps or components or groups thereof, but not to preclude the presence or addition of one or more other features, integers, steps, components or groups thereof.

[0173] In accordance with the invention, a protein or polypeptide has the “activity of an protein as shown in table II, column 3” if its de novo activity, or its increased expression directly or indirectly leads to and confers an increased resistance to biotic stress, preferably pathogenic fungi as compared to a corresponding non-transformed wild type control plant cell, plant or part thereof and the protein has the above mentioned activities of a protein as shown in table II, column 3. Throughout the specification the activity or preferably the biological activity of such a protein or polypeptide or an nucleic acid molecule or sequence encoding such protein or polypeptide is identical or similar if it still has the biological or enzymatic activity of a protein as shown in table II, column 3, or which has at least 10% of the original biological or enzymatic activity, preferably 20%, particularly preferably 30%, most particularly preferably 40% in comparison to a protein as shown in table II, column 3 of E. coli or Saccharomyces cerevisiae.

[0174] The terms “increased”, “rised”, “extended”, “enhanced”, “improved” or “amplified” relate to a corresponding change of a property in a plant, an organism, a part of an organism such as a tissue, seed, root, leave, flower etc. or in a cell and are interchangeable. Preferably, the overall activity in the volume is increased or enhanced in cases if the increase or enhancement is related to the increase or enhancement of an activity of a gene product, independent whether the amount of gene product or the specific activity of the gene product or both is increased or enhanced or whether the amount, stability or translation efficacy of the nucleic acid sequence or gene encoding for the gene product is increased or enhanced.

[0175] The terms “increase” relate to a corresponding change of a property an organism or in a part of a plant, an organism, such as a tissue, seed, root, leave, flower etc. or in a cell. Preferably, the overall activity in the volume is increased in cases the increase relates to the increase of an activity of a gene product, independent whether the amount of gene product or the specific activity of the gene product or both is increased or generated or whether the amount, stability or translation efficacy of the nucleic acid sequence or gene encoding for the gene product is increased.

[0176] Under “change of a property” it is understood that the activity, expression level or amount of a gene product or the metabolite content is changed in a specific volume relative to a corresponding volume of a control, reference or wild type, including the de novo creation of the activity or expression.

[0177] The terms “increase” include the change of said property in only parts of the subject of the present invention, for example, the modification can be found in compartment of a cell, like a organelle, or in a part of a plant, like tissue, seed, root, leave, flower etc. but is not detectable if the overall subject, i.e. complete cell or plant, is tested.

[0178] Accordingly, the term “increase” means that the specific activity of an enzyme as well as the amount of a compound or metabolite, e.g. of a polypeptide, a nucleic acid molecule of the invention or an encoding mRNA or DNA, can be increased in a volume.

[0179] The terms “wild type”, “control” or “reference” are exchangeable and can be a cell or a part of organisms such as an organelle like a chloroplast or a tissue, or an organism, in particular a plant, which was not modified or treated according to the herein described process according to the invention. Accordingly, the cell or a part of organisms such as an organelle like a chloroplast or a tissue, or an organism, in particular a plant used as wild type, control or reference corresponds to the cell, organism, plant or part thereof as much as possible and is in any other property but in the result of the process of the invention as identical to the subject matter of the invention as possible. Thus, the wild type, control or reference is treated identically or as identical as possible, saying that only conditions or properties might be different which do not influence the quality of the tested property.

[0180] Preferably, any comparison is carried out under analogous conditions. The term “analogous conditions” means that all conditions such as, for example, culture or growing conditions, water content of the soil, temperature, humidity or surrounding air or soil, assay conditions (such as buffer composition, temperature, substrates, pathogen strain, concentrations and the like) are kept identical between the experiments to be compared.

[0181] The “reference”, “control”, or “wild type” is preferably a subject, e.g. an organelle, a cell, a tissue, an organism, in particular a plant, which was not modified or treated according to the herein described process of the invention and is in any other property as similar to the subject matter of the invention as possible. The reference, control or wild type is in its genome, transcriptome, proteome or metabolome as similar as possible to the subject of the present invention. Preferably, the term “reference-” “control-” or “wild type-” -organelle, -cell, -tissue or -organism, in particular plant, relates to an organelle, cell, tissue or organism, in particular plant, which is nearly genetically identical to the organelle, cell, tissue or organism, in particular plant, of the present invention or a part thereof preferably 95%, more preferred are 98%, even more preferred are 99.00%, in particular 99.10%, 99.30%, 99.50%, 99.70%, 99.90%, 99.99%, 99.999% or more. Most preferable the “reference”, “control”, or “wild type” is a subject, e.g. an organelle, a cell, a tissue, an organism, which is genetically identical to the organism, cell or organelle used according to the process of the invention except that the responsible or activity conferring nucleic acid molecules or the gene product encoded by them are amended, manipulated, exchanged or introduced according to the inventive process.

[0182] In case, a control, reference or wild type differing from the subject of the present invention only by not being subject of the process of the invention can not be provided, a control, reference or wild type can be an organism in which the cause for the modulation of an activity conferring the increased resistance to biotic stress, preferably pathogenic fungi as compared to a corresponding non-transformed wild type control plant cell, plant or part thereof or expression of the nucleic acid molecule of the invention as described herein has been switched back or off, e.g. by knocking out the expression of responsible gene product, e.g. by antisense inhibition, by inactivation of an activator or agonist, by activation of an inhibitor or antagonist, by inhibition through adding inhibitory antibodies, by adding active compounds as e.g. hormones, by introducing negative dominant mutants, etc. A gene production can for example be knocked out by introducing inactivating point mutations, which lead to an enzymatic activity inhibition or a destabilization or an inhibition of the ability to bind to cofactors etc.

[0183] Accordingly, preferred reference subject is the starting subject of the present process of the invention. Preferably, the reference and the subject matter of the invention are compared after standardization and normalization, e.g. to the amount of total RNA, DNA, or Protein or activity or expression of reference genes, like housekeeping genes, such as ubiquitin, actin or ribosomal proteins.

[0184] The increase or modulation according to this invention can be constitutive, e.g. due to a stable permanent transgenic expression or to a stable mutation in the corresponding endogenous gene encoding the nucleic acid molecule of the invention or to a modulation of the expression or of the behavior of a gene conferring the expression of the polypeptide of the invention, or transient, e.g. due to an transient transformation or temporary addition of a modulator such as a agonist or antagonist or inducible, e.g. after transformation with a inducible construct carrying the nucleic acid molecule of the invention under control of a inducible promoter and adding the inducer, e.g. tetracycline or as described herein below.

[0185] The increase in activity of the polypeptide amounts in a cell, a tissue, a organelle, an organ or an organism or a part thereof preferably to at least 5%, preferably to at least 20% or at to least 50%, especially preferably to at least 70%, 80%, 90% or more, very especially preferably are to at least 200%, 300% or 400%, most preferably are to at least 500% or more in comparison to the control, reference or wild type.

[0186] In one embodiment the term increase means the increase in amount in relation to the weight of the organism or part thereof (w/w).

[0187] In one embodiment the increase in activity of the polypeptide amounts in an organelle such as a plastid.

[0188] The specific activity of a polypeptide encoded by a nucleic acid molecule of the present invention or of the polypeptide of the present invention can be tested as described in the examples. In particular, the expression of a protein in question in a cell, e.g. a plant cell in comparison to a control is an easy test and can be performed as described in the state of the art.

[0189] The term “increase” includes, that a compound or an activity is introduced into a cell or a subcellular compartment or organelle de novo or that the compound or the activity has not been detectable before, in other words it is “generated”.

[0190] Accordingly, in the following, the term “increasing” also comprises the term “generating” or “stimulating”. The increased activity manifests itself in an increase of the increased resistance to biotic stress, preferably pathogenic fungi as compared to a corresponding non-transformed wild type control plant cell, plant or part thereof.

[0191] The sequence of B0124 from Escherichia coli, e.g. as shown in column 5 of Table I, [sequences from Saccharomyces cerevisiae has been published in Goffeau et al., Science 274 (5287), 546-547, 1996, sequences from Escherichia coli has been published in Blattner et al., Science 277 (5331), 1453-1474 (1997), and its activity is published described as glucose dehydrogenase.

[0192] Accordingly, in one embodiment, the process of the present invention comprises increasing or generating the activity of a gene product with the activity of a “glucose dehydrogenase” from Escherichia coli or its functional equivalent or its homolog, e.g. the increase of
[0193] (a) a gene product of a gene comprising the nucleic acid molecule as shown in column 5 of Table I and being depicted in the same respective line as said B0124 or a functional equivalent or a homologue thereof as shown depicted in column 7 of Table I, preferably a homologue or functional equivalent as shown depicted in column 7 of Table I B, and being depicted in the same respective line as said B0124; or
[0194] (b) a polypeptide comprising a polypeptide, a consensus sequence or a polypeptide motif as shown depicted in column 5 of Table II, and being depicted in the same respective line as said B0124 or a functional equivalent or a homologue thereof as depicted in column 7 of Table II or IV, preferably a homologue or functional equivalent as depicted in column 7 of Table II B, and being depicted in the same respective line as said B0124,
   as mentioned herein, for the an increased resistance to biotic stress, preferably pathogenic fungi as compared to a corresponding non-transformed wild type control plant cell, plant or part thereof in plant cell, plant or part thereof, as mentioned.

[0195] In one embodiment increasing or generating the activity of a “glucose dehydrogenase” from Escherichia coli or its functional equivalent or its homolog as mentioned in section (a) or (b) of this paragraph confers an increase in abiotic stress, preferably drought and low water content.

[0196] In one embodiment increasing or generating the activity of a “glucose dehydrogenase” from Escherichia coli or its functional equivalent or its homolog as mentioned in section (a) or (b) of this paragraph confers an increase in content of at least one fine chemical selected from the group consisting of:

isoleucine, leucine, valine, fructose, homoserine, or any combination of 2, 3, 4, 5, of the above mentioned fine chemicals.

[0197] In one embodiment increasing or generating the activity of a “glucose dehydrogenase” from Escherichia coli or its functional equivalent or its homolog as mentioned in section (a) or (b) of this paragraph confers an increase in any combination of the above mentioned traits, e.g. biotic stress resistance, abiotic stress resistance and/or content of fine chemical(s).

[0198] Accordingly, in one embodiment, the molecule which activity is to be increased in the process of the invention is the gene product with an activity of described as a “glucose dehydrogenase”, preferably it is the molecule of section (a) or (b) of this paragraph.

[0199] In one embodiment, said molecule, which activity is to be increased in the process of the invention and which is the gene product with an activity of described as a “glucose dehydrogenase”, is increased non-targeted.

[0200] The sequence of B0730 from Escherichia coli, e.g. as shown in column 5 of Table I, [sequences from Saccharomyces cerevisiae has been published in Goffeau et al., Science 274 (5287), 546-547, 1996, sequences from Escherichia coli has been published in Blattner et al., Science 277 (5331), 1453-1474 (1997), and its activity is published described as transcription regulator farR, fatty acyl-responsive.

[0201] Accordingly, in one embodiment, the process of the present invention comprises increasing or generating the activity of a gene product with the activity of a “transcription regulator farR, fatty acyl-responsive” from Escherichia coli or its functional equivalent or its homolog, e.g. the increase of
[0202] (a) a gene product of a gene comprising the nucleic acid molecule as shown in column 5 of Table I and being depicted in the same respective line as said B0730 or a functional equivalent or a homologue thereof as shown depicted in column 7 of Table I, preferably a homologue or functional equivalent as shown depicted in column 7 of Table I B, and being depicted in the same respective line as said B0730; or
[0203] (b) a polypeptide comprising a polypeptide, a consensus sequence or a polypeptide motif as shown depicted in column 5 of Table II, and being depicted in the same respective line as said B0730 or a functional equivalent or a homologue thereof as depicted in column 7 of Table II or IV, preferably a homologue or functional equivalent as depicted in column 7 of Table II B, and being depicted in the same respective line as said B0730,
   as mentioned herein, for the an increased resistance to biotic stress, preferably pathogenic fungi as compared to a corresponding non-transformed wild type control plant cell, plant or part thereof in plant cell, plant or part thereof, as mentioned.

[0204] In one embodiment increasing or generating the activity of a “transcription regulator farR, fatty acyl-responsive.” from Escherichia coli or its functional equivalent or its homolog as mentioned in section (a) or (b) of this paragraph confers an increase in abiotic stress, preferably drought and low water content.

[0205] In one embodiment increasing or generating the activity of a “transcription regulator farR, fatty acyl-responsive.” from Escherichia coli or its functional equivalent or its homolog as mentioned in section (a) or (b) of this paragraph confers an increase in content of at least one fine chemical selected from the group consisting of:

threonine, glutamate, proline, linoleic acid c18:2 (c9,c12), fumaric acid, malic acid, succini acid, aspartic acid, coenzyme q9, ferulic acid, raffinose, isopentenyl pyrophosphate or any combination of 2, 3, 4, 5, 6, 7, 8, 9, 10, 11, 12 of the above mentioned fine chemicals.

[0206] In one embodiment increasing or generating the activity of a “transcription regulator farR, fatty acyl-responsive.” from Escherichia coli or its functional equivalent or its homolog as mentioned in section (a) or (b) of this paragraph confers an increase in yield, preferably increased biomass.

[0207] In one embodiment increasing or generating the activity of a “transcription regulator farR, fatty acyl-responsive.” from Escherichia coli or its functional equivalent or its homolog as mentioned in section (a) or (b) of this paragraph confers an increase in in any combination of the above mentioned traits, e.g. biotic stress resistance, abiotic stress resistance, content of fine chemical(s) and/or increased biomass.

[0208] Accordingly, in one embodiment, the molecule which activity is to be increased in the process of the invention is the gene product with an activity of described as a “transcription regulator farR, fatty acyl-responsive”, preferably it is the molecule of section (a) or (b) of this paragraph.

[0209] In one embodiment, said molecule, which activity is to be increased in the process of the invention and which is the gene product with an activity of described as a “transcription regulator farR, fatty acyl-responsive”, is increased non-targeted.

[0210] The sequence of B1528 from Escherichia coli, e.g. as shown in column 5 of Table I, [sequences from Saccharomyces cerevisiae has been published in Goffeau et al., Science 274 (5287), 546-547, 1996, sequences from Escherichia coli has been published in Blattner et al., Science 277 (5331), 1453-1474 (1997), and its activity is published described as chloramphenicol resistance protein homolog ydeA.

[0211] Accordingly, in one embodiment, the process of the present invention comprises increasing or generating the activity of a gene product with the activity of a “chloramphenicol resistance protein homolog ydeA” from Escherichia coli or its functional equivalent or its homolog, e.g. the increase of
[0212] (a) a gene product of a gene comprising the nucleic acid molecule as shown in column 5 of Table I and being depicted in the same respective line as said B1528 or a functional equivalent or a homologue thereof as shown depicted in column 7 of Table I, preferably a homologue or functional equivalent as shown depicted in column 7 of Table I B, and being depicted in the same respective line as said B1528; or
[0213] (b) a polypeptide comprising a polypeptide, a consensus sequence or a polypeptide motif as shown depicted in column 5 of Table II, and being depicted in the same respective line as said B1528 or a functional equivalent or a homologue thereof as depicted in column 7 of Table II or IV, preferably a homologue or functional equivalent as depicted in column 7 of Table II B, and being depicted in the same respective line as said B1528,
   as mentioned herein, for the an increased resistance to biotic stress, preferably pathogenic fungi as compared to a corresponding non-transformed wild type control plant cell, plant or part thereof in plant cell, plant or part thereof, as mentioned.

[0214] In one embodiment increasing or generating the activity of a “chloramphenicol resistance protein homolog ydeA.” from Escherichia coli or its functional equivalent or its homolog as mentioned in section (a) or (b) of this paragraph confers an increase in abiotic stress, preferably drought and low water content.

[0215] In one embodiment increasing or generating the activity of a “chloramphenicol resistance protein homolog ydeA.” from Escherichia coli or its functional equivalent or its homolog as mentioned in section (a) or (b) of this paragraph confers an increase in any combination of the above mentioned traits, e.g. biotic stress resistance and/or abiotic stress resistance.

[0216] Accordingly, in one embodiment, the molecule which activity is to be increased in the process of the invention is the gene product with an activity of described as a “chloramphenicol resistance protein homolog ydeA”, preferably it is the molecule of section (a) or (b) of this paragraph.

[0217] In one embodiment, said molecule, which activity is to be increased in the process of the invention and which is the gene product with an activity of described as a “chloramphenicol resistance protein homolog ydeA”, is increased non-targeted.

[0218] The sequence of B2148 from Escherichia coli, e.g. as shown in column 5 of Table I, [sequences from Saccharomyces cerevisiae has been published in Goffeau et al., Science 274 (5287), 546-547, 1996, sequences from Escherichia coli has been published in Blattner et al., Science 277 (5331), 1453-1474 (1997), and its activity is published described as transmembrane pore-generating protein mglC.

[0219] Accordingly, in one embodiment, the process of the present invention comprises increasing or generating the activity of a gene product with the activity of a “transmembrane pore-generating protein mglC” from Escherichia coli or its functional equivalent or its homolog, e.g. the increase of
[0220] (a) a gene product of a gene comprising the nucleic acid molecule as shown in column 5 of Table I and being depicted in the same respective line as said B2148 or a functional equivalent or a homologue thereof as shown depicted in column 7 of Table I, preferably a homologue or functional equivalent as shown depicted in column 7 of Table I B, and being depicted in the same respective line as said B2148; or
[0221] (b) a polypeptide comprising a polypeptide, a consensus sequence or a polypeptide motif as shown depicted in column 5 of Table II, and being depicted in the same respective line as said B2148 or a functional equivalent or a homologue thereof as depicted in column 7 of Table II or IV, preferably a homologue or functional equivalent as depicted in column 7 of Table II B, and being depicted in the same respective line as said B2148,
   as mentioned herein, for the an increased resistance to biotic stress, preferably pathogenic fungi as compared to a corresponding non-transformed wild type control plant cell, plant or part thereof in plant cell, plant or part thereof, as mentioned.

[0222] In one embodiment increasing or generating the activity of a “transmembrane pore-generating protein mglC” from Escherichia coli or its functional equivalent or its homolog as mentioned in section (a) or (b) of this paragraph confers an increase in abiotic stress, preferably drought and low water content.

[0223] In one embodiment increasing or generating the activity of a “transmembrane pore-generating protein mglC” from Escherichia coli or its functional equivalent or its homolog as mentioned in section (a) or (b) of this paragraph confers an increase in In one embodiment increasing or generating the activity of a “transmembrane pore-generating protein mglC” from Escherichia coli or its functional equivalent or its homolog as mentioned in section (a) or (b) of this paragraph confers an increase in any combination of the above mentioned traits, e.g. biotic stress resistance and/or abiotic stress resistance.

[0224] Accordingly, in one embodiment, the molecule which activity is to be increased in the process of the invention is the gene product with an activity of described as a “trans-membrane pore-generating protein mglC”, preferably it is the molecule of section (a) or (b) of this paragraph.

[0225] In one embodiment, said molecule, which activity is to be increased in the process of the invention and which is the gene product with an activity of described as a “trans-membrane pore-generating protein mglC”, is increased non-targeted.

[0226] The sequence of B2573 from Escherichia coli, e.g. as shown in column 5 of Table I, [sequences from Saccharomyces cerevisiae has been published in Goffeau et al., Science 274 (5287), 546-547, 1996, sequences from Escherichia coli has been published in Blattner et al., Science 277 (5331), 1453-1474 (1997), and its activity is published described as RNA polymerase sigma-E factor (sigma-24).

[0227] Accordingly, in one embodiment, the process of the present invention comprises increasing or generating the activity of a gene product with the activity of a “RNA polymerase sigma-E factor (sigma-24)” from Escherichia coli or its functional equivalent or its homolog, e.g. the increase of
[0228] (a) a gene product of a gene comprising the nucleic acid molecule as shown in column 5 of Table I and being depicted in the same respective line as said B2573 or a functional equivalent or a homologue thereof as shown depicted in column 7 of Table I, preferably a homologue or functional equivalent as shown depicted in column 7 of Table I B, and being depicted in the same respective line as said B2573; or
[0229] (b) a polypeptide comprising a polypeptide, a consensus sequence or a polypeptide motif as shown depicted in column 5 of Table II, and being depicted in the same respective line as said B2573 or a functional equivalent or a homologue thereof as depicted in column 7 of Table II or IV, preferably a homologue or functional equivalent as depicted in column 7 of Table II B, and being depicted in the same respective line as said B2573,
   as mentioned herein, for the an increased resistance to biotic stress, preferably pathogenic fungi as compared to a corresponding non-transformed wild type control plant cell, plant or part thereof in plant cell, plant or part thereof, as mentioned.

[0230] Accordingly, in one embodiment, the molecule which activity is to be increased in the process of the invention is the gene product with an activity of described as a “RNA polymerase sigma-E factor (sigma-24)”, preferably it is the molecule of section (a) or (b) of this paragraph.

[0231] In one embodiment, said molecule, which activity is to be increased in the process of the invention and which is the gene product with an activity of described as a “RNA polymerase sigma-E factor (sigma-24)”, is increased non-targeted.

[0232] The sequence of B2600 from Escherichia coli, e.g. as shown in column 5 of Table I, [sequences from Saccharomyces cerevisiae has been published in Goffeau et al., Science 274 (5287), 546-547, 1996, sequences from Escherichia coli has been published in Blattner et al., Science 277 (5331), 1453-1474 (1997), and its activity is published described as chorismate mutase-T and prephenate dehydrogenase.

[0233] Accordingly, in one embodiment, the process of the present invention comprises increasing or generating the activity of a gene product with the activity of a “chorismate mutase-T and prephenate dehydrogenase” from Escherichia coli or its functional equivalent or its homolog, e.g. the increase of
[0234] (a) a gene product of a gene comprising the nucleic acid molecule as shown in column 5 of Table I and being depicted in the same respective line as said B2600 or a functional equivalent or a homologue thereof as shown depicted in column 7 of Table I, preferably a homologue or functional equivalent as shown depicted in column 7 of Table I B, and being depicted in the same respective line as said B2600; or
[0235] (b) a polypeptide comprising a polypeptide, a consensus sequence or a polypeptide motif as shown depicted in column 5 of Table II, and being depicted in the same respective line as said B2600 or a functional equivalent or a homologue thereof as depicted in column 7 of Table II or IV, preferably a homologue or functional equivalent as depicted in column 7 of Table II B, and being depicted in the same respective line as said B2600,
   as mentioned herein, for the an increased resistance to biotic stress, preferably pathogenic fungi as compared to a corresponding non-transformed wild type control plant cell, plant or part thereof in plant cell, plant or part thereof, as mentioned.

[0236] In one embodiment increasing or generating the activity of a “chorismate mutase-T and prephenate dehydrogenase” from Escherichia coli or its functional equivalent or its homolog as mentioned in section (a) or (b) of this paragraph confers an increase in NUE.

[0237] In one embodiment increasing or generating the activity of a “chorismate mutase-T and prephenate dehydrogenase” from Escherichia coli or its functional equivalent or its homolog as mentioned in section (a) or (b) of this paragraph confers an increase in content of at least one fine chemical selected from the group consisting of: alpha-tocotrienol, gamma-tocopherol/beta-tocopherol/2,3-dimethyl-5-phytyl-quinol, gamma-tocotrienol/beta-tocotrienol, tyrosine, shikimic acid, coenzyme q10, alpha-tocopherol, tryptophane or any combination of 2, 3, 4, 5, 6, 7, 8 of the above mentioned fine chemicals.

[0238] In one embodiment increasing or generating the activity of a “chorismate mutase-T and prephenate dehydrogenase” from Escherichia coli or its functional equivalent or its homolog as mentioned in section (a) or (b) of this paragraph confers an increase in any combination of the above mentioned traits, e.g. biotic stress resistance, fine chemical content and/or NUE.

[0239] Accordingly, in one embodiment, the molecule which activity is to be increased in the process of the invention is the gene product with an activity of described as a “chorismate mutase-T and prephenate dehydrogenase”, preferably it is the molecule of section (a) or (b) of this paragraph.

[0240] In one embodiment, said molecule, which activity is to be increased in the process of the invention and which is the gene product with an activity of described as a “chorismate mutase-T and prephenate dehydrogenase”, is increased plastidic.

[0241] The sequence of B2699 from Escherichia coli, e.g. as shown in column 5 of Table I, [sequences from Saccharomyces cerevisiae has been published in Goffeau et al., Science 274 (5287), 546-547, 1996, sequences from Escherichia coli has been published in Blattner et al., Science 277 (5331), 1453-1474 (1997), and its activity is published described as recombinase A.

[0242] Accordingly, in one embodiment, the process of the present invention comprises increasing or generating the activity of a gene product with the activity of a “recombinase A” from Escherichia coli or its functional equivalent or its homolog, e.g. the increase of
[0243] (a) a gene product of a gene comprising the nucleic acid molecule as shown in column 5 of Table I and being depicted in the same respective line as said B2699 or a functional equivalent or a homologue thereof as shown depicted in column 7 of Table I, preferably a homologue or functional equivalent as shown depicted in column 7 of Table I B, and being depicted in the same respective line as said B2699; or
[0244] (b) a polypeptide comprising a polypeptide, a consensus sequence or a polypeptide motif as shown depicted in column 5 of Table II, and being depicted in the same respective line as said B2699 or a functional equivalent or a homologue thereof as depicted in column 7 of Table II or IV, preferably a homologue or functional equivalent as depicted in column 7 of Table II B, and being depicted in the same respective line as said B2699,
   as mentioned herein, for the an increased resistance to biotic stress, preferably pathogenic fungi as compared to a corresponding non-transformed wild type control plant cell, plant or part thereof in plant cell, plant or part thereof, as mentioned.

[0245] In one embodiment increasing or generating the activity of a “recombinase A” from Escherichia coli or its functional equivalent or its homolog as mentioned in section (a) or (b) of this paragraph confers an increase in abiotic stress, preferably drought and low water content.

[0246] In one embodiment increasing or generating the activity of a “recombinase A” from Escherichia coli or its functional equivalent or its homolog as mentioned in section (a) or (b) of this paragraph confers an increase in content of at least one fine chemical selected from the group consisting of: alpha-linolenic acid, alpha-tocopherol, arginine, beta-carotene, beta-sitosterol, campesterol, citrulline, coenzyme q10, coenzyme q9, fumaric acid, glycine, lacton of trihydroxybutyric acid, lutein, methylgalactopyranosid, myo-inositol, proline, raffinose, stearic acid c18:0, trihydroxybutanoic acid, zeaxanthin or any combination of 2, 3, 4, 5, 6, 7, 8, 9, 10, 11, 12, 13, 14, 15, 16, 17, 18, 19, 20 of the above mentioned fine chemicals.

[0247] In one embodiment increasing or generating the activity of a “recombinase A” from Escherichia coli or its functional equivalent or its homolog as mentioned in section (a) or (b) of this paragraph confers an increase in any combination of the above mentioned traits, e.g. biotic stress resistance, fine chemical content and/or abiotic stress. Accordingly, in one embodiment, the molecule which activity is to be increased in the process of the invention is the gene product with an activity of described as a “recombinase A”, preferably it is the molecule of section (a) or (b) of this paragraph.

[0248] In one embodiment, said molecule, which activity is to be increased in the process of the invention and which is the gene product with an activity of described as a “recombinase A”, is increased non-targeted.

[0249] The sequence of B2764 from Escherichia coli, e.g. as shown in column 5 of Table I, [sequences from Saccharomyces cerevisiae has been published in Goffeau et al., Science 274 (5287), 546-547, 1996, sequences from Escherichia coli has been published in Blattner et al., Science 277 (5331), 1453-1474 (1997), and its activity is published described as sulfite reductase (NADPH), flavoprotein beta subunit.

[0250] Accordingly, in one embodiment, the process of the present invention comprises increasing or generating the activity of a gene product with the activity of a “sulfite reductase (NADPH), flavoprotein beta subunit” from Escherichia coli or its functional equivalent or its homolog, e.g. the increase of
[0251] (a) a gene product of a gene comprising the nucleic acid molecule as shown in column 5 of Table I and being depicted in the same respective line as said B2764 or a functional equivalent or a homologue thereof as shown depicted in column 7 of Table I, preferably a homologue or functional equivalent as shown depicted in column 7 of Table I B, and being depicted in the same respective line as said B2764; or
[0252] (b) a polypeptide comprising a polypeptide, a consensus sequence or a polypeptide motif as shown depicted in column 5 of Table II, and being depicted in the same respective line as said B2764 or a functional equivalent or a homologue thereof as depicted in column 7 of Table II or IV, preferably a homologue or functional equivalent as depicted in column 7 of Table II B, and being depicted in the same respective line as said B2764,
   as mentioned herein, for the an increased resistance to biotic stress, preferably pathogenic fungi as compared to a corresponding non-transformed wild type control plant cell, plant or part thereof in plant cell, plant or part thereof, as mentioned.

[0253] Accordingly, in one embodiment, the molecule which activity is to be increased in the process of the invention is the gene product with an activity of described as a “sulfite reductase (NADPH), flavoprotein beta subunit”, preferably it is the molecule of section (a) or (b) of this paragraph.

[0254] In one embodiment, said molecule, which activity is to be increased in the process of the invention and which is the gene product with an activity of described as a “sulfite reductase (NADPH), flavoprotein beta subunit”, is increased non-targeted.

[0255] The sequence of B3262 from Escherichia coli, e.g. as shown in column 5 of Table I, [sequences from Saccharomyces cerevisiae has been published in Goffeau et al., Science 274 (5287), 546-547, 1996, sequences from Escherichia coli has been published in Blattner et al., Science 277 (5331), 1453-1474 (1997), and its activity is published described as b3262-protein.

[0256] Accordingly, in one embodiment, the process of the present invention comprises increasing or generating the activity of a gene product with the activity of a “b3262-protein” from Escherichia coli or its functional equivalent or its homolog, e.g. the increase of
[0257] (a) a gene product of a gene comprising the nucleic acid molecule as shown in column 5 of Table I and being depicted in the same respective line as said B3262 or a functional equivalent or a homologue thereof as shown depicted in column 7 of Table I, preferably a homologue or functional equivalent as shown depicted in column 7 of Table I B, and being depicted in the same respective line as said B3262; or
[0258] (b) a polypeptide comprising a polypeptide, a consensus sequence or a polypeptide motif as shown depicted in column 5 of Table II, and being depicted in the same respective line as said B3262 or a functional equivalent or a homologue thereof as depicted in column 7 of Table II or IV, preferably a homologue or functional equivalent as depicted in column 7 of Table II B, and being depicted in the same respective line as said B3262,
   as mentioned herein, for the an increased resistance to biotic stress, preferably pathogenic fungi as compared to a corresponding non-transformed wild type control plant cell, plant or part thereof in plant cell, plant or part thereof, as mentioned.

[0259] Accordingly, in one embodiment, the molecule which activity is to be increased in the process of the invention is the gene product with an activity of described as a “b3262-protein”, preferably it is the molecule of section (a) or (b) of this paragraph.

[0260] In one embodiment, said molecule, which activity is to be increased in the process of the invention and which is the gene product with an activity of described as a “b3262-protein”, is increased non-targeted.

[0261] The sequence of B3363 from Escherichia coli, e.g. as shown in column 5 of Table I, [sequences from Saccharomyces cerevisiae has been published in Goffeau et al., Science 274 (5287), 546-547, 1996, sequences from Escherichia coli has been published in Blattner et al., Science 277 (5331), 1453-1474 (1997), and its activity is published described as peptidyl-prolyl cis-trans isomerase A (rotamase A).

[0262] Accordingly, in one embodiment, the process of the present invention comprises increasing or generating the activity of a gene product with the activity of a “peptidyl-prolyl cis-trans isomerase A (rotamase A)” from Escherichia coli or its functional equivalent or its homolog, e.g. the increase of
[0263] (a) a gene product of a gene comprising the nucleic acid molecule as shown in column 5 of Table I and being depicted in the same respective line as said B3363 or a functional equivalent or a homologue thereof as shown depicted in column 7 of Table I, preferably a homologue or functional equivalent as shown depicted in column 7 of Table I B, and being depicted in the same respective line as said B3363; or
[0264] (b) a polypeptide comprising a polypeptide, a consensus sequence or a polypeptide motif as shown depicted in column 5 of Table II, and being depicted in the same respective line as said B3363 or a functional equivalent or a homologue thereof as depicted in column 7 of Table II or IV, preferably a homologue or functional equivalent as depicted in column 7 of Table II B, and being depicted in the same respective line as said B3363,
   as mentioned herein, for the an increased resistance to biotic stress, preferably pathogenic fungi as compared to a corresponding non-transformed wild type control plant cell, plant or part thereof in plant cell, plant or part thereof, as mentioned.

[0265] In one embodiment increasing or generating the activity of a “peptidyl-prolyl cis-trans isomerase A (rotamase A)” from Escherichia coli or its functional equivalent or its homolog as mentioned in section (a) or (b) of this paragraph confers an increase in abiotic stress, preferably drought and low water content and increased yield, preferably increased biomass.

[0266] In one embodiment increasing or generating the activity of a “peptidyl-prolyl cis-trans isomerase A (rotamase A)” from Escherichia coli or its functional equivalent or its homolog as mentioned in section (a) or (b) of this paragraph confers an increase in any combination of the above mentioned traits, e.g. biotic stress resistance, increased biomass and/or abiotic stress. Accordingly, in one embodiment, the molecule which activity is to be increased in the process of the invention is the gene product with an activity of described as a “peptidyl-prolyl cis-trans isomerase A (rotamase A)”, preferably it is the molecule of section (a) or (b) of this paragraph.

[0267] In one embodiment, said molecule, which activity is to be increased in the process of the invention and which is the gene product with an activity of described as a “peptidyl-prolyl cis-trans isomerase A (rotamase A)”, is increased non-targeted.

[0268] The sequence of B3644 from Escherichia coli, e.g. as shown in column 5 of Table I, [sequences from Saccharomyces cerevisiae has been published in Goffeau et al., Science 274 (5287), 546-547, 1996, sequences from Escherichia coli has been published in Blattner et al., Science 277 (5331), 1453-1474 (1997), and its activity is published described as b3644-protein.

[0269] Accordingly, in one embodiment, the process of the present invention comprises increasing or generating the activity of a gene product with the activity of a “b3644-protein” from Escherichia coli or its functional equivalent or its homolog, e.g. the increase of
[0270] (a) a gene product of a gene comprising the nucleic acid molecule as shown in column 5 of Table I and being depicted in the same respective line as said B3644 or a functional equivalent or a homologue thereof as shown depicted in column 7 of Table I, preferably a homologue or functional equivalent as shown depicted in column 7 of Table I B, and being depicted in the same respective line as said B3644; or
[0271] (b) a polypeptide comprising a polypeptide, a consensus sequence or a polypeptide motif as shown depicted in column 5 of Table II, and being depicted in the same respective line as said B3644 or a functional equivalent or a homologue thereof as depicted in column 7 of Table II or IV, preferably a homologue or functional equivalent as depicted in column 7 of Table II B, and being depicted in the same respective line as said B3644,
   as mentioned herein, for the an increased resistance to biotic stress, preferably pathogenic fungi as compared to a corresponding non-transformed wild type control plant cell, plant or part thereof in plant cell, plant or part thereof, as mentioned.

[0272] In one embodiment increasing or generating the activity of a “b3644-protein” from Escherichia coli or its functional equivalent or its homolog as mentioned in section (a) or (b) of this paragraph confers an increase in content of at least one fine chemical selected from the group consisting of: a-linolenic acid (c18:cis [9,12,15]3), cerotic acid (c26:0), coenzyme q9, fumarate, glycerol, lignoceric acid (c24:0), linoleic acid (c18:cis[9,12]2), palmitic acid (c16:0), praline or any combination of 2, 3, 4, 5, 6, 7, 8, 9 of the above mentioned fine chemicals.

[0273] In one embodiment increasing or generating the activity of a “b3644-protein” from Escherichia coli or its functional equivalent or its homolog as mentioned in section (a) or (b) of this paragraph confers an increase in any combination of the above mentioned traits, e.g. biotic stress resistance and/or fine chemical content.

[0274] Accordingly, in one embodiment, the molecule which activity is to be increased in the process of the invention is the gene product with an activity of described as a “b3644-protein”, preferably it is the molecule of section (a) or (b) of this paragraph.

[0275] In one embodiment, said molecule, which activity is to be increased in the process of the invention and which is the gene product with an activity of described as a “b3644-protein”, is increased non-targeted.

[0276] The sequence of YCR087W from Saccharomyces cerevisiae, e.g. as shown in column 5 of Table I, [sequences from Saccharomyces cerevisiae has been published in Goffeau et al., Science 274 (5287), 546-547, 1996, sequences from Escherichia coli has been published in Blattner et al., Science 277 (5331), 1453-1474 (1997), and its activity is published described as YCR087W-protein.

[0277] Accordingly, in one embodiment, the process of the present invention comprises increasing or generating the activity of a gene product with the activity of a “YCR087W-protein” from Saccharomyces cerevisiae or its functional equivalent or its homolog, e.g. the increase of
[0278] (a) a gene product of a gene comprising the nucleic acid molecule as shown in column 5 of Table I and being depicted in the same respective line as said YCR087W or a functional equivalent or a homologue thereof as shown depicted in column 7 of Table I, preferably a homologue or functional equivalent as shown depicted in column 7 of Table I B, and being depicted in the same respective line as said YCR087W; or
[0279] (b) a polypeptide comprising a polypeptide, a consensus sequence or a polypeptide motif as shown depicted in column 5 of Table II, and being depicted in the same respective line as said YCR087W or a functional equivalent or a homologue thereof as depicted in column 7 of Table II or IV, preferably a homologue or functional equivalent as depicted in column 7 of Table II B, and being depicted in the same respective line as said YCR087W,
   as mentioned herein, for the an increased resistance to biotic stress, preferably pathogenic fungi as compared to a corresponding non-transformed wild type control plant cell, plant or part thereof in plant cell, plant or part thereof, as mentioned.

[0280] In one embodiment increasing or generating the activity of a “YCR087W-protein” from Saccharomyces cerevisiae or its functional equivalent or its homolog as mentioned in section (a) or (b) of this paragraph confers an increase in abiotic stress, preferably drought and low water content.

[0281] In one embodiment increasing or generating the activity of a “YCR087W-protein” from Saccharomyces cerevisiae or its functional equivalent or its homolog as mentioned in section (a) or (b) of this paragraph confers an increase in any combination of the above mentioned traits, e.g. biotic stress resistance and/or abiotic stress resistance.

[0282] Accordingly, in one embodiment, the molecule which activity is to be increased in the process of the invention is the gene product with an activity of described as a “YCR087W-protein”, preferably it is the molecule of section (a) or (b) of this paragraph.

[0283] In one embodiment, said molecule, which activity is to be increased in the process of the invention and which is the gene product with an activity of described as a “YCR087W-protein”, is increased non-targeted.

[0284] The sequence of YGR150C from Saccharomyces cerevisiae, e.g. as shown in column 5 of Table I, [sequences from Saccharomyces cerevisiae has been published in Goffeau et al., Science 274 (5287), 546-547, 1996, sequences from Escherichia coli has been published in Blattner et al., Science 277 (5331), 1453-1474 (1997), and its activity is published described as YGR150c-protein.

[0285] Accordingly, in one embodiment, the process of the present invention comprises increasing or generating the activity of a gene product with the activity of a “YGR150c-protein” from Saccharomyces cerevisiae or its functional equivalent or its homolog, e.g. the increase of
[0286] (a) a gene product of a gene comprising the nucleic acid molecule as shown in column 5 of Table I and being depicted in the same respective line as said YGR150C or a functional equivalent or a homologue thereof as shown depicted in column 7 of Table I, preferably a homologue or functional equivalent as shown depicted in column 7 of Table I B, and being depicted in the same respective line as said YGR150C; or
[0287] (b) a polypeptide comprising a polypeptide, a consensus sequence or a polypeptide motif as shown depicted in column 5 of Table II, and being depicted in the same respective line as said YGR150C or a functional equivalent or a homologue thereof as depicted in column 7 of Table II or IV, preferably a homologue or functional equivalent as depicted in column 7 of Table II B, and being depicted in the same respective line as said YGR150C,
   as mentioned herein, for the an increased resistance to biotic stress, preferably pathogenic fungi as compared to a corresponding non-transformed wild type control plant cell, plant or part thereof in plant cell, plant or part thereof, as mentioned.

[0288] In one embodiment increasing or generating the activity of a “YGR150c-protein” from Saccharomyces cerevisiae or its functional equivalent or its homolog as mentioned in section (a) or (b) of this paragraph confers an increase in abiotic stress, preferably drought and low water content.

[0289] In one embodiment increasing or generating the activity of a “YGR150c-protein” from Saccharomyces cerevisiae or its functional equivalent or its homolog as mentioned in section (a) or (b) of this paragraph confers an increase in any combination of the above mentioned traits, e.g. biotic stress resistance and/or abiotic stress resistance.

[0290] Accordingly, in one embodiment, the molecule which activity is to be increased in the process of the invention is the gene product with an activity of described as a “YGR150c-protein”, preferably it is the molecule of section (a) or (b) of this paragraph.

[0291] In one embodiment, said molecule, which activity is to be increased in the process of the invention and which is the gene product with an activity of described as a “YGR150c-protein”, is increased non-targeted.

[0292] The sequence of YIL172C from Saccharomyces cerevisiae, e.g. as shown in column 5 of Table I, [sequences from Saccharomyces cerevisiae has been published in Goffeau et al., Science 274 (5287), 546-547, 1996, sequences from Escherichia coli has been published in Blattner et al., Science 277 (5331), 1453-1474 (1997), and its activity is published described as YIL172C-protein.

[0293] Accordingly, in one embodiment, the process of the present invention comprises increasing or generating the activity of a gene product with the activity of a “YIL172C-protein” from Saccharomyces cerevisiae or its functional equivalent or its homolog, e.g. the increase of
[0294] (a) a gene product of a gene comprising the nucleic acid molecule as shown in column 5 of Table I and being depicted in the same respective line as said YIL172C or a functional equivalent or a homologue thereof as shown depicted in column 7 of Table I, preferably a homologue or functional equivalent as shown depicted in column 7 of Table I B, and being depicted in the same respective line as said YIL1720; or
[0295] (b) a polypeptide comprising a polypeptide, a consensus sequence or a polypeptide motif as shown depicted in column 5 of Table II, and being depicted in the same respective line as said YIL172C or a functional equivalent or a homologue thereof as depicted in column 7 of Table II or IV, preferably a homologue or functional equivalent as depicted in column 7 of Table II B, and being depicted in the same respective line as said YIL172C,
   as mentioned herein, for the an increased resistance to biotic stress, preferably pathogenic fungi as compared to a corresponding non-transformed wild type control plant cell, plant or part thereof in plant cell, plant or part thereof, as mentioned.

[0296] In one embodiment increasing or generating the activity of a “YIL172C-protein” from Saccharomyces cerevisiae or its functional equivalent or its homolog as mentioned in section (a) or (b) of this paragraph confers an increase in abiotic stress, preferably drought and low water content.

[0297] In one embodiment increasing or generating the activity of a “YIL172C-protein” from Saccharomyces cerevisiae or its functional equivalent or its homolog as mentioned in section (a) or (b) of this paragraph confers an increase in any combination of the above mentioned traits, e.g. biotic stress resistance and/or abiotic stress resistance.

[0298] Accordingly, in one embodiment, the molecule which activity is to be increased in the process of the invention is the gene product with an activity of described as a “YIL172C-protein”, preferably it is the molecule of section (a) or (b) of this paragraph.

[0299] In one embodiment, said molecule, which activity is to be increased in the process of the invention and which is the gene product with an activity of described as a “YIL172C-protein”, is increased non-targeted.

[0300] The sequence of YLR168C from Saccharomyces cerevisiae, e.g. as shown in column 5 of Table I, [sequences from Saccharomyces cerevisiae has been published in Goffeau et al., Science 274 (5287), 546-547, 1996, sequences from Escherichia coli has been published in Blattner et al., Science 277 (5331), 1453-1474 (1997), and its activity is published described as YLR168C-protein.

[0301] Accordingly, in one embodiment, the process of the present invention comprises increasing or generating the activity of a gene product with the activity of a “YLR168C-protein” from Saccharomyces cerevisiae or its functional equivalent or its homolog, e.g. the increase of
[0302] (a) a gene product of a gene comprising the nucleic acid molecule as shown in column 5 of Table I and being depicted in the same respective line as said YLR168C or a functional equivalent or a homologue thereof as shown depicted in column 7 of Table I, preferably a homologue or functional equivalent as shown depicted in column 7 of Table I B, and being depicted in the same respective line as said YLR168C; or
[0303] (b) a polypeptide comprising a polypeptide, a consensus sequence or a polypeptide motif as shown depicted in column 5 of Table II, and being depicted in the same respective line as said YLR168C or a functional equivalent or a homologue thereof as depicted in column 7 of Table II or IV, preferably a homologue or functional equivalent as depicted in column 7 of Table II B, and being depicted in the same respective line as said YLR168C,
   as mentioned herein, for the an increased resistance to biotic stress, preferably pathogenic fungi as compared to a corresponding non-transformed wild type control plant cell, plant or part thereof in plant cell, plant or part thereof, as mentioned.

[0304] Accordingly, in one embodiment, the molecule which activity is to be increased in the process of the invention is the gene product with an activity of described as a “YLR168C-protein”, preferably it is the molecule of section (a) or (b) of this paragraph.

[0305] In one embodiment, said molecule, which activity is to be increased in the process of the invention and which is the gene product with an activity of described as a “YLR168C-protein”, is increased non-targeted.

[0306] The sequence of YLR407W from Saccharomyces cerevisiae, e.g. as shown in column of Table I, [sequences from Saccharomyces cerevisiae has been published in Goffeau et al., Science 274 (5287), 546-547, 1996, sequences from Escherichia coli has been published in Blattner et al., Science 277 (5331), 1453-1474 (1997), and its activity is published described as YLR407W-protein.

[0307] Accordingly, in one embodiment, the process of the present invention comprises increasing or generating the activity of a gene product with the activity of a “YLR407W-protein” from Saccharomyces cerevisiae or its functional equivalent or its homolog, e.g. the increase of
[0308] (a) a gene product of a gene comprising the nucleic acid molecule as shown in column 5 of Table I and being depicted in the same respective line as said YLR407W or a functional equivalent or a homologue thereof as shown depicted in column 7 of Table I, preferably a homologue or functional equivalent as shown depicted in column 7 of Table I B, and being depicted in the same respective line as said YLR407W; or
[0309] (b) a polypeptide comprising a polypeptide, a consensus sequence or a polypeptide motif as shown depicted in column 5 of Table II, and being depicted in the same respective line as said YLR407W or a functional equivalent or a homologue thereof as depicted in column 7 of Table II or IV, preferably a homologue or functional equivalent as depicted in column 7 of Table II B, and being depicted in the same respective line as said YLR407W,
   as mentioned herein, for the an increased resistance to biotic stress, preferably pathogenic fungi as compared to a corresponding non-transformed wild type control plant cell, plant or part thereof in plant cell, plant or part thereof, as mentioned.

[0310] In one embodiment increasing or generating the activity of a “YLR407W-protein” from Saccharomyces cerevisiae or its functional equivalent or its homolog as mentioned in section (a) or (b) of this paragraph confers an increase in abiotic stress, preferably drought and low water content.

[0311] In one embodiment increasing or generating the activity of a “YLR407W-protein” from Saccharomyces cerevisiae or its functional equivalent or its homolog as mentioned in section (a) or (b) of this paragraph confers an increase in any combination of the above mentioned traits, e.g. biotic stress resistance and/or abiotic stress resistance.

[0312] Accordingly, in one embodiment, the molecule which activity is to be increased in the process of the invention is the gene product with an activity of described as a “YLR407W-protein”, preferably it is the molecule of section (a) or (b) of this paragraph.

[0313] In one embodiment, said molecule, which activity is to be increased in the process of the invention and which is the gene product with an activity of described as a “YLR407W-protein”, is increased non-targeted.

[0314] The sequence of YNL241C from Saccharomyces cerevisiae, e.g. as shown in column 5 of Table I, [sequences from Saccharomyces cerevisiae has been published in Goffeau et al., Science 274 (5287), 546-547, 1996, sequences from Escherichia coli has been published in Blattner et al., Science 277 (5331), 1453-1474 (1997), and its activity is published described as glucose-6-phosphate 1-dehydrogenase.

[0315] Accordingly, in one embodiment, the process of the present invention comprises increasing or generating the activity of a gene product with the activity of a “glucose-6-phosphate 1-dehydrogenase” from Saccharomyces cerevisiae or its functional equivalent or its homolog, e.g. the increase of
[0316] (a) a gene product of a gene comprising the nucleic acid molecule as shown in column 5 of Table I and being depicted in the same respective line as said YNL241C or a functional equivalent or a homologue thereof as shown depicted in column 7 of Table I, preferably a homologue or functional equivalent as shown depicted in column 7 of Table I B, and being depicted in the same respective line as said YNL241C; or
[0317] (b) a polypeptide comprising a polypeptide, a consensus sequence or a polypeptide motif as shown depicted in column 5 of Table II, and being depicted in the same respective line as said YNL241C or a functional equivalent or a homologue thereof as depicted in column 7 of Table II or IV, preferably a homologue or functional equivalent as depicted in column 7 of Table II B, and being depicted in the same respective line as said YNL241C,
   as mentioned herein, for the an increased resistance to biotic stress, preferably pathogenic fungi as compared to a corresponding non-transformed wild type control plant cell, plant or part thereof in plant cell, plant or part thereof, as mentioned.

[0318] In one embodiment increasing or generating the activity of a “glucose-6-phosphate 1-dehydrogenase” from Saccharomyces cerevisiae or its functional equivalent or its homolog as mentioned in section (a) or (b) of this paragraph confers an increase in NUE.

[0319] In one embodiment increasing or generating the activity of a “glucose-6-phosphate 1-dehydrogenase” from Saccharomyces cerevisiae or its functional equivalent or its homolog as mentioned in section (a) or (b) of this paragraph confers an increase in content of at least one fine chemical selected from the group consisting of: a-linolenic acid, c18:3 (c9,c12,c15), alanine, arginine, campesterol, fructose, gamma-tocopherol/beta-tocopherol/2,3-dimethyl-5-phytylquinol, glucose, glyceric acid, hexadeca-dienoic acid (c16:cis [7,10]2), hexadeca-trienoic acid (c16:cis [7,10,13]3), isoleucine, succinate, threonine, trytophane, tyrosine, valine or any combination of 2, 3, 4, 5, 6, 7, 8, 9, 10, 11, 12, 13, 14, 15,16 of the above mentioned fine chemicals.

[0320] In one embodiment increasing or generating the activity of a “glucose-6-phosphate 1-dehydrogenase” from Saccharomyces cerevisiae or its functional equivalent or its homolog as mentioned in section (a) or (b) of this paragraph confers an increase in NUE.

[0321] In one embodiment increasing or generating the activity of a “glucose-6-phosphate 1-dehydrogenase” from Saccharomyces cerevisiae or its functional equivalent or its homolog as mentioned in section (a) or (b) of this paragraph confers an increase in any combination of the above mentioned traits, e.g. biotic stress resistance, fine chemical content and/or NUE.

[0322] Accordingly, in one embodiment, the molecule which activity is to be increased in the process of the invention is the gene product with an activity of described as a “glucose-6-phosphate 1-dehydrogenase”, preferably it is the molecule of section (a) or (b) of this paragraph.

[0323] In one embodiment, said molecule, which activity is to be increased in the process of the invention and which is the gene product with an activity of described as a “glucose-6-phosphate 1-dehydrogenase”, is increased plastidic.

[0324] The sequence of YOR260W from Saccharomyces cerevisiae, e.g. as shown in column 5 of Table I, [sequences from Saccharomyces cerevisiae has been published in Goffeau et al., Science 274 (5287), 546-547, 1996, sequences from Escherichia coli has been published in Blattner et al., Science 277 (5331), 1453-1474 (1997), and its activity is published described as Gamma subunit of the translation initiation factor eIF2B.

[0325] Accordingly, in one embodiment, the process of the present invention comprises increasing or generating the activity of a gene product with the activity of a “Gamma subunit of the translation initiation factor eIF2B” from Saccharomyces cerevisiae or its functional equivalent or its homolog, e.g. the increase of
[0326] (a) a gene product of a gene comprising the nucleic acid molecule as shown in column 5 of Table I and being depicted in the same respective line as said YOR260W or a functional equivalent or a homologue thereof as shown depicted in column 7 of Table I, preferably a homologue or functional equivalent as shown depicted in column 7 of Table I B, and being depicted in the same respective line as said YOR260W; or
[0327] (b) a polypeptide comprising a polypeptide, a consensus sequence or a polypeptide motif as shown depicted in column 5 of Table II, and being depicted in the same respective line as said YOR260W or a functional equivalent or a homologue thereof as depicted in column 7 of Table II or IV, preferably a homologue or functional equivalent as depicted in column 7 of Table II B, and being depicted in the same respective line as said YOR260W,
   as mentioned herein, for the an increased resistance to biotic stress, preferably pathogenic fungi as compared to a corresponding non-transformed wild type control plant cell, plant or part thereof in plant cell, plant or part thereof, as mentioned.

[0328] In one embodiment increasing or generating the activity of a “Gamma subunit of the translation initiation factor eIF2B” from Saccharomyces cerevisiae or its functional equivalent or its homolog as mentioned in section (a) or (b) of this paragraph confers an increase in abiotic stress, preferably drought and low water content.

[0329] In one embodiment increasing or generating the activity of a “Gamma subunit of the translation initiation factor eIF2B” from Saccharomyces cerevisiae or its functional equivalent or its homolog as mentioned in section (a) or (b) of this paragraph confers an increase in any combination of the above mentioned traits, e.g. biotic stress resistance and/or abiotic stress resistance.

[0330] Accordingly, in one embodiment, the molecule which activity is to be increased in the process of the invention is the gene product with an activity of described as a “Gamma subunit of the translation initiation factor eIF2B”, preferably it is the molecule of section (a) or (b) of this paragraph.

[0331] In one embodiment, said molecule, which activity is to be increased in the process of the invention and which is the gene product with an activity of described as a “Gamma subunit of the translation initiation factor eIF2B”, is increased non-targeted.

[0332] The sequence of YOR299W from Saccharomyces cerevisiae, e.g. as shown in column 5 of Table I, [sequences from Saccharomyces cerevisiae has been published in Goffeau et al., Science 274 (5287), 546-547, 1996, sequences from Escherichia coli has been published in Blattner et al., Science 277 (5331), 1453-1474 (1997), and its activity is published described as YOR299W-protein.

[0333] Accordingly, in one embodiment, the process of the present invention comprises increasing or generating the activity of a gene product with the activity of a “YOR299W-protein” from Saccharomyces cerevisiae or its functional equivalent or its homolog, e.g. the increase of
[0334] (a) a gene product of a gene comprising the nucleic acid molecule as shown in column 5 of Table I and being depicted in the same respective line as said YOR299W or a functional equivalent or a homologue thereof as shown depicted in column 7 of Table I, preferably a homologue or functional equivalent as shown depicted in column 7 of Table I B, and being depicted in the same respective line as said YOR299W; or
[0335] (b) a polypeptide comprising a polypeptide, a consensus sequence or a polypeptide motif as shown depicted in column 5 of Table II, and being depicted in the same respective line as said YOR299W or a functional equivalent or a homologue thereof as depicted in column 7 of Table II or IV, preferably a homologue or functional equivalent as depicted in column 7 of Table II B, and being depicted in the same respective line as said YOR299W,
   as mentioned herein, for the an increased resistance to biotic stress, preferably pathogenic fungi as compared to a corresponding non-transformed wild type control plant cell, plant or part thereof in plant cell, plant or part thereof, as mentioned.

[0336] Accordingly, in one embodiment, the molecule which activity is to be increased in the process of the invention is the gene product with an activity of described as a “YOR299W-protein”, preferably it is the molecule of section (a) or (b) of this paragraph.

[0337] In one embodiment, said molecule, which activity is to be increased in the process of the invention and which is the gene product with an activity of described as a “YOR299W-protein”, is increased non-targeted.

[0338] The sequence of YPL079W from Saccharomyces cerevisiae, e.g. as shown in column 5 of Table I, [sequences from Saccharomyces cerevisiae has been published in Goffeau et al., Science 274 (5287), 546-547, 1996, sequences from Escherichia coli has been published in Blattner et al., Science 277 (5331), 1453-1474 (1997), and its activity is published described as ribosomal protein.

[0339] Accordingly, in one embodiment, the process of the present invention comprises increasing or generating the activity of a gene product with the activity of a “ribosomal protein” from Saccharomyces cerevisiae or its functional equivalent or its homolog, e.g. the increase of
[0340] (a) a gene product of a gene comprising the nucleic acid molecule as shown in column 5 of Table I and being depicted in the same respective line as said YPL079W or a functional equivalent or a homologue thereof as shown depicted in column 7 of Table I, preferably a homologue or functional equivalent as shown depicted in column 7 of Table I B, and being depicted in the same respective line as said YPL079W; or
[0341] (b) a polypeptide comprising a polypeptide, a consensus sequence or a polypeptide motif as shown depicted in column 5 of Table II, and being depicted in the same respective line as said YPL079W or a functional equivalent or a homologue thereof as depicted in column 7 of Table II or IV, preferably a homologue or functional equivalent as depicted in column 7 of Table II B, and being depicted in the same respective line as said YPL079W,
   as mentioned herein, for the an increased resistance to biotic stress, preferably pathogenic fungi as compared to a corresponding non-transformed wild type control plant cell, plant or part thereof in plant cell, plant or part thereof, as mentioned.

[0342] In one embodiment increasing or generating the activity of a “ribosomal protein” from Saccharomyces cerevisiae or its functional equivalent or its homolog as mentioned in section (a) or (b) of this paragraph confers an increase in abiotic stress, preferably drought and low water content.

[0343] In one embodiment increasing or generating the activity of a “ribosomal protein” from Saccharomyces cerevisiae or its functional equivalent or its homolog as mentioned in section (a) or (b) of this paragraph confers an increase in any combination of the above mentioned traits, e.g. biotic stress resistance and/or abiotic stress resistance.

[0344] Accordingly, in one embodiment, the molecule which activity is to be increased in the process of the invention is the gene product with an activity of described as a “ribosomal protein”, preferably it is the molecule of section (a) or (b) of this paragraph.

[0345] In one embodiment, said molecule, which activity is to be increased in the process of the invention and which is the gene product with an activity of described as a “ribosomal protein”, is increased non-targeted.

[0346] The sequence of YPL151C from Saccharomyces cerevisiae, e.g. as shown in column 5 of Table I, [sequences from Saccharomyces cerevisiae has been published in Goffeau et al., Science 274 (5287), 546-547, 1996, sequences from Escherichia coli has been published in Blattner et al., Science 277 (5331), 1453-1474 (1997), and its activity is published described as Splicing factor that is found in the Cef1p subcomplex of the spliceosome (Prp46p).

[0347] Accordingly, in one embodiment, the process of the present invention comprises increasing or generating the activity of a gene product with the activity of a “Splicing factor that is found in the Cef1p subcomplex of the spliceosome (Prp46p)” from Saccharomyces cerevisiae or its functional equivalent or its homolog, e.g. the increase of
[0348] (a) a gene product of a gene comprising the nucleic acid molecule as shown in column 5 of Table I and being depicted in the same respective line as said YPL151C or a functional equivalent or a homologue thereof as shown depicted in column 7 of Table I, preferably a homologue or functional equivalent as shown depicted in column 7 of Table I B, and being depicted in the same respective line as said YPL151C; or
[0349] (b) a polypeptide comprising a polypeptide, a consensus sequence or a polypeptide motif as shown depicted in column 5 of Table II, and being depicted in the same respective line as said YPL151C or a functional equivalent or a homologue thereof as depicted in column 7 of Table II or IV, preferably a homologue or functional equivalent as depicted in column 7 of Table II B, and being depicted in the same respective line as said YPL151C,
   as mentioned herein, for the an increased resistance to biotic stress, preferably pathogenic fungi as compared to a corresponding non-transformed wild type control plant cell, plant or part thereof in plant cell, plant or part thereof, as mentioned.

[0350] In one embodiment increasing or generating the activity of a “Splicing factor that is found in the Cef1p subcomplex of the spliceosome (Prp46p)” from Saccharomyces cerevisiae or its functional equivalent or its homolog as mentioned in section (a) or (b) of this paragraph confers an increase in abiotic stress, preferably drought and low water content.

[0351] In one embodiment increasing or generating the activity of a “Splicing factor that is found in the Cef1p subcomplex of the spliceosome (Prp46p)” from Saccharomyces cerevisiae or its functional equivalent or its homolog as mentioned in section (a) or (b) of this paragraph confers an increase in any combination of the above mentioned traits, e.g. biotic stress resistance and/or abiotic stress resistance.

[0352] Accordingly, in one embodiment, the molecule which activity is to be increased in the process of the invention is the gene product with an activity of described as a “Splicing factor that is found in the Cef1p subcomplex of the spliceosome (Prp46p)”, preferably it is the molecule of section (a) or (b) of this paragraph.

[0353] In one embodiment, said molecule, which activity is to be increased in the process of the invention and which is the gene product with an activity of described as a “Splicing factor that is found in the Cef1p subcomplex of the spliceosome (Prp46p)”, is increased non-targeted.

[0354] Surprisingly, it was observed that a increasing or generating of at least one gene conferring an activity selected from the group consisting of: b3262-protein, b3644-protein, chloramphenicol resistance protein homolog ydeA, chorismate mutase-T and prephenate dehydrogenase, Gamma subunit of the translation initiation factor eIF2B, glucose dehydrogenase, glucose-6-phosphate 1-dehydrogenase, peptidyl-prolyl cis-trans isomerase A (rotamase A), recombinase A, ribosomal protein, RNA polymerase sigma-E factor (sigma-24), Splicing factor that is found in the Cef1p subcomplex of the spliceosome (Prp46p), sulfite reductase (NADPH), flavoprotein beta subunit, transcription regulator farR, fatty acyl-responsive, transmembrane pore-generating protein mglC, YCR087W-protein, YGR150c-protein, YIL172C-protein, YLR168C-protein, YLR407W-protein, and YOR299W-protein or of a gene comprising a nucleic acid sequence described in column 5 of Table I in Arabidopsis thaliana, preferably eco-type C24 conferred an increased resistance to biotic stress, preferably pathogenic fungi as compared to a corresponding non-transformed wild type control plant.

[0355] Surprisingly, it was observed that a increasing or generating of at least one gene conferring an activity selected from the group consisting of: b3262-protein, b3644-protein, chloramphenicol resistance protein homolog ydeA, chorismate mutase-T and prephenate dehydrogenase, Gamma subunit of the translation initiation factor eIF2B, glucose dehydrogenase, glucose-6-phosphate 1-dehydrogenase, peptidyl-prolyl cis-trans isomerase A (rotamase A), recombinase A, ribosomal protein, RNA polymerase sigma-E factor (sigma-24), Splicing factor that is found in the Cef1p subcomplex of the spliceosome (Prp46p), sulfite reductase (NADPH), flavoprotein beta subunit, transcription regulator farR, fatty acyl-responsive, transmembrane pore-generating protein mglC, YCR087W-protein, YGR150c-protein, YIL172C-protein, YLR168C-protein, YLR407W-protein, and YOR299W-protein or of a gene comprising a nucleic acid sequence described in column 5 of Table I in Arabidopsis thaliana, preferably eco-type C24 conferred an increased resistance to biotic stress, preferably pathogenic fungi as compared to a corresponding non-transformed wild type control.

[0356] In particular, it was observed that increasing or generating the activity of a gene product with the activity of a “glucose dehydrogenase” encoded by a gene comprising the nucleic acid sequence SEQ ID NO.: 38 in Arabidopsis thaliana conferred an increased resistance to biotic stress, preferably pathogenic fungi as shown in the Examples. It was further observed that increasing or generating the activity of a gene product with the activity of a “glucose dehydrogenase” encoded by a gene comprising the nucleic acid sequence SEQ ID NO.: 38 in Arabidopsis thaliana conferred additionally an increase

in abiotic stress resistance, preferably drought and low water content and in content of at least one fine chemical selected from the group consisting of: isoleucine, leucine, valine, fructose, homoserine, isoleucine.

[0357] In particular, it was observed that increasing or generating the activity of a gene product with the activity of a “transcription regulator farR, fatty acyl-responsive” encoded by a gene comprising the nucleic acid sequence SEQ ID NO.: 146 in Arabidopsis thaliana conferred an increased resistance to biotic stress, preferably pathogenic fungi as shown in the Examples.

[0358] It was further observed that increasing or generating the activity of a gene product with the activity of a “transcription regulator farR, fatty acyl-responsive” encoded by a gene comprising the nucleic acid sequence SEQ ID NO.: 146 in Arabidopsis thaliana conferred additionally an increase

in abiotic stress resistance, preferably drought and low water content and yield, preferably increased biomass and in content of at least one fine chemical selected from the group consisting of: threonine, glutamate, proline, linoleic acid c18:2 (c9,c12), fumaric acid, malic acid, succini acid, aspartic acid, coenzyme q9, ferulic acid, raffinose, isopentenyl pyrophosphate.

[0359] In particular, it was observed that increasing or generating the activity of a gene product with the activity of a “chloramphenicol resistance protein homolog ydeA” encoded by a gene comprising the nucleic acid sequence SEQ ID NO.: 165 in Arabidopsis thaliana conferred an increased resistance to biotic stress, preferably pathogenic fungi as shown in the Examples.

[0360] It was further observed that increasing or generating the activity of a gene product with the activity of a “chloramphenicol resistance protein homolog ydeA” encoded by a gene comprising the nucleic acid sequence SEQ ID NO.: 165 in Arabidopsis thaliana conferred additionally an increase

in abiotic stress resistance, preferably drought and low water content.

[0361] In particular, it was observed that increasing or generating the activity of a gene product with the activity of a “transmembrane pore-generating protein mglC” encoded by a gene comprising the nucleic acid sequence SEQ ID NO.: 242 in Arabidopsis thaliana conferred an increased resistance to biotic stress, preferably pathogenic fungi as shown in the Examples.

[0362] It was further observed that increasing or generating the activity of a gene product with the activity of a “transmembrane pore-generating protein mglC” encoded by a gene comprising the nucleic acid sequence SEQ ID NO.: 242 in Arabidopsis thaliana conferred additionally an increase

in abiotic stress resistance, preferably drought and low water content.

[0363] In particular, it was observed that increasing or generating the activity of a gene product with the activity of a “RNA polymerase sigma-E factor (sigma-24)” encoded by a gene comprising the nucleic acid sequence SEQ ID NO.: 312 in Arabidopsis thaliana conferred an increased resistance to biotic stress, preferably pathogenic fungi as shown in the Examples.

[0364] In particular, it was observed that increasing or generating the activity of a gene product with the activity of a “chorismate mutase-T and prephenate dehydrogenase” encoded by a gene comprising the nucleic acid sequence SEQ ID NO.: 468 in Arabidopsis thaliana conferred an increased resistance to biotic stress, preferably pathogenic fungi as shown in the Examples.

[0365] It was further observed that increasing or generating the activity of a gene product with the activity of a “chorismate mutase-T and prephenate dehydrogenase” encoded by a gene comprising the nucleic acid sequence SEQ ID NO.: 468 in Arabidopsis thaliana conferred additionally an increase

in NUE and in content of at least one fine chemical selected from the group consisting of: alpha-tocotrienol, gamma-tocopherol/beta-tocopherol/2,3-dimethyl-5-phytyl-quinol, gamma-tocotrienol/beta-tocotrienol, tyrosine, shikimic acid, coenzyme q10, alpha-tocopherol, tryptophane

[0366] In particular, it was observed that increasing or generating the activity of a gene product with the activity of a “recombinase A” encoded by a gene comprising the nucleic acid sequence SEQ ID NO.: 534 in Arabidopsis thaliana conferred an increased resistance to biotic stress, preferably pathogenic fungi as shown in the Examples.

[0367] It was further observed that increasing or generating the activity of a gene product with the activity of a “recombinase A” encoded by a gene comprising the nucleic acid sequence SEQ ID NO.: 534 in Arabidopsis thaliana conferred an increase

in abiotic stress resistance, preferably drought and low water content and in content of at least one fine chemical selected from the group consisting of: alpha-linolenic acid, alpha-tocopherol, arginine, beta-carotene, beta-sitosterol, campesterol, citrulline, coenzyme q10, coenzyme q9, fumaric acid, glycine, lacton of trihydroxybutyric acid, lutein, methylgalactopyranosid, myo-inositol, proline, raffinose, stearic acid c18:0, trihydroxybutanoic acid, zeaxanthin

[0368] In particular, it was observed that increasing or generating the activity of a gene product with the activity of a “sulfite reductase (NADPH), flavoprotein beta subunit” encoded by a gene comprising the nucleic acid sequence SEQ ID NO.: 970 in Arabidopsis thaliana conferred an increased resistance to biotic stress, preferably pathogenic fungi as shown in the Examples.

[0369] In particular, it was observed that increasing or generating the activity of a gene product with the activity of a “b3262-protein” encoded by a gene comprising the nucleic acid sequence SEQ ID NO.: 1143 in Arabidopsis thaliana conferred an increased resistance to biotic stress, preferably pathogenic fungi as shown in the Examples.

[0370] In particular, it was observed that increasing or generating the activity of a gene product with the activity of a “peptidyl-prolyl cis-trans isomerase A (rotamase A)” encoded by a gene comprising the nucleic acid sequence SEQ ID NO.: 1174 in Arabidopsis thaliana conferred an increased resistance to biotic stress, preferably pathogenic fungi as shown in the Examples.

[0371] It was further observed that increasing or generating the activity of a gene product with the activity of a “peptidyl-prolyl cis-trans isomerase A (rotamase A)” encoded by a gene comprising the nucleic acid sequence SEQ ID NO.: 1174 in Arabidopsis thaliana conferred additionally an increase

in abiotic stress resistance, preferably drought and low water content and increased yield, preferably increased biomass.

[0372] In particular, it was observed that increasing or generating the activity of a gene product with the activity of a “b3644-protein” encoded by a gene comprising the nucleic acid sequence SEQ ID NO.: 1521 in Arabidopsis thaliana conferred an increased resistance to biotic stress, preferably pathogenic fungi as shown in the Examples.

[0373] It was further observed that increasing or generating the activity of a gene product with the activity of a “b3644-protein” encoded by a gene comprising the nucleic acid sequence SEQ ID NO.: 1521 in Arabidopsis thaliana conferred additionally an increase in content of at least one fine chemical selected from the group consisting of: a-linolenic acid (c18:cis [9,12,15]3), cerotic acid (c26:0), coenzyme q9, fumarate, glycerol, lignoceric acid (c24:0), linoleic acid (c18:cis [9,12]2), palmitic acid (c16:0), proline

[0374] In particular, it was observed that increasing or generating the activity of a gene product with the activity of a “YCR087W-protein” encoded by a gene comprising the nucleic acid sequence SEQ ID NO.: 1660 in Arabidopsis thaliana conferred an increased resistance to biotic stress, preferably pathogenic fungi as shown in the Examples. It was further observed that increasing or generating the activity of a gene product with the activity of a “YCR087W-protein” encoded by a gene comprising the nucleic acid sequence SEQ ID NO.: 1660 in Arabidopsis thaliana conferred additionally an increase in abiotic stress resistance, preferably drought and low water content

[0375] In particular, it was observed that increasing or generating the activity of a gene product with the activity of a “YGR150c-protein” encoded by a gene comprising the nucleic acid sequence SEQ ID NO.: 1664 in Arabidopsis thaliana conferred an increased resistance to biotic stress, preferably pathogenic fungi as shown in the Examples.

[0376] It was further observed that increasing or generating the activity of a gene product with the activity of a “YGR150c-protein” encoded by a gene comprising the nucleic acid sequence SEQ ID NO.: 1664 in Arabidopsis thaliana conferred additionally an increase in abiotic stress resistance, preferably drought and low water content

[0377] In particular, it was observed that increasing or generating the activity of a gene product with the activity of a “YIL172C-protein” encoded by a gene comprising the nucleic acid sequence SEQ ID NO.: 1691 in Arabidopsis thaliana conferred an increased resistance to biotic stress, preferably pathogenic fungi as shown in the Examples. It was further observed that increasing or generating the activity of a gene product with the activity of a “YIL172C-protein” encoded by a gene comprising the nucleic acid sequence SEQ ID NO.: 1691 in Arabidopsis thaliana conferred additionally an increase in abiotic stress resistance, preferably drought and low water content

[0378] In particular, it was observed that increasing or generating the activity of a gene product with the activity of a “YLR168C-protein” encoded by a gene comprising the nucleic acid sequence SEQ ID NO.: 1859 in Arabidopsis thaliana conferred an increased resistance to biotic stress, preferably pathogenic fungi as shown in the Examples.

[0379] In particular, it was observed that increasing or generating the activity of a gene product with the activity of a “YLR407W-protein” encoded by a gene comprising the nucleic acid sequence SEQ ID NO.: 1904 in Arabidopsis thaliana conferred an increased resistance to biotic stress, preferably pathogenic fungi as shown in the Examples.

[0380] It was further observed that increasing or generating the activity of a gene product with the activity of a “YLR407W-protein” encoded by a gene comprising the nucleic acid sequence SEQ ID NO.: 1904 in Arabidopsis thaliana conferred additionally an increase in abiotic stress resistance, preferably drought and low water content

[0381] In particular, it was observed that increasing or generating the activity of a gene product with the activity of a “glucose-6-phosphate 1-dehydrogenase” encoded by a gene comprising the nucleic acid sequence SEQ ID NO.: 1920 in Arabidopsis thaliana conferred an increased resistance to biotic stress, preferably pathogenic fungi as shown in the Examples.

[0382] It was further observed that increasing or generating the activity of a gene product with the activity of a “glucose-6-phosphate 1-dehydrogenase” encoded by a gene comprising the nucleic acid sequence SEQ ID NO.: 1920 in Arabidopsis thaliana conferred additionally an increase

in NUE and in content of at least one fine chemical selected from the group consisting of: a-linolenic acid, c18:3 (c9,c12,c15), alanine, arginine, campesterol, fructose, gamma-tocopherol/beta-tocopherol/2,3-dimethyl-5-phytylquinol, glucose, glyceric acid, hexadeca-dienoic acid (c16:cis [7,10]2), hexadeca-trienoic acid (c16:cis [7,10,13]3), isoleucine, succinate, threonine, trytophane, tyrosine, valineln particular, it was observed that increasing or generating the activity of a gene product with the activity of a “Gamma subunit of the translation initiation factor eIF2B” encoded by a gene comprising the nucleic acid sequence SEQ ID NO.: 2455 in Arabidopsis thaliana conferred an increased resistance to biotic stress, preferably pathogenic fungi as shown in the Examples.

[0383] It was further observed that increasing or generating the activity of a gene product with the activity of a “Gamma subunit of the translation initiation factor eIF2B” encoded by a gene comprising the nucleic acid sequence SEQ ID NO.: 2455 in Arabidopsis thaliana conferred additionally an increase

in abiotic stress, resistance, preferably drought and low water content

[0384] In particular, it was observed that increasing or generating the activity of a gene product with the activity of a “YOR299W-protein” encoded by a gene comprising the nucleic acid sequence SEQ ID NO.: 2477 in Arabidopsis thaliana conferred an increased resistance to biotic stress, preferably pathogenic fungi as shown in the Examples.

[0385] In particular, it was observed that increasing or generating the activity of a gene product with the activity of a “ribosomal protein” encoded by a gene comprising the nucleic acid sequence SEQ ID NO.: 2507 in Arabidopsis thaliana conferred an increased resistance to biotic stress, preferably pathogenic fungi as shown in the Examples.

[0386] It was further observed that increasing or generating the activity of a gene product with the activity of a “ribosomal protein” encoded by a gene comprising the nucleic acid sequence SEQ ID NO.: 2507 in Arabidopsis thaliana conferred additionally an increase in abiotic stress resistance, preferably drought and low water content

[0387] In particular, it was observed that increasing or generating the activity of a gene product with the activity of a “Splicing factor that is found in the Cef1p subcomplex of the spliceosome (Prp46p)” encoded by a gene comprising the nucleic acid sequence SEQ ID NO.: 2683 in Arabidopsis thaliana conferred an increased resistance to biotic stress, preferably pathogenic fungi as shown in the Examples.

[0388] It was further observed that increasing or generating the activity of a gene product with the activity of a “Splicing factor that is found in the Cef1p subcomplex of the spliceosome (Prp46p)” encoded by a gene comprising the nucleic acid sequence SEQ ID NO.: 2683 in Arabidopsis thaliana conferred additionally an increase

in abiotic stress resistance, preferably drought and low water content.

[0389] Thus, according to the method of the invention an increased resistance to biotic stress, preferably pathogenic fungi as compared to a corresponding non-transformed wild type control can be achieved.

[0390] Accordingly, in one embodiment, in case the activity of a polypeptide according to the polypeptide SEQ ID NO.: 39, or encoded by a nucleic acid molecule comprising the nucleic acid SEQ ID NO.: 38 or a homolog of said nucleic acid molecule or polypeptide, e.g. if the activity of a nucleic acid molecule or a polypeptide comprising the nucleic acid or polypeptide or the consensus sequence or the polypeptide motif, as depicted in Table I, II or IV, column 7 in the respective same line as the nucleic acid molecule SEQ ID NO.: 38 or polypeptide SEQ ID NO.: 39, respectively is increased or generated or if the activity “glucose dehydrogenase” is increased or generated in an organism, preferably

increased resistance to biotic stress, preferably pathogenic fungi as compared to a corresponding non-transformed wild type control is conferred in said organism.

[0391] Accordingly, in one embodiment, in case the activity of a polypeptide according to the polypeptide SEQ ID NO.: 147, or encoded by a nucleic acid molecule comprising the nucleic acid SEQ ID NO.: 146 or a homolog of said nucleic acid molecule or polypeptide, e.g. if the activity of a nucleic acid molecule or a polypeptide comprising the nucleic acid or polypeptide or the consensus sequence or the polypeptide motif, as depicted in Table I, II or IV, column 7 in the respective same line as the nucleic acid molecule SEQ ID NO.: 146 or polypeptide SEQ ID NO.: 147, respectively is increased or generated or if the activity “transcription regulator farR, fatty acyl-responsive” is increased or generated in an organism, preferably

increased resistance to biotic stress, preferably pathogenic fungi as compared to a corresponding non-transformed wild type control is conferred in said organism.

[0392] Accordingly, in one embodiment, in case the activity of a polypeptide according to the polypeptide SEQ ID NO.: 166, or encoded by a nucleic acid molecule comprising the nucleic acid SEQ ID NO.: 165 or a homolog of said nucleic acid molecule or polypeptide, e.g. if the activity of a nucleic acid molecule or a polypeptide comprising the nucleic acid or polypeptide or the consensus sequence or the polypeptide motif, as depicted in Table I, II or IV, column 7 in the respective same line as the nucleic acid molecule SEQ ID NO.: 165 or polypeptide SEQ ID NO.: 166, respectively is increased or generated or if the activity “chloramphenicol resistance protein homolog ydeA” is increased or generated in an organism, preferably

increased resistance to biotic stress, preferably pathogenic fungi as compared to a corresponding non-transformed wild type control is conferred in said organism.

[0393] Accordingly, in one embodiment, in case the activity of a polypeptide according to the polypeptide SEQ ID NO.: 243, or encoded by a nucleic acid molecule comprising the nucleic acid SEQ ID NO.: 242 or a homolog of said nucleic acid molecule or polypeptide, e.g. if the activity of a nucleic acid molecule or a polypeptide comprising the nucleic acid or polypeptide or the consensus sequence or the polypeptide motif, as depicted in Table I, II or IV, column 7 in the respective same line as the nucleic acid molecule SEQ ID NO.: 242 or polypeptide SEQ ID NO.: 243, respectively is increased or generated or if the activity “transmembrane pore-generating protein mglC” is increased or generated in an organism, preferably

increased resistance to biotic stress, preferably pathogenic fungi as compared to a corresponding non-transformed wild type control is conferred in said organism.

[0394] Accordingly, in one embodiment, in case the activity of a polypeptide according to the polypeptide SEQ ID NO.: 313, or encoded by a nucleic acid molecule comprising the nucleic acid SEQ ID NO.: 312 or a homolog of said nucleic acid molecule or polypeptide, e.g. if the activity of a nucleic acid molecule or a polypeptide comprising the nucleic acid or polypeptide or the consensus sequence or the polypeptide motif, as depicted in Table I, II or IV, column 7 in the respective same line as the nucleic acid molecule SEQ ID NO.: 312 or polypeptide SEQ ID NO.: 313, respectively is increased or generated or if the activity “RNA polymerase sigma-E factor (sigma-24)” is increased or generated in an organism, preferably

increased resistance to biotic stress, preferably pathogenic fungi as compared to a corresponding non-transformed wild type control is conferred in said organism.

[0395] Accordingly, in one embodiment, in case the activity of a polypeptide according to the polypeptide SEQ ID NO.: 469, or encoded by a nucleic acid molecule comprising the nucleic acid SEQ ID NO.: 468 or a homolog of said nucleic acid molecule or polypeptide, e.g. if the activity of a nucleic acid molecule or a polypeptide comprising the nucleic acid or polypeptide or the consensus sequence or the polypeptide motif, as depicted in Table I, II or IV, column 7 in the respective same line as the nucleic acid molecule SEQ ID NO.: 468 or polypeptide SEQ ID NO.: 469, respectively is increased or generated or if the activity “chorismate mutase-T and prephenate dehydrogenase” is increased or generated in an organism, preferably

increased resistance to biotic stress, preferably pathogenic fungi as compared to a corresponding non-transformed wild type control is conferred in said organism.

[0396] Accordingly, in one embodiment, in case the activity of a polypeptide according to the polypeptide SEQ ID NO.: 535, or encoded by a nucleic acid molecule comprising the nucleic acid SEQ ID NO.: 534 or a homolog of said nucleic acid molecule or polypeptide, e.g. if the activity of a nucleic acid molecule or a polypeptide comprising the nucleic acid or polypeptide or the consensus sequence or the polypeptide motif, as depicted in Table I, II or IV, column 7 in the respective same line as the nucleic acid molecule SEQ ID NO.: 534 or polypeptide SEQ ID NO.: 535, respectively is increased or generated or if the activity “recombinase A” is increased or generated in an organism, preferably

increased resistance to biotic stress, preferably pathogenic fungi as compared to a corresponding non-transformed wild type control is conferred in said organism.

[0397] Accordingly, in one embodiment, in case the activity of a polypeptide according to the polypeptide SEQ ID NO.: 971, or encoded by a nucleic acid molecule comprising the nucleic acid SEQ ID NO.: 970 or a homolog of said nucleic acid molecule or polypeptide, e.g. if the activity of a nucleic acid molecule or a polypeptide comprising the nucleic acid or polypeptide or the consensus sequence or the polypeptide motif, as depicted in Table I, II or IV, column 7 in the respective same line as the nucleic acid molecule SEQ ID NO.: 970 or polypeptide SEQ ID NO.: 971, respectively is increased or generated or if the activity “sulfite reductase (NADPH), flavoprotein beta subunit” is increased or generated in an organism, preferably

increased resistance to biotic stress, preferably pathogenic fungi as compared to a corresponding non-transformed wild type control is conferred in said organism.

[0398] Accordingly, in one embodiment, in case the activity of a polypeptide according to the polypeptide SEQ ID NO.: 1144, or encoded by a nucleic acid molecule comprising the nucleic acid SEQ ID NO.: 1143 or a homolog of said nucleic acid molecule or polypeptide, e.g. if the activity of a nucleic acid molecule or a polypeptide comprising the nucleic acid or polypeptide or the consensus sequence or the polypeptide motif, as depicted in Table I, II or IV, column 7 in the respective same line as the nucleic acid molecule SEQ ID NO.: 1143 or polypeptide SEQ ID NO.: 1144, respectively is increased or generated or if the activity “b3262-protein” is increased or generated in an organism, preferably

increased resistance to biotic stress, preferably pathogenic fungi as compared to a corresponding non-transformed wild type control is conferred in said organism.

[0399] Accordingly, in one embodiment, in case the activity of a polypeptide according to the polypeptide SEQ ID NO.: 1175, or encoded by a nucleic acid molecule comprising the nucleic acid SEQ ID NO.: 1174 or a homolog of said nucleic acid molecule or polypeptide, e.g. if the activity of a nucleic acid molecule or a polypeptide comprising the nucleic acid or polypeptide or the consensus sequence or the polypeptide motif, as depicted in Table I, II or IV, column 7 in the respective same line as the nucleic acid molecule SEQ ID NO.: 1174 or polypeptide SEQ ID NO.: 1175, respectively is increased or generated or if the activity “peptidyl-prolyl cis-trans isomerase A (rotamase A)” is increased or generated in an organism, preferably

increased resistance to biotic stress, preferably pathogenic fungi as compared to a corresponding non-transformed wild type control is conferred in said organism.

[0400] Accordingly, in one embodiment, in case the activity of a polypeptide according to the polypeptide SEQ ID NO.: 1522, or encoded by a nucleic acid molecule comprising the nucleic acid SEQ ID NO.: 1521 or a homolog of said nucleic acid molecule or polypeptide, e.g. if the activity of a nucleic acid molecule or a polypeptide comprising the nucleic acid or polypeptide or the consensus sequence or the polypeptide motif, as depicted in Table I, II or IV, column 7 in the respective same line as the nucleic acid molecule SEQ ID NO.: 1521 or polypeptide SEQ ID NO.: 1522, respectively is increased or generated or if the activity “b3644-protein” is increased or generated in an organism, preferably

increased resistance to biotic stress, preferably pathogenic fungi as compared to a corresponding non-transformed wild type control is conferred in said organism.

[0401] Accordingly, in one embodiment, in case the activity of a polypeptide according to the polypeptide SEQ ID NO.: 1661, or encoded by a nucleic acid molecule comprising the nucleic acid SEQ ID NO.: 1660 or a homolog of said nucleic acid molecule or polypeptide, e.g. if the activity of a nucleic acid molecule or a polypeptide comprising the nucleic acid or polypeptide or the consensus sequence or the polypeptide motif, as depicted in Table I, II or IV, column 7 in the respective same line as the nucleic acid molecule SEQ ID NO.: 1660 or polypeptide SEQ ID NO.: 1661, respectively is increased or generated or if the activity “YCR087W-protein” is increased or generated in an organism, preferably

increased resistance to biotic stress, preferably pathogenic fungi as compared to a corresponding non-transformed wild type control is conferred in said organism.

[0402] Accordingly, in one embodiment, in case the activity of a polypeptide according to the polypeptide SEQ ID NO.: 1665, or encoded by a nucleic acid molecule comprising the nucleic acid SEQ ID NO.: 1664 or a homolog of said nucleic acid molecule or polypeptide, e.g. if the activity of a nucleic acid molecule or a polypeptide comprising the nucleic acid or polypeptide or the consensus sequence or the polypeptide motif, as depicted in Table I, II or IV, column 7 in the respective same line as the nucleic acid molecule SEQ ID NO.: 1664 or polypeptide SEQ ID NO.: 1665, respectively is increased or generated or if the activity “YGR150c-protein” is increased or generated in an organism, preferably

increased resistance to biotic stress, preferably pathogenic fungi as compared to a corresponding non-transformed wild type control is conferred in said organism.

[0403] Accordingly, in one embodiment, in case the activity of a polypeptide according to the polypeptide SEQ ID NO.: 1692, or encoded by a nucleic acid molecule comprising the nucleic acid SEQ ID NO.: 1691 or a homolog of said nucleic acid molecule or polypeptide, e.g. if the activity of a nucleic acid molecule or a polypeptide comprising the nucleic acid or polypeptide or the consensus sequence or the polypeptide motif, as depicted in Table I, II or IV, column 7 in the respective same line as the nucleic acid molecule SEQ ID NO.: 1691 or polypeptide SEQ ID NO.: 1692, respectively is increased or generated or if the activity “YIL172C-protein” is increased or generated in an organism, preferably

increased resistance to biotic stress, preferably pathogenic fungi as compared to a corresponding non-transformed wild type control is conferred in said organism.

[0404] Accordingly, in one embodiment, in case the activity of a polypeptide according to the polypeptide SEQ ID NO.: 1860, or encoded by a nucleic acid molecule comprising the nucleic acid SEQ ID NO.: 1859 or a homolog of said nucleic acid molecule or polypeptide, e.g. if the activity of a nucleic acid molecule or a polypeptide comprising the nucleic acid or polypeptide or the consensus sequence or the polypeptide motif, as depicted in Table I, II or IV, column 7 in the respective same line as the nucleic acid molecule SEQ ID NO.: 1859 or polypeptide SEQ ID NO.: 1860, respectively is increased or generated or if the activity “YLR168C-protein” is increased or generated in an organism, preferably

increased resistance to biotic stress, preferably pathogenic fungi as compared to a corresponding non-transformed wild type control is conferred in said organism.

[0405] Accordingly, in one embodiment, in case the activity of a polypeptide according to the polypeptide SEQ ID NO.: 1905, or encoded by a nucleic acid molecule comprising the nucleic acid SEQ ID NO.: 1904 or a homolog of said nucleic acid molecule or polypeptide, e.g. if the activity of a nucleic acid molecule or a polypeptide comprising the nucleic acid or polypeptide or the consensus sequence or the polypeptide motif, as depicted in Table I, II or IV, column 7 in the respective same line as the nucleic acid molecule SEQ ID NO.: 1904 or polypeptide SEQ ID NO.: 1905, respectively is increased or generated or if the activity “YLR407W-protein” is increased or generated in an organism, preferably

increased resistance to biotic stress, preferably pathogenic fungi as compared to a corresponding non-transformed wild type control is conferred in said organism.

[0406] Accordingly, in one embodiment, in case the activity of a polypeptide according to the polypeptide SEQ ID NO.: 1921, or encoded by a nucleic acid molecule comprising the nucleic acid SEQ ID NO.: 1920 or a homolog of said nucleic acid molecule or polypeptide, e.g. if the activity of a nucleic acid molecule or a polypeptide comprising the nucleic acid or polypeptide or the consensus sequence or the polypeptide motif, as depicted in Table I, II or IV, column 7 in the respective same line as the nucleic acid molecule SEQ ID NO.: 1920 or polypeptide SEQ ID NO.: 1921, respectively is increased or generated or if the activity “glucose-6-phosphate 1-dehydrogenase” is increased or generated in an organism, preferably

increased resistance to biotic stress, preferably pathogenic fungi as compared to a corresponding non-transformed wild type control is conferred in said organism.

[0407] Accordingly, in one embodiment, in case the activity of a polypeptide according to the polypeptide SEQ ID NO.: 2456, or encoded by a nucleic acid molecule comprising the nucleic acid SEQ ID NO.: 2455 or a homolog of said nucleic acid molecule or polypeptide, e.g. if the activity of a nucleic acid molecule or a polypeptide comprising the nucleic acid or polypeptide or the consensus sequence or the polypeptide motif, as depicted in Table I, II or IV, column 7 in the respective same line as the nucleic acid molecule SEQ ID NO.: 2455 or polypeptide SEQ ID NO.: 2456, respectively is increased or generated or if the activity “Gamma subunit of the translation initiation factor eIF2B” is increased or generated in an organism, preferably

increased resistance to biotic stress, preferably pathogenic fungi as compared to a corresponding non-transformed wild type control is conferred in said organism.

[0408] Accordingly, in one embodiment, in case the activity of a polypeptide according to the polypeptide SEQ ID NO.: 2478, or encoded by a nucleic acid molecule comprising the nucleic acid SEQ ID NO.: 2477 or a homolog of said nucleic acid molecule or polypeptide, e.g. if the activity of a nucleic acid molecule or a polypeptide comprising the nucleic acid or polypeptide or the consensus sequence or the polypeptide motif, as depicted in Table I, II or IV, column 7 in the respective same line as the nucleic acid molecule SEQ ID NO.: 2477 or polypeptide SEQ ID NO.: 2478, respectively is increased or generated or if the activity “YOR299W-protein” is increased or generated in an organism, preferably

increased resistance to biotic stress, preferably pathogenic fungi as compared to a corresponding non-transformed wild type control is conferred in said organism.

[0409] Accordingly, in one embodiment, in case the activity of a polypeptide according to the polypeptide SEQ ID NO.: 2508, or encoded by a nucleic acid molecule comprising the nucleic acid SEQ ID NO.: 2507 or a homolog of said nucleic acid molecule or polypeptide, e.g. if the activity of a nucleic acid molecule or a polypeptide comprising the nucleic acid or polypeptide or the consensus sequence or the polypeptide motif, as depicted in Table I, II or IV, column 7 in the respective same line as the nucleic acid molecule SEQ ID NO.: 2507 or polypeptide SEQ ID NO.: 2508, respectively is increased or generated or if the activity “ribosomal protein” is increased or generated in an organism, preferably

increased resistance to biotic stress, preferably pathogenic fungi as compared to a corresponding non-transformed wild type control is conferred in said organism.

[0410] Accordingly, in one embodiment, in case the activity of a polypeptide according to the polypeptide SEQ ID NO.: 2684, or encoded by a nucleic acid molecule comprising the nucleic acid SEQ ID NO.: 2683 or a homolog of said nucleic acid molecule or polypeptide, e.g. if the activity of a nucleic acid molecule or a polypeptide comprising the nucleic acid or polypeptide or the consensus sequence or the polypeptide motif, as depicted in Table I, II or IV, column 7 in the respective same line as the nucleic acid molecule SEQ ID NO.: 2683 or polypeptide SEQ ID NO.: 2684, respectively is increased or generated or if the activity “Splicing factor that is found in the Cef1p subcomplex of the spliceosome (Prp46p)” is increased or generated in an organism, preferably

increased resistance to biotic stress, preferably pathogenic fungi as compared to a corresponding non-transformed wild type control is conferred in said organism.

[0411] The term “expression” refers to the transcription and/or translation of a codogenic gene segment or gene. As a rule, the resulting product is an mRNA or a protein. However, expression products can also include functional RNAs such as, for example, antisense, nucleic acids, tRNAs, snRNAs, rRNAs, RNAi, siRNA, ribozymes etc. Expression may be systemic, local or temporal, for example limited to certain cell types, tissues organs or organelles or time periods.

[0412] In one embodiment, the process of the present invention comprises one or more of the following steps

a) stabilizing a protein conferring the increased expression of a protein encoded by the nucleic acid molecule of the invention or of the polypeptide of the invention having the herein-mentioned activity selected from the group consisting of b3262-protein, b3644-protein, chloramphenicol resistance protein homolog ydeA, chorismate mutase-T and prephenate dehydrogenase, Gamma subunit of the translation initiation factor eIF2B, glucose dehydrogenase, glucose-6-phosphate 1-dehydrogenase, peptidyl-prolyl cis-trans isomerase A (rotamase A), recombinase A, ribosomal protein, RNA polymerase sigma-E factor (sigma-24), Splicing factor that is found in the Cef1p subcomplex of the spliceosome (Prp46p), sulfite reductase (NADPH), flavoprotein beta subunit, transcription regulator farR, fatty acyl-responsive, transmembrane pore-generating protein mglC, YCR087W-protein, YGR150c-protein, YIL172C-protein, YLR168C-protein, YLR407W-protein, and YOR299W-protein and conferring an increased resistance to biotic stress, preferably pathogenic fungi as compared to a corresponding non-transformed wild type control plant cell, plant or part thereof;
b) stabilizing a mRNA conferring the increased expression of a protein encoded by the nucleic acid molecule of the invention or its homologs or of a mRNA encoding the polypeptide of the present invention having the herein-mentioned activity selected from the group consisting of b3262-protein, b3644-protein, chloramphenicol resistance protein homolog ydeA, chorismate mutase-T and prephenate dehydrogenase, Gamma subunit of the translation initiation factor eIF2B, glucose dehydrogenase, glucose-6-phosphate 1-dehydrogenase, peptidyl-prolyl cis-trans isomerase A (rotamase A), recombinase A, ribosomal protein, RNA polymerase sigma-E factor (sigma-24), Splicing factor that is found in the Cef1p subcomplex of the spliceosome (Prp46p), sulfite reductase (NADPH), flavoprotein beta subunit, transcription regulator farR, fatty acyl-responsive, transmembrane pore-generating protein mglC, YCR087W-protein, YGR150c-protein, YIL172C-protein, YLR168C-protein, YLR407W-protein, and YOR299W-protein and conferring an increased resistance to biotic stress, preferably pathogenic fungi as compared to a corresponding non-transformed wild type control;
c) increasing the specific activity of a protein conferring the increased expression of a protein encoded by the nucleic acid molecule of the invention or of the polypeptide of the present invention or decreasing the inhibitory regulation of the polypeptide of the invention;
d) generating or increasing the expression of an endogenous or artificial transcription factor mediating the expression of a protein conferring the increased expression of a protein encoded by the nucleic acid molecule of the invention or of the polypeptide of the invention having the herein-mentioned activity selected from the group consisting of b3262-protein, b3644-protein, chloramphenicol resistance protein homolog ydeA, chorismate mutase-T and prephenate dehydrogenase, Gamma subunit of the translation initiation factor eIF2B, glucose dehydrogenase, glucose-6-phosphate 1-dehydrogenase, peptidyl-prolyl cis-trans isomerase A (rotamase A), recombinase A, ribosomal protein, RNA polymerase sigma-E factor (sigma-24), Splicing factor that is found in the Cef1p subcomplex of the spliceosome (Prp46p), sulfite reductase (NADPH), flavoprotein beta subunit, transcription regulator farR, fatty acyl-responsive, transmembrane pore-generating protein mglC, YCR087W-protein, YGR150c-protein, YIL172C-protein, YLR168C-protein, YLR407W-protein, and YOR299W-protein and conferring an increased resistance to biotic stress, preferably pathogenic fungi as compared to a corresponding non-transformed wild type control;
e) stimulating activity of a protein conferring the increased expression of a protein encoded by the nucleic acid molecule of the present invention or a polypeptide of the present invention having the herein-mentioned activity selected from the group consisting of b3262-protein, b3644-protein, chloramphenicol resistance protein homolog ydeA, chorismate mutase-T and prephenate dehydrogenase, Gamma subunit of the translation initiation factor eIF2B, glucose dehydrogenase, glucose-6-phosphate 1-dehydrogenase, peptidyl-prolyl cis-trans isomerase A (rotamase A), recombinase A, ribosomal protein, RNA polymerase sigma-E factor (sigma-24), Splicing factor that is found in the Cef1p subcomplex of the spliceosome (Prp46p), sulfite reductase (NADPH), flavoprotein beta subunit, transcription regulator farR, fatty acyl-responsive, transmembrane pore-generating protein mglC, YCR087W-protein, YGR150c-protein, YIL172C-protein, YLR168C-protein, YLR407W-protein, and YOR299W-protein and conferring an increased resistance to biotic stress, preferably pathogenic fungi as compared to a corresponding non-transformed wild type control;
f) expressing a transgenic gene encoding a protein conferring the increased expression of a polypeptide encoded by the nucleic acid molecule of the present invention or a polypeptide of the present invention, having the herein-mentioned activity selected from the group consisting of b3262-protein, b3644-protein, chloramphenicol resistance protein homolog ydeA, chorismate mutase-T and prephenate dehydrogenase, Gamma subunit of the translation initiation factor eIF2B, glucose dehydrogenase, glucose-6-phosphate 1-dehydrogenase, peptidyl-prolyl cis-trans isomerase A (rotamase A), recombinase A, ribosomal protein, RNA polymerase sigma-E factor (sigma-24), Splicing factor that is found in the Cef1p subcomplex of the spliceosome (Prp46p), sulfite reductase (NADPH), flavoprotein beta subunit, transcription regulator farR, fatty acyl-responsive, transmembrane pore-generating protein mglC, YCR087W-protein, YGR150c-protein, YIL172C-protein, YLR168C-protein, YLR407W-protein, and YOR299W-protein and conferring an increased resistance to biotic stress, preferably pathogenic fungi as compared to a corresponding non-transformed wild type control; and/or
g) increasing the copy number of a gene conferring the increased expression of a nucleic acid molecule encoding a polypeptide encoded by the nucleic acid molecule of the invention or the polypeptide of the invention having the herein-mentioned activity selected from the group consisting of b3262-protein, b3644-protein, chloramphenicol resistance protein homolog ydeA, chorismate mutase-T and prephenate dehydrogenase, Gamma subunit of the translation initiation factor eIF2B, glucose dehydrogenase, glucose-6-phosphate 1-dehydrogenase, peptidyl-prolyl cis-trans isomerase A (rotamase A), recombinase A, ribosomal protein, RNA polymerase sigma-E factor (sigma-24), Splicing factor that is found in the Cef1p subcomplex of the spliceosome (Prp46p), sulfite reductase (NADPH), flavoprotein beta subunit, transcription regulator farR, fatty acyl-responsive, transmembrane pore-generating protein mglC, YCR087W-protein, YGR150c-protein, YIL172C-protein, YLR168C-protein, YLR407W-protein, and YOR299W-protein and conferring an increased resistance to biotic stress, preferably pathogenic fungi as compared to a corresponding non-transformed wild type control;
h) increasing the expression of the endogenous gene encoding the polypeptide of the invention or its homologs by adding positive expression or removing negative expression elements, e.g. homologous recombination can be used to either introduce positive regulatory elements like for plants the 35S enhancer into the promoter or to remove repressor elements form regulatory regions. Further gene conversion methods can be used to disrupt repressor elements or to enhance to activity of positive elements-positive elements can be randomly introduced in plants by T-DNA or transposon mutagenesis and lines can be identified in which the positive elements have been integrated near to a gene of the invention, the expression of which is thereby enhanced;
and/or
i) modulating growth conditions of the plant in such a manner, that the expression or activity of the gene encoding the protein of the invention or the protein itself is enhanced;
j) selecting of organisms with especially high activity of the proteins of the invention from natural or from mutagenized resources and breeding them into the target organisms, e.g. the elite crops.

[0413] Preferably, said mRNA is the nucleic acid molecule of the present invention and/or the protein conferring the increased expression of a protein encoded by the nucleic acid molecule of the present invention alone or linked to a transit nucleic acid sequence or transit peptide encoding nucleic acid sequence or the polypeptide having the herein mentioned activity, e.g. conferring an increased resistance to biotic stress, preferably pathogenic fungi as compared to a corresponding non-transformed wild type control plant cell, plant or part thereof after increasing the expression or activity of the encoded polypeptide or having the activity of a polypeptide having an activity as the protein as shown in table II column 3 or its homologs.

[0414] In general, the amount of mRNA or polypeptide in a cell or a compartment of an organism correlates with the amount of encoded protein and thus with the overall activity of the encoded protein in said volume. Said correlation is not always linear, the activity in the volume is dependent on the stability of the molecules or the presence of activating or inhibiting co-factors. Further, product and educt inhibitions of enzymes are well known and described in textbooks, e.g. Stryer, Biochemistry.

[0415] In general, the amount of mRNA, polynucleotide or nucleic acid molecule in a cell or a compartment of an organism correlates with the amount of encoded protein and thus with the overall activity of the encoded protein in said volume. Said correlation is not always linear, the activity in the volume is dependent on the stability of the molecules, the degradation of the molecules or the presence of activating or inhibiting co-factors. Further, product and educt inhibitions of enzymes are well known, e.g. Zinser et al. “Enzyminhibitoren”/Enzyme inhibitors”.

[0416] The activity of the abovementioned proteins and/or polypeptides encoded by the nucleic acid molecule of the present invention can be increased in various ways. For example, the activity in an organism or in a part thereof, like a cell, is increased via increasing the gene product number, e.g. by increasing the expression rate, like introducing a stronger promoter, or by increasing the stability of the mRNA expressed, thus increasing the translation rate, and/or increasing the stability of the gene product, thus reducing the proteins decayed. Further, the activity or turnover of enzymes can be influenced in such a way that a reduction or increase of the reaction rate or a modification (reduction or increase) of the affinity to the substrate results, is reached. A mutation in the catalytic center of an polypeptide of the invention, e.g. as enzyme, can modulate the turn over rate of the enzyme, e.g. a knock out of an essential amino acid can lead to a reduced or completely knock out activity of the enzyme, or the deletion or mutation of regulator binding sites can reduce a negative regulation like a feedback inhibition (or a substrate inhibition, if the substrate level is also increased). The specific activity of an enzyme of the present invention can be increased such that the turn over rate is increased or the binding of a co-factor is improved. Improving the stability of the encoding mRNA or the protein can also increase the activity of a gene product. The stimulation of the activity is also under the scope of the term “increased activity”.

[0417] Moreover, the regulation of the abovementioned nucleic acid sequences may be modified so that gene expression is increased. This can be achieved advantageously by means of heterologous regulatory sequences or by modifying, for example mutating, the natural regulatory sequences which are present. The advantageous methods may also be combined with each other.

[0418] In general, an activity of a gene product in an organism or part thereof, in particular in a plant cell or organelle of a plant cell, a plant, or a plant tissue or a part thereof or in a microorganism can be increased by increasing the amount of the specific encoding mRNA or the corresponding protein in said organism or part thereof. “Amount of protein or mRNA” is understood as meaning the molecule number of polypeptides or mRNA molecules in an organism, a tissue, a cell or a cell compartment. “Increase” in the amount of a protein means the quantitative increase of the molecule number of said protein in an organism, a tissue, a cell or a cell compartment such as an organelle like a plastid or mitochondria or part thereof—for example by one of the methods described herein below—in comparison to a wild type, control or reference.

[0419] The increase in molecule number amounts preferably to at least 1%, preferably to more than 10%, more preferably to 30% or more, especially preferably to 50%, 70% or more, very especially preferably to 100%, most preferably to 500% or more. However, a de novo expression is also regarded as subject of the present invention.

[0420] A modification, i.e. an increase, can be caused by endogenous or exogenous factors. For example, an increase in activity in an organism or a part thereof can be caused by adding a gene product or a precursor or an activator or an agonist to the media or nutrition or can be caused by introducing said subjects into a organism, transient or stable. Furthermore such an increase can be reached by the introduction of the inventive nucleic acid sequence or the encoded protein in the correct cell compartment for example into the nucleus, or cytoplasm respectively or into plastids either by transformation and/or targeting.

[0421] In one embodiment the increase or decrease in tolerance and/or resistance to environmental stress as compared to a corresponding non-transformed wild type plant cell in the plant or a part thereof, e.g. in a cell, a tissue, a organ, an organelle etc., is achieved by increasing the endogenous level of the polypeptide of the invention. Accordingly, in an embodiment of the present invention, the present invention relates to a process wherein the gene copy number of a gene encoding the polynucleotide or nucleic acid molecule of the invention is increased. Further, the endogenous level of the polypeptide of the invention can for example be increased by modifying the transcriptional or translational regulation of the polypeptide.

[0422] In one embodiment the increased tolerance and/or resistance to environmental stress in the plant or part thereof can be altered by targeted or random mutagenesis of the endogenous genes of the invention. For example homologous recombination can be used to either introduce positive regulatory elements like for plants the 35S enhancer into the promoter or to remove repressor elements form regulatory regions. In addition gene conversion like methods described by Kochevenko and Willmitzer (Plant Physiol. 2003 May; 132(1):174-84) and citations therein can be used to disrupt repressor elements or to enhance to activity of positive regulatory elements. Furthermore positive elements can be randomly introduced in (plant) genomes by T-DNA or transposon mutagenesis and lines can be screened for, in which the positive elements has be integrated near to a gene of the invention, the expression of which is thereby enhanced. The activation of plant genes by random integrations of enhancer elements has been described by Hayashi et al., 1992 (Science 258:1350-1353) or Weigel et al., 2000 (Plant Physiol. 122, 1003-1013) and others citated therein. Reverse genetic strategies to identify insertions (which eventually carrying the activation elements) near in genes of interest have been described for various cases e.g. Krysan et al., 1999 (Plant Cell 1999, 11, 2283-2290); Sessions et al., 2002 (Plant Cell 2002, 14, 2985-2994); Young et al., 2001, (Plant Physiol. 2001, 125, 513-518); Koprek et al., 2000 (Plant J. 2000, 24, 253-263); Jeon et al., 2000 (Plant J. 2000, 22, 561-570); Tissier et al., 1999 (Plant Cell 1999, 11, 1841-1852); Speulmann et al., 1999 (Plant Cell 1999, 11, 1853-1866). Briefly material from all plants of a large T-DNA or transposon mutagenized plant population is harvested and genomic DNA prepared. Then the genomic DNA is pooled following specific architectures as described for example in Krysan et al., 1999 (Plant Cell 1999, 11, 2283-2290). Pools of genomics DNAs are then screened by specific multiplex PCR reactions detecting the combination of the insertional mutagen (eg T-DNA or Transposon) and the gene of interest. Therefore PCR reactions are run on the DNA pools with specific combinations of T-DNA or transposon border primers and gene specific primers. General rules for primer design can again be taken from Krysan et al., 1999 (Plant Cell 1999, 11, 2283-2290) Re-screening of lower levels DNA pools lead to the identification of individual plants in which the gene of interest is activated by the insertional mutagen.

[0423] The enhancement of positive regulatory elements or the disruption or weakening of negative regulatory elements can also be achieved through common mutagenesis techniques: The production of chemically or radiation mutated populations is a common technique and known to the skilled worker. Methods for plants are described by Koorneef et al. 1982 and the citations therein and by Lightner and Caspar in “Methods in Molecular Biology” Vol 82. These techniques usually induce pointmutations that can be identified in any known gene using methods such as TILLING (Colbert et al. 2001).

[0424] Accordingly, the expression level can be increased if the endogenous genes encoding a polypeptide conferring an increased expression of the polypeptide of the present invention, in particular genes comprising the nucleic acid molecule of the present invention, are modified via homologous recombination, Tilling approaches or gene conversion. It also possible to add as mentioned herein targeting sequences to the inventive nucleic acid sequences.

[0425] Regulatory sequences preferably in addition to a target sequence or part thereof can be operatively linked to the coding region of an endogenous protein and control its transcription and translation or the stability or decay of the encoding mRNA or the expressed protein. In order to modify and control the expression, promoter, UTRs, splicing sites, processing signals, polyadenylation sites, terminators, enhancers, repressors, post transcriptional or posttranslational modification sites can be changed, added or amended. For example, the activation of plant genes by random integrations of enhancer elements has been described by Hayashi et al., 1992 (Science 258:1350-1353) or Weigel et al., 2000 (Plant Physiol. 122, 1003-1013) and others citated therein. For example, the expression level of the endogenous protein can be modulated by replacing the endogenous promoter with a stronger transgenic promoter or by replacing the endogenous 3′UTR with a 3′UTR, which provides more stability without amending the coding region. Further, the transcriptional regulation can be modulated by introduction of an artificial transcription factor as described in the examples. Alternative promoters, terminators and UTR are described below.

[0426] The activation of an endogenous polypeptide having above-mentioned activity, e.g. having the activity of a protein as shown in table II, column 3 or of the polypeptide of the invention, e.g. conferring the increased resistance to biotic stress, preferably pathogenic fungi as compared to a corresponding non-transformed wild type control plant cell, plant or part thereof after increase of expression or activity in the cytosol and/or in an organelle like a plastid, can also be increased by introducing a synthetic transcription factor, which binds close to the coding region of the gene encoding the protein as shown in table II, column 3 and activates its transcription. A chimeric zinc finger protein can be constructed, which comprises a specific DNA-binding domain and an activation domain as e.g. the VP16 domain of Herpes Simplex virus. The specific binding domain can bind to the regulatory region of the gene encoding the protein as shown in table II, column 3. The expression of the chimeric transcription factor in a organism, in particular in a plant, leads to a specific expression of the protein as shown in table II, column 3, see e.g. in WO01/52620, Oriz, Proc. Natl. Acad. Sci. USA, 2002, Vol. 99, 13290 or Guan, Proc. Natl. Acad. Sci. USA, 2002, Vol. 99, 13296.

[0427] In one further embodiment of the process according to the invention, organisms are used in which one of the abovementioned genes, or one of the above-mentioned nucleic acids, is mutated in a way that the activity of the encoded gene products is less influenced by cellular factors, or not at all, in comparison with the unmutated proteins. For example, well known regulation mechanism of enzymic activity are substrate inhibition or feed back regulation mechanisms. Ways and techniques for the introduction of substitution, deletions and additions of one or more bases, nucleotides or amino acids of a corresponding sequence are described herein below in the corresponding paragraphs and the references listed there, e.g. in Sambrook et al., Molecular Cloning, Cold Spring Harbour, N.Y., 1989. The person skilled in the art will be able to identify regulation domains and binding sites of regulators by comparing the sequence of the nucleic acid molecule of the present invention or the expression product thereof with the state of the art by computer software means which comprise algorithms for the identifying of binding sites and regulation domains or by introducing into a nucleic acid molecule or in a protein systematically mutations and assaying for those mutations which will lead to an increased specific activity or an increased activity per volume, in particular per cell.

[0428] It can therefore be advantageous to express in an organism a nucleic acid molecule of the invention or a polypeptide of the invention derived from a evolutionary distantly related organism, as e.g. using a prokaryotic gene in a eukaryotic host, as in these cases the regulation mechanism of the host cell may not weaken the activity (cellular or specific) of the gene or its expression product.

[0429] The mutation is introduced in such a way that the increased yield under condition of transient and repetitive abiotic stress is not adversely affected.

[0430] Less influence on the regulation of a gene or its gene product is understood as meaning a reduced regulation of the enzymatic activity leading to an increased specific or cellular activity of the gene or its product. An increase of the enzymatic activity is understood as meaning an enzymatic activity, which is increased by at least 10%, advantageously at least 20, 30 or 40%, especially advantageously by at least 50, 60 or 70% in comparison with the starting organism. This leads to an increased resistance to biotic stress, preferably pathogenic fungi as compared to a corresponding non-transformed wild type control plant cell, plant or part thereof.

[0431] The invention provides that the above methods can be performed such that the stress tolerance is increased. It is also possible to obtain a decrease in stress tolerance.

[0432] The invention is not limited to specific nucleic acids, specific polypeptides, specific cell types, specific host cells, specific conditions or specific methods etc. as such, but may vary and numerous modifications and variations therein will be apparent to those skilled in the art. It is also to be understood that the terminology used herein is for the purpose of describing specific embodiments only and is not intended to be limiting.

[0433] The present invention also relates to isolated nucleic acids comprising a nucleic acid molecule selected from the group consisting of:
[0434] a) a nucleic acid molecule encoding the polypeptide shown in column 7 of Table II B;
[0435] b) a nucleic acid molecule shown in column 7 of Table I B;
[0436] c) a nucleic acid molecule, which, as a result of the degeneracy of the genetic code, can be derived from a polypeptide sequence depicted in column 5 or 7 of Table II and confers an increased resistance to biotic stress, preferably pathogenic fungi as compared to a corresponding non-transformed wild type control plant cell, a plant or a part thereof;
[0437] d) a nucleic acid molecule having at least 30% identity with the nucleic acid molecule sequence of a polynucleotide comprising the nucleic acid molecule shown in column 5 or 7 of Table I and confers an increased resistance to biotic stress, preferably pathogenic fungi as compared to a corresponding non-transformed wild type control plant cell, a plant or a part thereof;
[0438] e) a nucleic acid molecule encoding a polypeptide having at least 30% identity with the amino acid sequence of the polypeptide encoded by the nucleic acid molecule of (a) to (c) and having the activity represented by a nucleic acid molecule comprising a polynucleotide as depicted in column 5 of Table I and confers an increased resistance to biotic stress, preferably pathogenic fungi as compared to a corresponding non-transformed wild type control plant cell, a plant or a part thereof;
[0439] f) nucleic acid molecule which hybridizes with a nucleic acid molecule of (a) to (c) under stringent hybridization conditions and confers an increased resistance to biotic stress, preferably pathogenic fungi as compared to a corresponding non-transformed wild type control plant cell, a plant or a part thereof;
[0440] g) a nucleic acid molecule encoding a polypeptide which can be isolated with the aid of monoclonal or polyclonal antibodies made against a polypeptide encoded by one of the nucleic acid molecules of (a) to (e) and having the activity represented by the nucleic acid molecule comprising a polynucleotide as depicted in column 5 of Table I;
[0441] h) a nucleic acid molecule encoding a polypeptide comprising the consensus sequence or one or more polypeptide motifs as shown in column 7 of Table IV and preferably having the activity represented polypeptide comprising a polypeptide as depicted in column 5 of Table II or IV;
[0442] h) a nucleic acid molecule encoding a polypeptide having the activity represented by a protein as depicted in column 5 of Table II and confers an increased resistance to biotic stress, preferably pathogenic fungi as compared to a corresponding non-transformed wild type control plant cell, a plant or a part thereof;
[0443] i) nucleic acid molecule which comprises a polynucleotide, which is obtained by amplifying a cDNA library or a genomic library using the primers in column 7 of Table III and preferably having the activity represented by a polypeptide comprising a polypeptide as depicted in column 5 of Table II or IV;
[0444] and
[0445] j) a nucleic acid molecule which is obtainable by screening a suitable nucleic acid library under stringent hybridization conditions with a probe comprising a complementary sequence of a nucleic acid molecule of (a) or (b) or with a fragment thereof, having at least 15 nt, preferably 20 nt, 30 nt, 50 nt, 100 nt, 200 nt or 500 nt of a nucleic acid molecule complementary to a nucleic acid molecule sequence characterized in (a) to (e) and encoding a polypeptide having the activity represented by a protein comprising a polypeptide as depicted in column 5 of Table II;
   whereby the nucleic acid molecule according to (a) to (j) is at least in one or more nucleotides different from the sequence depicted in column 5 or 7 of Table I A and preferably which encodes a protein which differs at least in one or more amino acids from the protein sequences depicted in column 5 or 7 of Table II A.

[0446] In one embodiment, the homolog of the any one of the polypeptides indicated in Table II, column 3, is a homolog having the same or a similar activity. In particular an increase of activity confers an increased resistance to biotic stress, preferably pathogenic fungi as compared to a corresponding non-transformed wild type control.

[0447] In one embodiment, the homolog is a homolog with a sequence as indicated in Table I or II, column 7. In one embodiment, the homolog of one of the polypeptides indicated in Table II, column 3, is derived from an eukaryotic organism. In one embodiment, the homolog is derived from Fungi. In one embodiment, the homolog of a polypeptide indicated in Table II, column 3, is derived from Ascomyceta. In one embodiment, the homolog of a polypeptide indicated in Table II, column 3 is derived from Saccharomycotina. In one embodiment, the homolog of a polypeptide indicated in Table II, column 3, is derived from Saccharomycetes, preferably from Saccharomycetales, from Saccharomycetaceae, more preferably from Saccharomycetes.

[0448] In one embodiment, the homolog is a homolog with a sequence as indicated in Table I or II, column 7. In one embodiment, the homolog of one of the polypeptides indicated in Table II, column 3, is derived from a bacteria. In one embodiment, the homolog of a polypeptide indicated in Table II, column 3, is derived from Proteobacteria. In one embodiment, the homolog of a polypeptide indicated in Table II, column 3, is a homolog having the same or a similar activity being derived from Gammaproteobacteria, preferably from Enterobacteriales, from Enterobacteriaceae, more preferably from Escherichia.

[0449] In one embodiment the invention relates to homologs of the aforementioned sequences, which can be isolated advantageously from yeast, fungi, viruses, algae, bacteria, such as Acetobacter (subgen. Acetobacter) aceti; Acidithiobacillus ferrooxidans; Acinetobacter sp.; Actinobacillus sp; Aeromonas salmonicida; Agrobacterium tumefaciens; Aquifex aeolicus; Arcanobacterium pyogenes; Aster yellows phytoplasma; Bacillus sp.; Bifidobacterium sp.; Borrelia burgdorferi; Brevibacterium linens; Brucella melitensis; Buchnera sp.; Butyrivibrio fibrisolvens; Campylobacter jejuni; Caulobacter crescentus; Chlamydia sp.; Chlamydophila sp.; Chlorobium limicola; Citrobacter rodentium; Clostridium sp.; Comamonas testosteroni; Corynebacterium sp.; Coxiella burnetii; Deinococcus radiodurans; Dichelobacter nodosus; Edwardsiella ictaluri; Enterobacter sp.; Erysipelothrix rhusiopathiae; Escherichia coli; Flavobacterium sp.; Francisella tularensis; Frankia sp. Cpl1; Fusobacterium nucleatum; Geobacillus stearothermophilus; Gluconobacter oxydans; Haemophilus sp.; Helicobacter pylori; Klebsiella pneumoniae; Lactobacillus sp.; Lactococcus lactis; Listeria sp.; Mannheimia haemolytica; Mesorhizobium loti; Methylophaga thalassica; Microcystis aeruginosa; Microscilla sp. PRE1; Moraxella sp. TA144; Mycobacterium sp.; Mycoplasma sp.; Neisseria sp.; Nitrosomonas sp.; Nostoc sp. PCC 7120; Novosphingobium aromaticivorans; Oenococcus oeni; Pantoea citrea; Pasteurella multocida; Pediococcus pentosaceus; Phormidium foveolarum; Phytoplasma sp.; Plectonema boryanum; Prevotella ruminicola; Propioni-bacterium sp.; Proteus vulgaris; Pseudomonas sp.; Ralstonia sp.; Rhizobium sp.; Rhodococcus equi; Rhodothermus marinus; Rickettsia sp.; Riemerella anatipestifer; Ruminococcus flavefaciens; Salmonella sp.; Selenomonas ruminantium; Serratia entomophila; Shigella sp.; Sinorhizobium meliloti; Staphylococcus sp.; Streptococcus sp.; Streptomyces sp.; Synechococcus sp.; Synechocystis sp. PCC 6803; Thermotoga maritima; Treponema sp.; Ureaplasma urealyticum; Vibrio cholerae; Vibrio parahaemolyticus; Xylella fastidiosa; Yersinia sp.; Zymomonas mobilis, preferably Salmonella sp. or Escherichia coli or plants, preferably from yeasts such as from the genera Saccharomyces, Pichia, Candida, Hansenula, Torulopsis or Schizosaccharomyces or plants such as Arabidopsis thaliana, maize, wheat, rye, oat, triticale, rice, barley, soybean, peanut, cotton, borage, sunflower, linseed, primrose, rapeseed, canola and turnip rape, manihot, pepper, sunflower, tagetes, solanaceous plant such as potato, tobacco, eggplant and tomato, Vicia species, pea, alfalfa, bushy plants such as coffee, cacao, tea, Salix species, trees such as oil palm, coconut, perennial grass, such as ryegrass and fescue, and forage crops, such as alfalfa and clover and from spruce, pine or fir for example. More preferably homologs of aforementioned sequences can be isolated from Saccharomyces cerevisiae, E. coli or plants, preferably Brassica napus, Glycine max, Zea mays, cotton, or Oryza sativa.

[0450] The (stress related) proteins of the present invention are preferably produced by recombinant DNA techniques. For example, a nucleic acid molecule encoding the protein is cloned into an expression vector, for example in to a binary vector, the expression vector is introduced into a host cell, for example the Arabidopsis thaliana wild type NASC N906 or any other plant cell as described in the examples see below, and the stress related protein is expressed in said host cell. Examples for binary vectors are pBIN19, pBI101, pBinAR, pGPTV, pCAMBIA, pBIB-HYG, pBecks, pGreen or pPZP (Hajukiewicz, P. et al., 1994, Plant Mol. Biol., 25: 989-994 and Hellens et al, Trends in Plant Science (2000) 5, 446-451.).

[0451] In one embodiment the (BSRP) protein of the present invention is preferably produced in an compartment of the cell, more preferably in the plastids. Ways of introducing nucleic acids into plastids and producing proteins in this compartment are know to the person skilled in the art have been also described in this application.

[0452] Advantageously, the nucleic acid sequences according to the invention or the gene construct together with at least one reporter gene are cloned into an expression cassette, which is introduced into the organism via a vector or directly into the genome. This reporter gene should allow easy detection via a growth, fluorescence, chemical, bioluminescence or resistance assay or via a photometric measurement. Examples of reporter genes which may be mentioned are antibiotic- or herbicide-resistance genes, hydrolase genes, fluorescence protein genes, bioluminescence genes, sugar or nucleotide metabolic genes or biosynthesis genes such as the Ura3 gene, the IIv2 gene, the luciferase gene, the β-galactosidase gene, the gfp gene, the 2-desoxyglucose-6-phosphate phosphatase gene, the β-glucuronidase gene, β-lactamasegene, the neomycin phosphotransferase gene, the hygromycin phosphotransferase gene, a mutated acetohydroxyacid synthase (AHAS) gene, also known as acetolactate synthase (ALS) gene], a gene for a D-amino acid metabolizing enzyme or the BASTA (=gluphosinate-resistance) gene. These genes permit easy measurement and quantification of the transcription activity and hence of the expression of the genes. In this way genome positions may be identified which exhibit differing productivity.

[0453] In a preferred embodiment a nucleic acid construct, for example an expression cassette, comprises upstream, i.e. at the 5′ end of the encoding sequence, a promoter and downstream, i.e. at the 3′ end, a polyadenylation signal and optionally other regulatory elements which are operably linked to the intervening encoding sequence with one of the nucleic acids of SEQ ID NO as depicted in table I, column 5 and 7. By an operable linkage is meant the sequential arrangement of promoter, encoding sequence, terminator and optionally other regulatory elements in such a way that each of the regulatory elements can fulfill its function in the expression of the encoding sequence in due manner. The sequences preferred for operable linkage are targeting sequences for ensuring subcellular localization in plastids. However, targeting sequences for ensuring subcellular localization in the mitochondrium, in the endoplasmic reticulum (=ER), in the nucleus, in oil corpuscles or other compartments may also be employed as well as translation promoters such as the 5′ lead sequence in tobacco mosaic virus (Gallie et al., Nucl. Acids Res. 15 (1987), 8693-8711).

[0454] A nucleic acid construct, for example an expression cassette may, for example, contain a constitutive promoter or a tissue-specific promoter (preferably the USP or napin promoter) the gene to be expressed and the ER retention signal. For the ER retention signal the KDEL amino acid sequence (lysine, aspartic acid, glutamic acid, leucine) or the KKX amino acid sequence (lysine-lysine-X-stop, wherein X means every other known amino acid) is preferably employed.

[0455] For expression in a host organism, for example a plant, the expression cassette is advantageously inserted into a vector such as by way of example a plasmid, a phage or other DNA which allows optimal expression of the genes in the host organism. Examples of suitable plasmids are: in E. coli pLG338, pACYC184, pBR series such as e.g. pBR322, pUC series such as pUC18 or pUC19, M113 mp series, pKC30, pRep4, pHS1, pHS2, pPLc236, pMBL24, pLG200, pUR290, pIN-III¹¹³-B1, λgt11 or pBdCl; in Streptomyces pIJ101, pIJ364, pIJ702 or pIJ361; in Bacillus pUB110, pC194 or pBD214; in Corynebacterium pSA77 or pAJ667; in fungi pALS1, pIL2 or pBB116; other advantageous fungal vectors are described by Romanos, M. A. et al., [(1992) “Foreign gene expression in yeast: a review”, Yeast 8: 423-488] and by van den Hondel, C. A. M. J. J. et al. [(1991) “Heterologous gene expression in filamentous fungi” as well as in More Gene Manipulations in Fungi [J. W. Bennet & L. L. Lasure, eds., pp. 396-428: Academic Press: San Diego] and in “Gene transfer systems and vector development for filamentous fungi” [van den Hondel, C. A. M. J. J. & Punt, P. J. (1991) in: Applied Molecular Genetics of Fungi, Peberdy, J. F. et al., eds., pp. 1-28, Cambridge University Press: Cambridge]. Examples of advantageous yeast promoters are 2 μM, pAG-1, YEp6, YEp13 or pEMBLYe23. Examples of algal or plant promoters are pLGV23, pGHlac⁺, pBIN19, pAK2004, pVKH or pDH51 (see Schmidt, R. and Willmitzer, L., 1988). The vectors identified above or derivatives of the vectors identified above are a small selection of the possible plasmids. Further plasmids are well known to those skilled in the art and may be found, for example, in the book Cloning Vectors (Eds. Pouwels P. H. et al. Elsevier, Amsterdam-New York-Oxford, 1985, ISBN 0 444 904018). Suitable plant vectors are described inter alia in “Methods in Plant Molecular Biology and Biotechnology” (CRC Press), Ch. 6/7, pp. 71-119. Advantageous vectors are known as shuttle vectors or binary vectors which replicate in E. coli and Agrobacterium.

[0456] By vectors is meant with the exception of plasmids all other vectors known to those skilled in the art such as by way of example phages, viruses such as SV40, CMV, baculovirus, adenovirus, transposons, IS elements, phasmids, phagemids, cosmids, linear or circular DNA. These vectors can be replicated autonomously in the host organism or be chromosomally replicated, chromosomal replication being preferred.

[0457] In a further embodiment of the vector the expression cassette according to the invention may also advantageously be introduced into the organisms in the form of a linear DNA and be integrated into the genome of the host organism by way of heterologous or homologous recombination. This linear DNA may be composed of a linearized plasmid or only of the expression cassette as vector or the nucleic acid sequences according to the invention.

[0458] In a further advantageous embodiment the nucleic acid sequence according to the invention can also be introduced into an organism on its own.

[0459] If in addition to the nucleic acid sequence according to the invention further genes are to be introduced into the organism, all together with a reporter gene in a single vector or each single gene with a reporter gene in a vector in each case can be introduced into the organism, whereby the different vectors can be introduced simultaneously or successively.

[0460] The vector advantageously contains at least one copy of the nucleic acid sequences according to the invention and/or the expression cassette (=gene construct) according to the invention.

[0461] The invention further provides an isolated recombinant expression vector comprising a nucleic acid encoding a polypeptide as depicted in table II, column 5 or 7, wherein expression of the vector in a host cell results in increased tolerance to environmental stress as compared to a wild type variety of the host cell. As used herein, the term “vector” refers to a nucleic acid molecule capable of transporting another nucleic acid to which it has been linked. One type of vector is a “plasmid,” which refers to a circular double stranded DNA loop into which additional DNA segments can be ligated. Another type of vector is a viral vector, wherein additional DNA segments can be ligated into the viral genome. Certain vectors are capable of autonomous replication in a host cell into which they are introduced (e.g., bacterial vectors having a bacterial origin of replication and episomal mammalian vectors). Other vectors (e.g., non-episomal mammalian vectors) are integrated into the genome of a host cell or a organelle upon introduction into the host cell, and thereby are replicated along with the host or organelle genome. Moreover, certain vectors are capable of directing the expression of genes to which they are operatively linked. Such vectors are referred to herein as “expression vectors.” In general, expression vectors of utility in recombinant DNA techniques are often in the form of plasmids. In the present specification, “plasmid” and “vector” can be used interchangeably as the plasmid is the most commonly used form of vector. However, the invention is intended to include such other forms of expression vectors, such as viral vectors (e.g., replication defective retroviruses, adenoviruses, and adeno-associated viruses), which serve equivalent functions.

[0462] The recombinant expression vectors of the invention comprise a nucleic acid of the invention in a form suitable for expression of the nucleic acid in a host cell, which means that the recombinant expression vectors include one or more regulatory sequences, selected on the basis of the host cells to be used for expression, which is operatively linked to the nucleic acid sequence to be expressed. As used herein with respect to a recombinant expression vector, “operatively linked” is intended to mean that the nucleotide sequence of interest is linked to the regulatory sequence(s) in a manner which allows for expression of the nucleotide sequence (e.g., in an in vitro transcription/translation system or in a host cell when the vector is introduced into the host cell). The term “regulatory sequence” is intended to include promoters, enhancers, and other expression control elements (e.g., polyadenylation signals). Such regulatory sequences are described, for example, in Goeddel, Gene Expression Technology: Methods in Enzymology 185, Academic Press, San Diego, Calif. (1990) and Gruber and Crosby, in: Methods in Plant Molecular Biology and Biotechnology, eds. Glick and Thompson, Chapter 7, 89-108, CRC Press: Boca Raton, Fla., including the references therein. Regulatory sequences include those that direct constitutive expression of a nucleotide sequence in many types of host cells and those that direct expression of the nucleotide sequence only in certain host cells or under certain conditions. It will be appreciated by those skilled in the art that the design of the expression vector can depend on such factors as the choice of the host cell to be transformed, the level of expression of polypeptide desired, etc. The expression vectors of the invention can be introduced into host cells to thereby produce polypeptides or peptides, including fusion polypeptides or peptides, encoded by nucleic acids as described herein (e.g., BSRP, mutant forms of BSRP, fusion polypeptides, etc.).

[0463] The recombinant expression vectors of the invention can be designed for expression of the polypeptide of the invention in plant cells. For example, BSRP genes can be expressed in plant cells (See Schmidt, R. and Willmitzer, L., 1988, High efficiency Agrobacterium tumefaciens-mediated transformation of Arabidopsis thaliana leaf and cotyledon explants, Plant Cell Rep. 583-586; Plant Molecular Biology and Biotechnology, C Press, Boca Raton, Fla., chapter 6/7, S. 71-119 (1993); F. F. White, B. Jenes et al., Techniques for Gene Transfer, in: Transgenic Plants, Vol. 1, Engineering and Utilization, eds. Kung and R. Wu, 128-43, Academic Press: 1993; Potrykus, 1991, Annu. Rev. Plant Physiol. Plant Molec. Biol. 42:205-225 and references cited therein). Suitable host cells are discussed further in Goeddel, Gene Expression Technology: Methods in Enzymology 185, Academic Press: San Diego, Calif. (1990). Alternatively, the recombinant expression vector can be transcribed and translated in vitro, for example using T7 promoter regulatory sequences and T7 polymerase.

[0464] Expression of polypeptides in prokaryotes is most often carried out with vectors containing constitutive or inducible promoters directing the expression of either fusion or non-fusion polypeptides. Fusion vectors add a number of amino acids to a polypeptide encoded therein, usually to the amino terminus of the recombinant polypeptide but also to the C-terminus or fused within suitable regions in the polypeptides. Such fusion vectors typically serve three purposes: 1) to increase expression of a recombinant polypeptide; 2) to increase the solubility of a recombinant polypeptide; and 3) to aid in the purification of a recombinant polypeptide by acting as a ligand in affinity purification. Often, in fusion expression vectors, a proteolytic cleavage site is introduced at the junction of the fusion moiety and the recombinant polypeptide to enable separation of the recombinant polypeptide from the fusion moiety subsequent to purification of the fusion polypeptide. Such enzymes, and their cognate recognition sequences, include Factor Xa, thrombin, and enterokinase.

[0465] By way of example the plant expression cassette can be installed in the pRT transformation vector ((a) Toepfer et al., 1993, Methods Enzymol., 217: 66-78; (b) Toepfer et al. 1987, Nucl. Acids. Res. 15: 5890 ff.).

[0466] Alternatively, a recombinant vector (=expression vector) can also be transcribed and translated in vitro, e.g. by using the T7 promoter and the T7 RNA polymerase.

[0467] Expression vectors employed in prokaryotes frequently make use of inducible systems with and without fusion proteins or fusion oligopeptides, wherein these fusions can ensue in both N-terminal and C-terminal manner or in other useful domains of a protein. Such fusion vectors usually have the following purposes: i.) to increase the RNA expression rate; ii.) to increase the achievable protein synthesis rate; iii.) to increase the solubility of the protein; iv.) or to simplify purification by means of a binding sequence usable for affinity chromatography. Proteolytic cleavage points are also frequently introduced via fusion proteins, which allow cleavage of a portion of the fusion protein and purification. Such recognition sequences for proteases are recognized, e.g. factor Xa, thrombin and enterokinase.

[0468] Typical advantageous fusion and expression vectors are pGEX [Pharmacia Biotech Inc; Smith, D. B. and Johnson, K. S. (1988) Gene 67: 31-40], pMAL (New England Biolabs, Beverly, Mass.) and pRIT5 (Pharmacia, Piscataway, N.J.) which contains glutathione S-transferase (GST), maltose binding protein or protein A.

[0469] In one embodiment, the coding sequence of the polypeptide of the invention is cloned into a pGEX expression vector to create a vector encoding a fusion polypeptide comprising, from the N-terminus to the C-terminus, GST-thrombin cleavage site-X polypeptide. The fusion polypeptide can be purified by affinity chromatography using glutathione-agarose resin. Recombinant BSRP unfused to GST can be recovered by cleavage of the fusion polypeptide with thrombin.

[0470] Other examples of E. coli expression vectors are pTrc [Amann et al., (1988) Gene 69:301-315] and pET vectors [Studier et al., Gene Expression Technology: Methods in Enzymology 185, Academic Press, San Diego, Calif. (1990) 60-89; Stratagene, Amsterdam, The Netherlands].

[0471] Target gene expression from the pTrc vector relies on host RNA polymerase transcription from a hybrid trp-lac fusion promoter. Target gene expression from the pET 11d vector relies on transcription from a T7 gn10-lac fusion promoter mediated by a co-expressed viral RNA polymerase (T7 gn1). This viral polymerase is supplied by host strains BL21(DE3) or HMS174(DE3) from a resident I prophage harboring a T7 gn1 gene under the transcriptional control of the lacUV 5 promoter.

[0472] In a preferred embodiment of the present invention, the BSRP are expressed in plants and plants cells such as unicellular plant cells (e.g. algae) (See Falciatore et al., 1999, Marine Biotechnology 1(3):239-251 and references therein) and plant cells from higher plants (e.g., the spermatophytes, such as crop plants). A nucleic acid molecule coding for BSRP as depicted in table II, column 5 or 7 may be “introduced” into a plant cell by any means, including transfection, transformation or transduction, electroporation, particle bombardment, agroinfection, and the like. One trans-formation method known to those of skill in the art is the dipping of a flowering plant into an Agrobacteria solution, wherein the Agrobacteria contains the nucleic acid of the invention, followed by breeding of the transformed gametes.

[0473] Other suitable methods for transforming or transfecting host cells including plant cells can be found in Sambrook, et al., Molecular Cloning: A Laboratory Manual. 2^{nd}, ed., Cold Spring Harbor Laboratory, Cold Spring Harbor Laboratory Press, Cold Spring Harbor, N.Y., 1989, and other laboratory manuals such as Methods in Molecular Biology, 1995, Vol. 44, Agrobacterium protocols, ed: Gartland and Davey, Humana Press, Totowa, N.J. As biotic and abiotic stress tolerance is a general trait wished to be inherited into a wide variety of plants like maize, wheat, rye, oat, triticale, rice, barley, soybean, peanut, cotton, rapeseed and canola, manihot, pepper, sunflower and tagetes, solanaceous plants like potato, tobacco, eggplant, and tomato, Vicia species, pea, alfalfa, bushy plants (coffee, cacao, tea), Salix species, trees (oil palm, coconut), perennial grasses, and forage crops, these crop plants are also preferred target plants for a genetic engineering as one further embodiment of the present invention. Forage crops include, but are not limited to, Wheatgrass, Canarygrass, Bromegrass, Wildrye Grass, Bluegrass, Orchardgrass, Alfalfa, Salfoin, Birdsfoot Trefoil, Alsike Clover, Red Clover, and Sweet Clover.

[0474] In one embodiment of the present invention, transfection of a nucleic acid molecule coding for BSRP as depicted in table II, column 5 or 7 into a plant is achieved by Agrobacterium mediated gene transfer. Agrobacterium mediated plant transformation can be performed using for example the GV3101(pMP90) (Koncz and Schell, 1986, Mol. Gen. Genet. 204:383-396) or LBA4404 (Clontech) Agrobacterium tumefaciens strain. Transformation can be performed by standard transformation and regeneration techniques (Deblaere et al., 1994, Nucl. Acids Res. 13:4777-4788; Gelvin, Stanton B. and Schilperoort, Robert A, Plant Molecular Biology Manual, 2^{nd} Ed.-Dordrecht: Kluwer Academic Publ., 1995.—in Sect., Ringbuc Zentrale Signatur: BT11-P ISBN 0-7923-2731-4; Glick, Bernard R.; Thompson, John E., Methods in Plant Molecular Biology and Biotechnology, Boca Raton: CRC Press, 1993 360 S., ISBN 0-8493-5164-2). For example, rapeseed can be transformed via cotyledon or hypocotyl transformation (Moloney et al., 1989, Plant cell Report 8:238-242; De Block et al., 1989, Plant Physiol. 91:694-701). Use of antibiotics for Agrobacterium and plant selection depends on the binary vector and the Agrobacterium strain used for transformation. Rapeseed selection is normally performed using kanamycin as selectable plant marker. Agrobacterium mediated gene transfer to flax can be performed using, for example, a technique described by Mlynarova et al., 1994, Plant Cell Report 13:282-285. Additionally, transformation of soybean can be performed using for example a technique described in European Patent No. 0424 047, U.S. Pat. No. 5,322,783, European Patent No. 0397 687, U.S. Pat. No. 5,376,543, or U.S. Pat. No. 5,169,770. Transformation of maize can be achieved by particle bombardment, polyethylene glycol mediated DNA uptake or via the silicon carbide fiber technique. (See, for example, Freeling and Walbot “The maize handbook” Springer Verlag: New York (1993) ISBN 3-540-97826-7). A specific example of maize transformation is found in U.S. Pat. No. 5,990,387, and a specific example of wheat transformation can be found in PCT Application No. WO 93/07256.

[0475] According to the present invention, the introduced nucleic acid molecule coding for BSRP as depicted in table II, column 5 or 7 may be maintained in the plant cell stably if it is incorporated into a non-chromosomal autonomous replicon or integrated into the plant chromosomes or organelle genome. Alternatively, the introduced BSRP may be present on an extra-chromosomal non-replicating vector and be transiently expressed or transiently active.

[0476] In one embodiment, a homologous recombinant microorganism can be created wherein the BSRP is integrated into a chromosome, a vector is prepared which contains at least a portion of a nucleic acid molecule coding for BSRP as depicted in table II, column 5 or 7 into which a deletion, addition, or substitution has been introduced to thereby alter, e.g., functionally disrupt, the BSRP gene. Preferably, the BSRP gene is a yeast or a E. coli. gene, but it can be a homolog from a related plant or even from a mammalian or insect source. The vector can be designed such that, upon homologous recombination, the endogenous nucleic acid molecule coding for BSRP as depicted in table II, column 5 or 7 is mutated or otherwise altered but still encodes a functional polypeptide (e.g., the upstream regulatory region can be altered to thereby alter the expression of the endogenous BSRP). In a preferred embodiment the biological activity of the protein of the invention is increased upon homologous recombination. To create a point mutation via homologous recombination, DNA-RNA hybrids can be used in a technique known as chimeraplasty (Cole-Strauss et al., 1999, Nucleic Acids Research 27(5):1323-1330 and Kmiec, 1999 Gene therapy American Scientist. 87(3):240-247). Homologous recombination procedures in Physcomitrella patens are also well known in the art and are contemplated for use herein.

[0477] Whereas in the homologous recombination vector, the altered portion of the nucleic acid molecule coding for BSRP as depicted in table II, column 5 or 7 is flanked at its 5′ and 3′ ends by an additional nucleic acid molecule of the BSRP gene to allow for homologous recombination to occur between the exogenous BSRP gene carried by the vector and an endogenous BSRP gene, in a microorganism or plant. The additional flanking BSRP nucleic acid molecule is of sufficient length for successful homologous recombination with the endogenous gene. Typically, several hundreds of base pairs up to kilobases of flanking DNA (both at the 5′ and 3′ ends) are included in the vector. See, e.g., Thomas, K. R., and Capecchi, M. R., 1987, Cell 51:503 for a description of homologous recombination vectors or Strepp et al., 1998, PNAS, 95 (8):4368-4373 for cDNA based recombination in Physcomitrella patens). The vector is introduced into a microorganism or plant cell (e.g., via polyethylene glycol mediated DNA), and cells in which the introduced BSRP gene has homologously recombined with the endogenous BSRP gene are selected using art-known techniques.

[0478] Whether present in an extra-chromosomal non-replicating vector or a vector that is integrated into a chromosome, the nucleic acid molecule coding for BSRP as depicted in table II, column 5 or 7 preferably resides in a plant expression cassette. A plant expression cassette preferably contains regulatory sequences capable of driving gene expression in plant cells that are operatively linked so that each sequence can fulfill its function, for example, termination of transcription by polyadenylation signals. Preferred polyadenylation signals are those originating from Agrobacterium tumefaciens t-DNA such as the gene 3 known as octopine synthase of the Ti-plasmid pTiACH5 (Gielen et al., 1984, EMBO J. 3:835) or functional equivalents thereof but also all other terminators functionally active in plants are suitable. As plant gene expression is very often not limited on transcriptional levels, a plant expression cassette preferably contains other operatively linked sequences like translational enhancers such as the overdrive-sequence containing the 5″-untranslated leader sequence from tobacco mosaic virus enhancing the polypeptide per RNA ratio (Gallie et al., 1987, Nucl. Acids Research 15:8693-8711). Examples of plant expression vectors include those detailed in: Becker, D. et al., 1992, New plant binary vectors with selectable markers located proximal to the left border, Plant Mol. Biol. 20: 1195-1197; and Bevan, M. W., 1984, Binary Agrobacterium vectors for plant transformation, Nucl. Acid. Res. 12:8711-8721; and Vectors for Gene Transfer in Higher Plants; in: Transgenic Plants, Vol. 1, Engineering and Utilization, eds.: Kung and R. Wu, Academic Press, 1993, S. 15-38

[0479] “Transformation” is defined herein as a process for introducing heterologous DNA into a plant cell, plant tissue, or plant. It may occur under natural or artificial conditions using various methods well known in the art. Transformation may rely on any known method for the insertion of foreign nucleic acid sequences into aprokaryotic or eukaryotic host cell. The method is selected based on the host cell being transformed and may include, but is not limited to, viral infection, electroporation, lipofection, and particle bombardment. Such “transformed” cells include stably trans-formed cells in which the inserted DNA is capable of replication either as an autonomously replicating plasmid or as part of the host chromosome. They also include cells which transiently express the inserted DNA or RNA for limited periods of time. Trans-formed plant cells, plant tissue, or plants are understood to encompass not only the end product of a transformation process, but also transgenic progeny thereof.

[0480] The terms “transformed,” “transgenic,” and “recombinant” refer to a host organism such as a bacterium or a plant into which a heterologous nucleic acid molecule has been introduced. The nucleic acid molecule can be stably integrated into the genome of the host or the nucleic acid molecule can also be present as an extrachromosomal molecule. Such an extrachromosomal molecule can be auto-replicating. Transformed cells, tissues, or plants are understood to encompass not only the end product of a transformation process, but also transgenic progeny thereof. A “non-transformed,” “nontransgenic,” or “non-recombinant” host refers to a wild-type organism, e.g., a bacterium or plant, which does not contain the heterologous nucleic acid molecule.

[0481] A “transgenic plant”, as used herein, refers to a plant which contains a foreign nucleotide sequence inserted into either its nuclear genome or organellar genome. It encompasses further the offspring generations i.e. the T1-, T2- and consecutively generations or BC1-, BC2- and consecutively generation as well as crossbreeds thereof with non-transgenic or other transgenic plants.

[0482] The host organism (=transgenic organism) advantageously contains at least one copy of the nucleic acid according to the invention and/or of the nucleic acid construct according to the invention.

[0483] In principle all plants can be used as host organism. Preferred transgenic plants are, for example, selected from the families Aceraceae, Anacardiaceae, Apiaceae, Asteraceae, Brassicaceae, Cactaceae, Cucurbitaceae, Euphorbiaceae, Fabaceae, Malvaceae, Nymphaeaceae, Papaveraceae, Rosaceae, Salicaceae, Solanaceae, Arecaceae, Bromeliaceae, Cyperaceae, lridaceae, Liliaceae, Orchidaceae, Gentianaceae, Labiaceae, Magnoliaceae, Ranunculaceae, Carifolaceae, Rubiaceae, Scrophulariaceae, Caryophyllaceae, Ericaceae, Polygonaceae, Violaceae, Juncaceae or Poaceae and preferably from a plant selected from the group of the families Apiaceae, Asteraceae, Brassicaceae, Cucurbitaceae, Fabaceae, Papaveraceae, Rosaceae, Solanaceae, Liliaceae or Poaceae. Preferred are crop plants such as plants advantageously selected from the group of the genus peanut, oilseed rape, canola, sunflower, safflower, olive, sesame, hazelnut, almond, avocado, bay, pumpkin/squash, linseed, soya, pistachio, borage, maize, wheat, rye, oats, sorghum and millet, triticale, rice, barley, cassava, potato, sugarbeet, egg plant, alfalfa, and perennial grasses and forage plants, oil palm, vegetables (brassicas, root vegetables, tuber vegetables, pod vegetables, fruiting vegetables, onion vegetables, leafy vegetables and stem vegetables), buckwheat, Jerusalem artichoke, broad bean, vetches, lentil, dwarf bean, lupin, clover and Lucerne for mentioning only some of them.

[0484] In one embodiment of the invention transgenic plants are selected from the group comprising corn, soy, oil seed rape (including canola and winter oil seed reap), cotton, wheat and rice.

[0485] In one preferred embodiment, the host plant is selected from the families Aceraceae, Anacardiaceae, Apiaceae, Asteraceae, Brassicaceae, Cactaceae, Cucurbitaceae, Euphorbiaceae, Fabaceae, Malvaceae, Nymphaeaceae, Papaveraceae, Rosaceae, Salicaceae, Solanaceae, Arecaceae, Bromeliaceae, Cyperaceae, lridaceae, Liliaceae, Orchidaceae, Gentianaceae, Labiaceae, Magnoliaceae, Ranunculaceae, Carifolaceae, Rubiaceae, Scrophulariaceae, Caryophyllaceae, Ericaceae, Polygonaceae, Violaceae, Juncaceae or Poaceae and preferably from a plant selected from the group of the families Apiaceae, Asteraceae, Brassicaceae, Cucurbitaceae, Fabaceae, Papaveraceae, Rosaceae, Solanaceae, Liliaceae or Poaceae. Preferred are crop plants and in particular plants mentioned herein above as host plants such as the families and genera mentioned above for example preferred the species Anacardium occidentale, Calendula officinalis, Carthamus tinctorius, Cichorium intybus, Cynara scolymus, Helianthus annus, Tagetes lucida, Tagetes erecta, Tagetes tenuifolia; Daucus carota; Corylus avellana, Corylus colurna, Borago officinalis; Brassica napus, Brassica rapa ssp., Sinapis arvensis Brassica juncea, Brassica juncea var. juncea, Brassica juncea var. crispifolia, Brassica juncea var. foliosa, Brassica nigra, Brassica sinapioides, Melanosinapis communis, Brassica oleracea, Arabidopsis thaliana, Anana comosus, Ananas ananas, Bromelia comosa, Carica papaya, Cannabis sative, Ipomoea batatus, Ipomoea pandurata, Convolvulus batatas, Convolvulus tiliaceus, Ipomoea fastigiata, Ipomoea tiliacea, Ipomoea triloba, Convolvulus panduratus, Beta vulgaris, Beta vulgaris var. altissima, Beta vulgaris var. vulgaris, Beta maritima, Beta vulgaris var. perennis, Beta vulgaris var. conditiva, Beta vulgaris var. esculenta, Cucurbita maxima, Cucurbita mixta, Cucurbita pepo, Cucurbita moschata, Olea europaea, Manihot utilissima, Janipha manihot, Jatropha manihot., Manihot aipil, Manihot dulcis, Manihot manihot, Manihot melanobasis, Manihot esculenta, Ricinus communis, Pisum sativum, Pisum arvense, Pisum humile, Medicago sativa, Medicago falcata, Medicago varia, Glycine max Dolichos soja, Glycine gracilis, Glycine hispida, Phaseolus max, Soja hispida, Soja max, Cocos nucifera, Pelargonium grossularioides, Oleum cocoas, Laurus nobilis, Persea americana, Arachis hypogaea, Linum usitatissimum, Linum humile, Linum austriacum, Linum bienne, Linum angustifolium, Linum catharticum, Linum flavum, Linum grandiflorum, Adenolinum grandiflorum, Linum lewisii, Linum narbonense, Linum perenne, Linum perenne var. lewisii, Linum pratense, Linum trigynum, Punica granatum, Gossypium hirsutum, Gossypium arboreum, Gossypium barbadense, Gossypium herbaceum, Gossypium thurberi, Musa nana, Musa acuminata, Musa paradisiaca, Musa spp., Elaeis guineensis, Papaver orientale, Papaver rhoeas, Papaver dubium, Sesamum indicum, Piper aduncum, Piper amalago, Piper angustifolium, Piper auritum, Piper betel, Piper cubeba, Piper longum, Piper nigrum, Piper retrofractum, Artanthe adunca, Artanthe elongata, Peperomia elongata, Piper elongatum, Steffensia elongata, Hordeum vulgare, Hordeum jubatum, Hordeum murinum, Hordeum secalinum, Hordeum distichon Hordeum aegiceras, Hordeum hexastichon., Hordeum hexastichum, Hordeum irregulare, Hordeum sativum, Hordeum secalinum, Avena sativa, Avena fatua, Avena byzantina, Avena fatua var. sativa, Avena hybrida, Sorghum bicolor, Sorghum halepense, Sorghum saccharatum, Sorghum vulgare, Andropogon drummondii, Holcus bicolor, Holcus sorghum, Sorghum aethiopicum, Sorghum arundinaceum, Sorghum caffrorum, Sorghum cernuum, Sorghum dochna, Sorghum drummondii, Sorghum durra, Sorghum guineense, Sorghum lanceolatum, Sorghum nervosum, Sorghum saccharatum, Sorghum subglabrescens, Sorghum verticilliflorum, Sorghum vulgare, Holcus halepensis, Sorghum miliaceum millet, Panicum militaceum, Zea mays, Triticum aestivum, Triticum durum, Triticum turgidum, Triticum hybernum, Triticum macha, Triticum sativum or Triticum vulgare, Cofea spp., Coffea arabica, Coffea canephora, Coffea liberica, Capsicum annuum, Capsicum annuum var. glabriusculum, Capsicum frutescens, Capsicum annuum, Nicotiana tabacum, Solanum tuberosum, Solanum melongena, Lycopersicon esculentum, Lycopersicon lycopersicum., Lycopersicon pyriforme, Solanum integrifolium, Solanum lycopersicum Theobroma cacao or Camellia sinensis.

[0486] Anacardiaceae such as the genera Pistacia, Mangifera, Anacardium e.g. the species Pistacia vera [pistachios, Pistazie], Mangifer indica [Mango] or Anacardium occidentale [Cashew]; Asteraceae such as the genera Calendula, Carthamus, Centaurea, Cichorium, Cynara, Helianthus, Lactuca, Locusta, Tagetes, Valeriana e.g. the species Calendula officinalis [Marigold], Carthamus tinctorius [safflower], Centaurea cyanus [cornflower], Cichorium intybus [blue daisy], Cynara scolymus [Artichoke], Helianthus annus [sunflower], Lactuca sativa, Lactuca crispa, Lactuca esculenta, Lactuca scariola L. ssp. sativa, Lactuca scariola L. var. integrata, Lactuca scariola L. var. integrifolia, Lactuca sativa subsp. romana, Locusta communis, Valeriana locusta [lettuce], Tagetes lucida, Tagetes erecta or Tagetes tenuifolia [Marigold]; Apiaceae such as the genera Daucus e.g. the species Daucus carota [carrot]; Betulaceae such as the genera Corylus e.g. the species Corylus avellana or Corylus colurna [hazelnut]; Boraginaceae such as the genera Borago e.g. the species Borago officinalis [borage]; Brassicaceae such as the genera Brassica, Melanosinapis, Sinapis, Arabadopsis e.g. the species Brassica napus, Brassica rapa ssp. [canola, oilseed rape, turnip rape], Sinapis arvensis Brassica juncea, Brassica juncea var. juncea, Brassica juncea var. crispifolia, Brassica juncea var. foliosa, Brassica nigra, Brassica sinapioides, Melanosinapis communis [mustard], Brassica oleracea [fodder beet] or Arabidopsis thaliana; Bromeliaceae such as the genera Anana, Bromelia e.g. the species Anana comosus, Ananas ananas or Bromelia comosa [pineapple]; Caricaceae such as the genera Carica e.g. the species Carica papaya [papaya]; Cannabaceae such as the genera Cannabis e.g. the species Cannabis sative [hemp], Convolvulaceae such as the genera Ipomea, Convolvulus e.g. the species Ipomoea batatus, Ipomoea pandurata, Convolvulus batatas, Convolvulus tiliaceus, Ipomoea fastigiata, Ipomoea tiliacea, Ipomoea triloba or Convolvulus panduratus [sweet potato, Man of the Earth, wild potato], Chenopodiaceae such as the genera Beta, i.e. the species Beta vulgaris, Beta vulgaris var. altissima, Beta vulgaris var. Vulgaris, Beta maritima, Beta vulgaris var. perennis, Beta vulgaris var. conditiva or Beta vulgaris var. esculenta [sugar beet]; Cucurbitaceae such as the genera Cucubita e.g. the species Cucurbita maxima, Cucurbita mixta, Cucurbita pepo or Cucurbita moschata [pumpkin, squash]; Elaeagnaceae such as the genera Elaeagnus e.g. the species Olea europaea [olive]; Ericaceae such as the genera Kalmia e.g. the species Kalmia latifolia, Kalmia angustifolia, Kalmia microphylla, Kalmia polifolia, Kalmia occidentalis, Cistus chamaerhodendros or Kalmia lucida [American laurel, broad-leafed laurel, calico bush, spoon wood, sheep laurel, alpine laurel, bog laurel, western bog-laurel, swamp-laurel]; Euphorbiaceae such as the genera Manihot, Janipha, Jatropha, Ricinus e.g. the species Manihot utilissima, Janipha manihot, Jatropha manihot., Manihot aipil, Manihot dulcis, Manihot manihot, Manihot melanobasis, Manihot esculenta [manihot, arrowroot, tapioca, cassava] or Ricinus communis [castor bean, Castor Oil Bush, Castor Oil Plant, Palma Christi, Wonder Tree]; Fabaceae such as the genera Pisum, Albizia, Cathormion, Feuillea, Inga, Pithecolobium, Acacia, Mimosa, Medicajo, Glycine, Dolichos, Phaseolus, Soja e.g. the species Pisum sativum, Pisum arvense, Pisum humile [pea], Albizia berteriana, Albizia julibrissin, Albizia lebbeck, Acacia berteriana, Acacia littoralis, Albizia berteriana, Albizzia berteriana, Cathormion berteriana, Feuillea berteriana, Inga fragrans, Pithecellobium berterianum, Pithecellobium fragrans, Pithecolobium berterianum, Pseudalbizzia berteriana, Acacia julibrissin, Acacia nemu, Albizia nemu, Feuilleea julibrissin, Mimosa julibrissin, Mimosa speciosa, Sericanrda julibrissin, Acacia lebbeck, Acacia macrophylla, Albizia lebbek, Feuilleea lebbeck, Mimosa lebbeck, Mimosa speciosa [bastard logwood, silk tree, East Indian Walnut], Medicago sativa, Medicago falcata, Medicago varia [alfalfa] Glycine max Dolichos soja, Glycine gracilis, Glycine hispida, Phaseolus max, Soja hispida or Soja max [soybean]; Geraniaceae such as the genera Pelargonium, Cocos, Oleum e.g. the species Cocos nucifera, Pelargonium grossularioides or Oleum cocois [coconut]; Gramineae such as the genera Saccharum e.g. the species Saccharum officinarum; Juglandaceae such as the genera Juglans, Wallia e.g. the species Juglans regia, Juglans ailanthifolia, Juglans sieboldiana, Juglans cinerea, Wallia cinerea, Juglans bixbyi, Juglans californica, Juglans hindsii, Juglans intermedia, Juglans jamaicensis, Juglans major, Juglans microcarpa, Juglans nigra or Wallia nigra [walnut, black walnut, common walnut, persian walnut, white walnut, butternut, black walnut]; Lauraceae such as the genera Persea, Laurus e.g. the species laurel Laurus nobilis [bay, laurel, bay laurel, sweet bay], Persea americana Persea americana, Persea gratissima or Persea persea [avocado]; Leguminosae such as the genera Arachis e.g. the species Arachis hypogaea [peanut]; Linaceae such as the genera Linum, Adenolinum e.g. the species Linum usitatissimum, Linum humile, Linum austriacum, Linum bienne, Linum angustifolium, Linum catharticum, Linum flavum, Linum grandiflorum, Adenolinum grandiflorum, Linum lewisii, Linum narbonense, Linum perenne, Linum perenne var. lewisii, Linum pratense or Linum trigynum [flax, linseed]; Lythrarieae such as the genera Punica e.g. the species Punica granatum [pomegranate]; Malvaceae such as the genera Gossypium e.g. the species Gossypium hirsutum, Gossypium arboreum, Gossypium barbadense, Gossypium herbaceum or Gossypium thurberi [cotton]; Musaceae such as the genera Musa e.g. the species Musa nana, Musa acuminata, Musa paradisiaca, Musa spp. [banana]; Onagraceae such as the genera Camissonia, Oenothera e.g. the species Oenothera biennis or Camissonia brevipes [primrose, evening primrose]; Palmae such as the genera Elacis e.g. the species Elaeis guineensis [oil plam]; Papaveraceae such as the genera Papaver e.g. the species Papaver orientale, Papaver rhoeas, Papaver dubium [poppy, oriental poppy, corn poppy, field poppy, shirley poppies, field poppy, long-headed poppy, long-pod poppy]; Pedaliaceae such as the genera Sesamum e.g. the species Sesamum indicum [sesame]; Piperaceae such as the genera Piper, Artanthe, Peperomia, Steffensia e.g. the species Piper aduncum, Piper amalago, Piper angustifolium, Piper auritum, Piper betel, Piper cubeba, Piper longum, Piper nigrum, Piper retrofractum, Artanthe adunca, Artanthe elongata, Peperomia elongata, Piper elongaturn, Steffensia elongata. [Cayenne pepper, wild pepper]; Poaceae such as the genera Hordeum, Secale, Avena, Sorghum, Andropogon, Holcus, Panicum, Oryza, Zea, Triticum e.g. the species Hordeum vulgare, Hordeum jubatum, Hordeum murinum, Hordeum secalinum, Hordeum distichon Hordeum aegiceras, Hordeum hexastichon., Hordeum hexastichum, Hordeum irregulare, Hordeum sativum, Hordeum secalinum [barley, pearl barley, foxtail barley, wall barley, meadow barley], Secale cereale [rye], Avena sativa, Avena fatua, Avena byzantina, Avena fatua var. sativa, Avena hybrida [oat], Sorghum bicolor, Sorghum halepense, Sorghum saccharatum, Sorghum vulgare, Andropogon drummondii, Holcus bicolor, Holcus sorghum, Sorghum aethiopicum, Sorghum arundinaceum, Sorghum caffrorum, Sorghum cernuum, Sorghum dochna, Sorghum drummondii, Sorghum durra, Sorghum guineense, Sorghum lanceolatum, Sorghum nervosum, Sorghum saccharatum, Sorghum subglabrescens, Sorghum verticilliflorum, Sorghum vulgare, Holcus halepensis, Sorghum miliaceum millet, Panicum militaceum [Sorghum, millet], Oryza sativa, Oryza latifolia [rice], Zea mays [corn, maize] Triticum aestivum, Triticum durum, Triticum turgidum, Triticum hybernum, Triticum macha, Triticum sativum or Triticum vulgare [wheat, bread wheat, common wheat], Proteaceae such as the genera Macadamia e.g. the species Macadamia intergrifolia [macadamia]; Rubiaceae such as the genera Coffea e.g. the species Cofea spp., Coffea arabica, Coffea canephora or Coffea liberica [coffee]; Scrophulariaceae such as the genera Verbascum e.g. the species Verbascum blattaria, Verbascum chaixii, Verbascum densiflorum, Verbascum lagurus, Verbascum longifolium, Verbascum lychnitis, Verbascum nigrum, Verbascum olympicum, Verbascum phlomoides, Verbascum phoenicum, Verbascum pulverulentum or Verbascum thapsus [mullein, white moth mullein, nettle-leaved mullein, dense-flowered mullein, silver mullein, longleaved mullein, white mullein, dark mullein, greek mullein, orange mullein, purple mullein, hoary mullein, great mullein]; Solanaceae such as the genera Capsicum, Nicotiana, Solanum, Lycopersicon e.g. the species Capsicum annuum, Capsicum annuum var. glabriusculum, Capsicum frutescens [pepper], Capsicum annuum [paprika], Nicotiana tabacum, Nicotiana alata, Nicotiana attenuata, Nicotiana glauca, Nicotiana langsdorffii, Nicotiana obtusifolia, Nicotiana quadrivalvis, Nicotiana repanda, Nicotiana rustica, Nicotiana sylvestris [tobacco], Solanum tuberosum [potato], Solanum melongena [egg-plant] (Lycopersicon esculentum, Lycopersicon lycopersicum., Lycopersicon pyriforme, Solanum integrifolium or Solanum lycopersicum [tomato]; Sterculiaceae such as the genera Theobroma e.g. the species Theobroma cacao [cacao]; Theaceae such as the genera Camellia e.g. the species Camellia sinensis) [tea].

[0487] The introduction of the nucleic acids according to the invention, the expression cassette or the vector into organisms, plants for example, can in principle be done by all of the methods known to those skilled in the art. The introduction of the nucleic acid sequences gives rise to recombinant or transgenic organisms.

[0488] Unless otherwise specified, the terms “polynucleotides”, “nucleic acid” and “nucleic acid molecule” as used herein are interchangeably. Unless otherwise specified, the terms “peptide”, “polypeptide” and “protein” are interchangeably in the present context. The term “sequence” may relate to polynucleotides, nucleic acids, nucleic acid molecules, peptides, polypeptides and proteins, depending on the context in which the term “sequence” is used. The terms “gene(s)”, “polynucleotide”, “nucleic acid sequence”, “nucleotide sequence”, or “nucleic acid molecule(s)” as used herein refers to a polymeric form of nucleotides of any length, either ribonucleotides or deoxyribonucleotides. The terms refer only to the primary structure of the molecule.

[0489] Thus, the terms “gene(s)”, “polynucleotide”, “nucleic acid sequence”, “nucleotide sequence”, or “nucleic acid molecule(s)” as used herein include double- and single-stranded DNA and RNA. They also include known types of modifications, for example, methylation, “caps”, substitutions of one or more of the naturally occurring nucleotides with an analog. Preferably, the DNA or RNA sequence of the invention comprises a coding sequence encoding the herein defined polypeptide.

[0490] The genes of the invention, coding for an activity selected from the group consisting of: b3262-protein, b3644-protein, chloramphenicol resistance protein homolog ydeA, chorismate mutase-T and prephenate dehydrogenase, Gamma subunit of the translation initiation factor eIF2B, glucose dehydrogenase, glucose-6-phosphate 1-dehydrogenase, peptidyl-prolyl cis-trans isomerase A (rotamase A), recombinase A, ribosomal protein, RNA polymerase sigma-E factor (sigma-24), Splicing factor that is found in the Cef1p subcomplex of the spliceosome (Prp46p), sulfite reductase (NADPH), flavoprotein beta subunit, transcription regulator farR, fatty acyl-responsive, transmembrane pore-generating protein mglC, YCR087W-protein, YGR150c-protein, YIL172C-protein, YLR168C-protein, YLR407W-protein, and YOR299W-protein are also called “BSRP gene”.

[0491] A “coding sequence” is a nucleotide sequence, which is transcribed into mRNA and/or translated into a polypeptide when placed under the control of appropriate regulatory sequences. The boundaries of the coding sequence are determined by a translation start codon at the 5′-terminus and a translation stop codon at the 3′-terminus. A coding sequence can include, but is not limited to mRNA, cDNA, recombinant nucleotide sequences or genomic DNA, while introns may be present as well under certain circumstances.

[0492] The transfer of foreign genes into the genome of a plant is called transformation. In doing this the methods described for the transformation and regeneration of plants from plant tissues or plant cells are utilized for transient or stable transformation. Suitable methods are protoplast transformation by poly(ethylene glycol)-induced DNA uptake, the “biolistic” method using the gene cannon—referred to as the particle bombardment method, electroporation, the incubation of dry embryos in DNA solution, microinjection and gene transfer mediated by Agrobacterium. Said methods are described by way of example in B. Jenes et al., Techniques for Gene Transfer, in: Trans-genic Plants, Vol. 1, Engineering and Utilization, eds. S. D. Kung and R. Wu, Academic Press (1993) 128-143 and in Potrykus Annu. Rev. Plant Physiol. Plant Molec. Biol. 42 (1991) 205-225). The nucleic acids or the construct to be expressed is preferably cloned into a vector which is suitable for transforming Agrobacterium tumefaciens, for example pBin19 (Bevan et al., Nucl. Acids Res. 12 (1984) 8711). Agrobacteria trans-formed by such a vector can then be used in known manner for the transformation of plants, in particular of crop plants such as by way of example tobacco plants, for example by bathing bruised leaves or chopped leaves in an agrobacterial solution and then culturing them in suitable media. The transformation of plants by means of Agrobacterium tumefaciens is described, for example, by Höfgen and Willmitzer in Nucl. Acid Res. (1988) 16, 9877 or is known inter alia from F. F. White, Vectors for Gene Transfer in Higher Plants; in Transgenic Plants, Vol. 1, Engineering and Utilization, eds. S. D. Kung and R. Wu, Academic Press, 1993, pp. 15-38.

[0493] Agrobacteria transformed by an expression vector according to the invention may likewise be used in known manner for the transformation of plants such as test plants like Arabidopsis or crop plants such as cereal crops, corn, oats, rye, barley, wheat, soybean, rice, cotton, sugar beet, canola, sunflower, flax, hemp, potatoes, tobacco, tomatoes, carrots, paprika, oilseed rape, tapioca, cassava, arrowroot, tagetes, alfalfa, lettuce and the various tree, nut and vine species, in particular of oil-containing crop plants such as soybean, peanut, castor oil plant, sunflower, corn, cotton, flax, oilseed rape, coconut, oil palm, safflower (Carthamus tinctorius) or cocoa bean, e.g. by bathing bruised leaves or chopped leaves in an agrobacterial solution and then culturing them in suitable media.

[0494] The genetically modified plant cells may be regenerated by all of the methods known to those skilled in the art. Appropriate methods can be found in the publications referred to above by S. D. Kung and R. Wu, Potrykus or Höfgen and Willmitzer.

[0495] Accordingly, a further aspect of the invention relates to transgenic organisms transformed by at least one nucleic acid sequence, expression cassette or vector according to the invention as well as cells, cell cultures, tissue, parts—such as, for example, leaves, roots, etc. in the case of plant organisms—or reproductive material derived from such organisms. The terms “host organism”, “host cell”, “recombinant (host) organism” and “transgenic (host) cell” are used here interchangeably. Of course these terms relate not only to the particular host organism or the particular target cell but also to the descendants or potential descendants of these organisms or cells. Since, due to mutation or environmental effects certain modifications may arise in successive generations, these descendants need not necessarily be identical with the parental cell but nevertheless are still encompassed by the term as used here.

[0496] For the purposes of the invention “transgenic” or “recombinant” means with regard for example to a nucleic acid sequence, an expression cassette (=gene construct, nucleic acid construct) or a vector containing the nucleic acid sequence according to the invention or an organism transformed by the nucleic acid sequences, expression cassette or vector according to the invention all those constructions produced by genetic engineering methods in which either

a) the nucleic acid sequence depicted in table I, column 5 or 7 or its derivatives or parts thereof or
b) a genetic control sequence functionally linked to the nucleic acid sequence described under (a), for example a 3′- and/or 5′-genetic control sequence such as a promoter or terminator, or
c) (a) and (b)
are not found in their natural, genetic environment or have been modified by genetic engineering methods, wherein the modification may by way of example be a substitution, addition, deletion, inversion or insertion of one or more nucleotide residues. Natural genetic environment means the natural genomic or chromosomal locus in the organism of origin or inside the host organism or presence in a genomic library. In the case of a genomic library the natural genetic environment of the nucleic acid sequence is preferably retained at least in part. The environment borders the nucleic acid sequence at least on one side and has a sequence length of at least 50 bp, preferably at least 500 bp, particularly preferably at least 1,000 bp, most particularly preferably at least 5,000 bp. A naturally occurring expression cassette—for example the naturally occurring combination of the natural promoter of the nucleic acid sequence according to the invention with the corresponding delta-8-desaturase, delta-9-elongase and/or delta-5-desaturase gene—turns into a transgenic expression cassette when the latter is modified by unnatural, synthetic (“artificial”) methods such as by way of example a mutagenation. Appropriate methods are described by way of example in U.S. Pat. No. 5,565,350 or WO 00/15815.

[0497] Suitable organisms or host organisms for the nucleic acid, expression cassette or vector according to the invention are advantageously in principle all organisms, which are suitable for the expression of recombinant genes as described above. Further examples which may be mentioned are plants such as Arabidopsis, Asteraceae such as Calendula or crop plants such as soybean, peanut, castor oil plant, sunflower, flax, corn, cotton, flax, oilseed rape, coconut, oil palm, safflower (Carthamus tinctorius) or cocoa bean.

[0498] In one embodiment of the invention host plants for the nucleic acid, expression cassette or vector according to the invention are selected from the group comprising corn, soy, oil seed rape (including canola and winter oil seed reap), cotton, wheat and rice.

[0499] A further object of the invention relates to the use of a nucleic acid construct, e.g. an expression cassette, containing DNA sequences encoding polypeptides shown in table II or DNA sequences hybridizing therewith for the transformation of plant cells, tissues or parts of plants.

[0500] In doing so, depending on the choice of promoter, the sequences of shown in table I can be expressed specifically in the leaves, in the seeds, the nodules, in roots, in the stem or other parts of the plant. Those transgenic plants overproducing sequences as depicted in table I, the reproductive material thereof, together with the plant cells, tissues or parts thereof are a further object of the present invention.

[0501] The expression cassette or the nucleic acid sequences or construct according to the invention containing sequences according to table I can, moreover, also be employed for the transformation of the organisms identified by way of example above such as bacteria, yeasts, filamentous fungi and plants.

[0502] Within the framework of the present invention, increased resistance to biotic stress, preferably pathogenic fungi means, for example, the artificially acquired trait of increased resistance to biotic stress, preferably pathogenic fungi due to functional expression or over expression of polypeptide sequences of table II encoded by the corresponding nucleic acid molecules as depicted in table I, column 5 or 7 and/or homologs in the organisms according to the invention, advantageously in the trans-genic plants according to the invention, by comparison with the nongenetically modified initial plants at least for the duration of at least one plant generation.

[0503] A constitutive expression of the polypeptide sequences of the of table II encoded by the corresponding nucleic acid molecule as depicted in table I, column 5 or 7 and/or homologs is, moreover, advantageous. On the other hand, however, an inducible expression may also appear desirable. Expression of the polypeptide sequences of the invention can be either accure “direct” in the cytsoplasm, eg from a nucleus transformed or encoded gene, or in the organelles preferably the plastids of the host cells, preferably the plant cells.

[0504] The efficiency of the expression of the sequences of the of table II encoded by the corresponding nucleic acid molecule as depicted in table I, column 5 or 7 and/or homologs can be determined, for example, in vitro by shoot meristem propagation. In addition, an expression of the sequences of table II encoded by the corresponding nucleic acid molecule as depicted in table I, column 5 or 7 and/or homologs modified in nature and level and its effect on the stress resistance can be tested on test plants in greenhouse trials.

[0505] An additional object of the invention comprises transgenic organisms such as transgenic plants transformed by an expression cassette containing sequences of as depicted in table I, column 5 or 7 according to the invention or DNA sequences hybridizing therewith, as well as transgenic cells, tissue, parts and reproduction material of such plants. Particular preference is given in this case to transgenic crop plants such as by way of example barley, wheat, rye, oats, corn, soybean, rice, cotton, sugar beet, oilseed rape and canola, sunflower, flax, hemp, thistle, potatoes, tobacco, tomatoes, tapioca, cassava, arrowroot, alfalfa, lettuce and the various tree, nut and vine species.

[0506] In one embodiment of the invention transgenic plants transformed by an expression cassette containing sequences of as depicted in table I, column 5 or 7 according to the invention or DNA sequences hybridizing therewith are selected from the group comprising corn, soy, oil seed rape (including canola and winter oil seed rape), cotton, wheat and rice.

[0507] For the purposes of the invention plants are mono- and dicotyledonous plants, mosses or algae.

[0508] A further refinement according to the invention are transgenic plants as described above which contain a nucleic acid sequence or construct according to the invention or a expression cassette according to the invention.

[0509] However, transgenic also means that the nucleic acids according to the invention are located at their natural position in the genome of an organism, but that the sequence has been modified in comparison with the natural sequence and/or that the regulatory sequences of the natural sequences have been modified. Preferably, transgenic/recombinant is to be understood as meaning the transcription of the nucleic acids of the invention and shown in table I, occurs at a non-natural position in the genome, that is to say the expression of the nucleic acids is homologous or, preferably, heterologous. This expression can be transiently or of a sequence integrated stably into the genome.

[0510] The term “transgenic plants” used in accordance with the invention also refers to the progeny of a transgenic plant, for example the T₁, T₂, T₃ and subsequent plant generations or the BC₁, BC₂, BC₃ and subsequent plant generations. Thus, the transgenic plants according to the invention can be raised and selfed or crossed with other individuals in order to obtain further transgenic plants according to the invention. Trans-genic plants may also be obtained by propagating transgenic plant cells vegetatively. The present invention also relates to transgenic plant material, which can be derived from a transgenic plant population according to the invention. Such material includes plant cells and certain tissues, organs and parts of plants in all their manifestations, such as seeds, leaves, anthers, fibers, tubers, roots, root hairs, stems, embryo, calli, cotelydons, petioles, harvested material, plant tissue, reproductive tissue and cell cultures, which are derived from the actual transgenic plant and/or can be used for bringing about the transgenic plant.

[0511] Any transformed plant obtained according to the invention can be used in a conventional breeding scheme or in in vitro plant propagation to produce more transformed plants with the same characteristics and/or can be used to introduce the same characteristic in other varieties of the same or related species. Such plants are also part of the invention. Seeds obtained from the transformed plants genetically also contain the same characteristic and are part of the invention. As mentioned before, the present invention is in principle applicable to any plant and crop that can be transformed with any of the transformation method known to those skilled in the art.

[0512] Advantageous inducible plant promoters are by way of example the PRP1 promoter [Ward et al., Plant. Mol. Biol. 22 (1993), 361-366], a promoter inducible by benzenesulfonamide (EP 388 186), a promoter inducible by tetracycline [Gatz et al., (1992) Plant J. 2, 397-404], a promoter inducible by salicylic acid (WO 95/19443), a promoter inducible by abscisic acid (EP 335 528) and a promoter inducible by ethanol or cyclohexanone (WO93/21334). Other examples of plant promoters which can advantageously be used are the promoter of cytosolic FBPase from potato, the ST-LSI promoter from potato (Stockhaus et al., EMBO J. 8 (1989) 2445-245), the promoter of phosphoribosyl pyrophosphate amidotransferase from Glycine max (see also gene bank accession number U87999) or a nodiene-specific promoter as described in EP 249 676. Particular advantageous are those promoters which ensure expression expression upon the early onset of environmental stress like for example drought or cold or biotic stress caused by plant diseases.

[0513] In one embodiment seed-specific promoters may be used for monocotylodonous or dicotylodonous plants.

[0514] In principle all natural promoters with their regulation sequences can be used like those named above for the expression cassette according to the invention and the method according to the invention. Over and above this, synthetic promoters may also advantageously be used.

[0515] In the preparation of an expression cassette various DNA fragments can be manipulated in order to obtain a nucleotide sequence, which usefully reads in the correct direction and is equipped with a correct reading frame. To connect the DNA fragments (=nucleic acids according to the invention) to one another adaptors or linkers may be attached to the fragments.

[0516] The promoter and the terminator regions can usefully be provided in the transcription direction with a linker or polylinker containing one or more restriction points for the insertion of this sequence. Generally, the linker has 1 to 10, mostly 1 to 8, preferably 2 to 6, restriction points. In general the size of the linker inside the regulatory region is less than 100 bp, frequently less than 60 bp, but at least 5 bp. The promoter may be both native or homologous as well as foreign or heterologous to the host organism, for example to the host plant. In the 5′-3′ transcription direction the expression cassette contains the promoter, a DNA sequence which shown in table I and a region for transcription termination. Different termination regions can be exchanged for one another in any desired fashion.

[0517] As also used herein, the terms “nucleic acid” and “nucleic acid molecule” are intended to include DNA molecules (e.g., cDNA or genomic DNA) and RNA molecules (e.g., mRNA) and analogs of the DNA or RNA generated using nucleotide analogs. This term also encompasses untranslated sequence located at both the 3′ and 5′ ends of the coding region of the gene: at least about 1000 nucleotides of sequence upstream from the 5′ end of the coding region and at least about 200 nucleotides of sequence downstream from the 3′ end of the coding region of the gene. The nucleic acid molecule can be single-stranded or double-stranded, but preferably is double-stranded DNA.

[0518] An “isolated” nucleic acid molecule is one that is substantially separated from other nucleic acid molecules, which are present in the natural source of the nucleic acid. That means other nucleic acid molecules are present in an amount less than 5% based on weight of the amount of the desired nucleic acid, preferably less than 2% by weight, more preferably less than 1% by weight, most preferably less than 0.5% by weight. Preferably, an “isolated” nucleic acid is free of some of the sequences that naturally flank the nucleic acid (i.e., sequences located at the 5′ and 3′ ends of the nucleic acid) in the genomic DNA of the organism from which the nucleic acid is derived. For example, in various embodiments, the isolated stress related protein encoding nucleic acid molecule can contain less than about 5 kb, 4 kb, 3 kb, 2 kb, 1 kb, 0.5 kb or 0.1 kb of nucleotide sequences which naturally flank the nucleic acid molecule in genomic DNA of the cell from which the nucleic acid is derived. Moreover, an “isolated” nucleic acid molecule, such as a cDNA molecule, can be free from some of the other cellular material with which it is naturally associated, or culture medium when produced by recombinant techniques, or chemical precursors or other chemicals when chemically synthesized.

[0519] A nucleic acid molecule of the present invention, e.g., a nucleic acid molecule encoding an BSRP or a portion thereof which confers tolerance and/or resistance to biotic stress and preferably a further yield related trait in plants, can be isolated using standard molecular biological techniques and the sequence information provided herein. For example, an Arabidopsis thaliana stress related protein encoding cDNA can be isolated from a A. thaliana c-DNA library or a Synechocystis sp., Brassica napus, Glycine max, Zea mays or Oryza sativa stress related protein encoding cDNA can be isolated from a Synechocystis sp., Brassica napus, Glycine max, Zea mays or Oryza sativa c-DNA library respectively using all or portion of one of the sequences shown in table I. Moreover, a nucleic acid molecule encompassing all or a portion of one of the sequences of table I can be isolated by the polymerase chain reaction using oligonucleotide primers designed based upon this sequence. For example, mRNA can be isolated from plant cells (e.g., by the guanidinium-thiocyanate extraction procedure of Chirgwin et al., 1979 Biochemistry 18:5294-5299) and cDNA can be prepared using reverse transcriptase (e.g., Moloney MLV reverse transcriptase, available from Gibco/BRL, Bethesda, Md.; or AMV reverse transcriptase, available from Seikagaku America, Inc., St. Petersburg, Fla.). Synthetic oligonucleotide primers for polymerase chain reaction amplification can be designed based upon one of the nucleotide sequences shown in table I. A nucleic acid molecule of the invention can be amplified using cDNA or, alternatively, genomic DNA, as a template and appropriate oligonucleotide primers according to standard PCR amplification techniques. The nucleic acid molecule so amplified can be cloned into an appropriate vector and characterized by DNA sequence analysis. Furthermore, oligonucleotides corresponding to a BSRP encoding nucleotide sequence can be prepared by standard synthetic techniques, e.g., using an automated DNA synthesizer.

[0520] In a preferred embodiment, an isolated nucleic acid molecule of the invention comprises one of the nucleotide sequences shown in table I encoding the BSRP (i.e., the “coding region”), as well as 5′ untranslated sequences and 3′ untranslated sequences.

[0521] Moreover, the nucleic acid molecule of the invention can comprise only a portion of the coding region of one of the sequences of the nucleic acid of table I, for example, a fragment which can be used as a probe or primer or a fragment encoding a biologically active portion of a BSRP.

[0522] Portions of proteins encoded by the BSRP encoding nucleic acid molecules of the invention are preferably biologically active portions described herein. As used herein, the term “biologically active portion of” a BSRP is intended to include a portion, e.g., a domain/motif, of stress related protein that participates in a stress tolerance and/or resistance response in a plant. To determine whether a BSRP, or a biologically active portion thereof, results in increased stress tolerance in a plant, a stress analysis of a plant comprising the BSRP may be performed. Such analysis methods are well known to those skilled in the art, as detailed in the Examples. More specifically, nucleic acid fragments encoding biologically active portions of a BSRP can be prepared by isolating a portion of one of the sequences of the nucleic acid of table I expressing the encoded portion of the BSRP or peptide (e.g., by recombinant expression in vitro) and assessing the activity of the encoded portion of the BSRP or peptide.

[0523] Biologically active portions of a BSRP are encompassed by the present invention and include peptides comprising amino acid sequences derived from the amino acid sequence of a BSRP encoding gene, or the amino acid sequence of a protein homologous to a BSRP, which include fewer amino acids than a full length BSRP or the full length protein which is homologous to a BSRP, and exhibits at least some enzymatic or biological activity of a BSRP. Typically, biologically active portions (e.g., peptides which are, for example, 5, 10, 15, 20, 30, 35, 36, 37, 38, 39, 40, 50, 100 or more amino acids in length) comprise a domain or motif with at least one activity of a BSRP. Moreover, other biologically active portions in which other regions of the protein are deleted, can be prepared by recombinant techniques and evaluated for one or more of the activities described herein. Preferably, the biologically active portions of a BSRP include one or more selected domains/motifs or portions thereof having biological activity.

[0524] The term “biological active portion” or “biological activity” means a polypeptide as depicted in table II, column 3 or a portion of said polypeptide which still has at least 10% or 20%, preferably 20%, 30%, 40% or 50%, especially preferably 60%, 70% or 80% of the enzymatic or biological activity of the natural or starting enzyme or protein.

[0525] In the process according to the invention nucleic acid sequences can be used, which, if appropriate, contain synthetic, non-natural or modified nucleotide bases, which can be incorporated into DNA or RNA. Said synthetic, non-natural or modified bases can for example increase the stability of the nucleic acid molecule outside or inside a cell. The nucleic acid molecules of the invention can contain the same modifications as aforementioned.

[0526] As used in the present context the term “nucleic acid molecule” may also encompass the untranslated sequence located at the 3′ and at the 5′ end of the coding gene region, for example at least 500, preferably 200, especially preferably 100, nucleotides of the sequence upstream of the 5′ end of the coding region and at least 100, preferably 50, especially preferably 20, nucleotides of the sequence downstream of the 3′ end of the coding gene region. It is often advantageous only to choose the coding region for cloning and expression purposes.

[0527] Preferably, the nucleic acid molecule used in the process according to the invention or the nucleic acid molecule of the invention is an isolated nucleic acid molecule.

[0528] An “isolated” polynucleotide or nucleic acid molecule is separated from other polynucleotides or nucleic acid molecules, which are present in the natural source of the nucleic acid molecule. An isolated nucleic acid molecule may be a chromosomal fragment of several kb, or preferably, a molecule only comprising the coding region of the gene. Accordingly, an isolated nucleic acid molecule of the invention may comprise chromosomal regions, which are adjacent 5′ and 3′ or further adjacent chromosomal regions, but preferably comprises no such sequences which naturally flank the nucleic acid molecule sequence in the genomic or chromosomal context in the organism from which the nucleic acid molecule originates (for example sequences which are adjacent to the regions encoding the 5′- and 3′-UTRs of the nucleic acid molecule). In various embodiments, the isolated nucleic acid molecule used in the process according to the invention may, for example comprise less than approximately 5 kb, 4 kb, 3 kb, 2 kb, 1 kb, 0.5 kb or 0.1 kb nucleotide sequences which naturally flank the nucleic acid molecule in the genomic DNA of the cell from which the nucleic acid molecule originates.

[0529] The nucleic acid molecules used in the process, for example the polynucleotide of the invention or of a part thereof can be isolated using molecular-biological standard techniques and the sequence information provided herein. Also, for example a homologous sequence or homologous, conserved sequence regions at the DNA or amino acid level can be identified with the aid of comparison algorithms. The former can be used as hybridization probes under standard hybridization techniques (for example those described in Sambrook et al., Molecular Cloning: A Laboratory Manual. 2nd Ed., Cold Spring Harbor Laboratory, Cold Spring Harbor Laboratory Press, Cold Spring Harbor, N.Y., 1989) for isolating further nucleic acid sequences useful in this process.

[0530] A nucleic acid molecule encompassing a complete sequence of the nucleic acid molecules used in the process, for example the polynucleotide of the invention, or a part thereof may additionally be isolated by polymerase chain reaction, oligonucleotide primers based on this sequence or on parts thereof being used. For example, a nucleic acid molecule comprising the complete sequence or part thereof can be isolated by polymerase chain reaction using oligonucleotide primers which have been generated on the basis of this very sequence. For example, mRNA can be isolated from cells (for example by means of the guanidinium thiocyanate extraction method of Chirgwin et al. (1979) Biochemistry 18:5294-5299) and cDNA can be generated by means of reverse transcriptase (for example Moloney MLV reverse transcriptase, available from Gibco/BRL, Bethesda, Md., or AMV reverse transcriptase, obtainable from Seikagaku America, Inc., St. Petersburg, Fla.).

[0531] Synthetic oligonucleotide primers for the amplification, e.g. as shown in table III, column 7, by means of polymerase chain reaction can be generated on the basis of a sequence shown herein, for example the sequence shown in table I, columns 5 and 7 or the sequences derived from table II, columns 5 and 7.

[0532] Moreover, it is possible to identify conserved protein by carrying out protein sequence alignments with the polypeptide encoded by the nucleic acid molecules of the present invention, in particular with the sequences encoded by the nucleic acid molecule shown in, column 5 or 7 of Table I, from which conserved regions, and in turn, degenerate primers can be derived.

[0533] Conserved regions are those, which show a very little variation in the amino acid in one particular position of several homologs from different origin. The consenus sequence and polypeptide motifs shown in column 7 of Table IV are derived from said aligments, are represent such conserved protein regions. Moreover, it is possible to identify conserved regions from various organisms by carrying out protein sequence alignments with the polypeptide encoded by the nucleic acid of the present invention, in particular with the sequences encoded by the polypeptide molecule shown in column 5 or 7 of Table II, from which conserved regions, and in turn, degenerate primers can be derived.

[0534] In one advantageous embodiment, in the method of the present invention the activity of a polypeptide is increased comprising or consisting of a consensus sequence or a polypeptide motif shown in table IV column 7 and in one another embodiment, the present invention relates to a polypeptide comprising or consisting of a consensus sequence or a polypeptide motif shown in table IV, column 7 whereby 20 or less, preferably 15 or 10, preferably 9, 8, 7, or 6, more preferred 5 or 4, even more preferred 3, even more preferred 2, even more preferred 1, most preferred 0 of the amino acids positions indicated can be replaced by any amino acid. In one embodiment not more than 15%, preferably 10%, even more preferred 5%, 4%, 3%, or 2%, most preferred 1% or 0% of the amino acid position indicated by a letter are/is replaced another amino acid. In one embodiment 20 or less, preferably 15 or 10, preferably 9, 8, 7, or 6, more preferred 5 or 4, even more preferred 3, even more preferred 2, even more preferred 1, most preferred 0 amino acids are inserted into a consensus sequence or protein motif.

[0535] The consensus sequence was derived from a multiple alignment of the sequences as listed in table II. The letters represent the one letter amino acid code and indicate that the amino acids are conserved in at least 80% of the aligned proteins, whereas the letter X stands for amino acids, which are not conserved in at least 80% of the aligned sequences. The consensus sequence starts with the first conserved amino acid in the alignment, and ends with the last conserved amino acid in the alignment of the investigated sequences. The number of given X indicates the distances between conserved amino acid residues, e.g. Y-x(21,23)-F means that conserved tyrosine and phenylalanine residues in the alignment are separated from each other by minimum 21 and maximum 23 amino acid residues in the alignment of all investigated sequences.

[0536] Conserved domains were identified from all sequences and are described using a subset of the standard Prosite notation, e.g the pattern Y-x(21,23)-[FW] means that a conserved tyrosine is separated by minimum 21 and maximum 23 amino acid residues from either a phenylalanine or tryptophane. Patterns had to match at least 80% of the investigated proteins.

[0537] Conserved patterns were identified with the software tool MEME version 3.5.1 or manually. MEME was developed by Timothy L. Bailey and Charles Elkan, Dept. of Computer Science and Engineering, University of California, San Diego, USA and is described by Timothy L. Bailey and Charles Elkan [Fitting a mixture model by expectation maximization to discover motifs in biopolymers, Proceedings of the Second International Conference on Intelligent Systems for Molecular Biology, pp. 28-36, AAAI Press, Menlo Park, Calif., 1994]. The source code for the stand-alone program is public available from the San Diego Supercomputer center (http://meme.sdsc.edu).

[0538] For identifying common motifs in all sequences with the software tool MEME, the following settings were used: -maxsize 500000, -nmotifs 15, -evt 0.001, -maxw 60, distance 1e−3, -minsites number of sequences used for the analysis. Input sequences for MEME were non-aligned sequences in Fasta format. Other parameters were used in the default settings in this software version.

[0539] Prosite patterns for conserved domains were generated with the software tool Pratt version 2.1 or manually. Pratt was developed by Inge Jonassen, Dept. of Informatics, University of Bergen, Norway and is described by Jonassen et al. [I. Jonassen, J. F. Collins and D. G. Higgins, Finding flexible patterns in unaligned protein sequences, Protein Science 4 (1995), pp. 1587-1595; I. Jonassen, Efficient discovery of conserved patterns using a pattern graph, Submitted to CABIOS Febr. 1997]. The source code (ANSI C) for the stand-alone program is public available, e.g. at established Bioinformatic centers like EBI (European Bioinformatics Institute).

[0540] For generating patterns with the software tool Pratt, following settings were used: PL (max Pattern Length): 100, PN (max Nr of Pattern Symbols): 100, PX (max Nr of consecutive x's): 30, FN (max Nr of flexible spacers): 5, FL (max Flexibility): 30, FP (max Flex.Product): 10, ON (max number patterns): 50. Input sequences for Pratt were distinct regions of the protein sequences exhibiting high similarity as identified from software tool MEME. The minimum number of sequences, which have to match the generated patterns (CM, min Nr of Seqs to Match) was set to at least 80% of the provided sequences. Parameters not mentioned here were used in their default settings.

[0541] The Prosite patterns of the conserved domains can be used to search for protein sequences matching this pattern. Various established Bioinformatic centers provide public Internet portals for using those patterns in database searches (e.g. PIR [Protein Information Resource, located at Georgetown University Medical Center] or ExPASy [Expert Protein Analysis System]). Alternatively, stand-alone software is available, like the program Fuzzpro, which is part of the EMBOSS software package. For example, the program Fuzzpro not only allows to search for an exact pattern-protein match but also allows to set various ambiguities in the performed search.

[0542] The alignment was performed with the software ClustalW (version 1.83) and is described by Thompson et al. [Thompson, J. D., Higgins, D. G. and Gibson, T. J. (1994) CLUSTAL W: improving the sensitivity of progressive multiple sequence alignment through sequence weighting, positions-specific gap penalties and weight matrix choice. Nucleic Acids Research, 22:4673-4680]. The source code for the stand-alone program is public available from the European Molecular Biology Laboratory; Heidelberg, Germany. The analysis was performed using the default parameters of ClustalW v1.83 (gap open penalty: 10.0; gap extension penalty: 0.2; protein matrix: Gonnet; pprotein/DNA endgap: -1; protein/DNA gapdist: 4).

[0543] Degenerated primers can then be utilized by PCR for the amplification of fragments of novel proteins having above-mentioned activity, e.g. conferring the increased resistance to biotic stress, preferably pathogenic fungi as compared to a corresponding non-transformed wild type control plant cell, plant or part thereof after increasing the expression or activity or having the activity of a protein as shown in table II, column 3 or further functional homologs of the polypeptide of the invention from other organisms.

[0544] These fragments can then be utilized as hybridization probe for isolating the complete gene sequence. As an alternative, the missing 5′ and 3′ sequences can be isolated by means of RACE-PCR. A nucleic acid molecule according to the invention can be amplified using cDNA or, as an alternative, genomic DNA as template and suitable oligonucleotide primers, following standard PCR amplification techniques. The nucleic acid molecule amplified thus can be cloned into a suitable vector and characterized by means of DNA sequence analysis. Oligonucleotides, which correspond to one of the nucleic acid molecules used in the process can be generated by standard synthesis methods, for example using an automatic DNA synthesizer.

[0545] Nucleic acid molecules which are advantageously for the process according to the invention can be isolated based on their homology to the nucleic acid molecules disclosed herein using the sequences or part thereof as hybridization probe and following standard hybridization techniques under stringent hybridization conditions. In this context, it is possible to use, for example, isolated nucleic acid molecules of at least 15, 20, 25, 30, 35, 40, 50, 60 or more nucleotides, preferably of at least 15, 20 or 25 nucleotides in length which hybridize under stringent conditions with the above-described nucleic acid molecules, in particular with those which encompass a nucleotide sequence of the nucleic acid molecule used in the process of the invention or encoding a protein used in the invention or of the nucleic acid molecule of the invention. Nucleic acid molecules with 30, 50, 100, 250 or more nucleotides may also be used.

[0546] The term “homology” means that the respective nucleic acid molecules or encoded proteins are functionally and/or structurally equivalent. The nucleic acid molecules that are homologous to the nucleic acid molecules described above and that are derivatives of said nucleic acid molecules are, for example, variations of said nucleic acid molecules which represent modifications having the same biological function, in particular encoding proteins with the same or substantially the same biological function. They may be naturally occurring variations, such as sequences from other plant varieties or species, or mutations. These mutations may occur naturally or may be obtained by mutagenesis techniques. The allelic variations may be naturally occurring allelic variants as well as synthetically produced or genetically engineered variants. Structurally equivalents can, for example, be identified by testing the binding of said polypeptide to antibodies or computer based predictions. Structurally equivalent have the similar immunological characteristic, e.g. comprise similar epitopes.

[0547] By “hybridizing” it is meant that such nucleic acid molecules hybridize under conventional hybridization conditions, preferably under stringent conditions such as described by, e.g., Sambrook (Molecular Cloning; A Laboratory Manual, 2nd Edition, Cold Spring Harbor Laboratory Press, Cold Spring Harbor, N.Y. (1989)) or in Current Protocols in Molecular Biology, John Wiley & Sons, N.Y. (1989), 6.3.1-6.3.6.

[0548] According to the invention, DNA as well as RNA molecules of the nucleic acid of the invention can be used as probes. Further, as template for the identification of functional homologues Northern blot assays as well as Southern blot assays can be performed. The Northern blot assay advantageously provides further informations about the expressed gene product: e.g. expression pattern, occurance of processing steps, like splicing and capping, etc. The Southern blot assay provides additional information about the chromosomal localization and organization of the gene encoding the nucleic acid molecule of the invention.

[0549] A preferred, nonlimiting example of stringent hydridization conditions are hybridizations in 6× sodium chloride/sodium citrate (═SSC) at approximately 45° C., followed by one or more wash steps in 0.2×SSC, 0.1% SDS at 50 to 65° C., for example at 50° C., 55° C. or 60° C. The skilled worker knows that these hybridization conditions differ as a function of the type of the nucleic acid and, for example when organic solvents are present, with regard to the temperature and concentration of the buffer. The temperature under “standard hybridization conditions” differs for example as a function of the type of the nucleic acid between 42° C. and 58° C., preferably between 45° C. and 50° C. in an aqueous buffer with a concentration of 0.1×0.5 x, 1×, 2×, 3×, 4× or 5×SSC (pH 7.2). If organic solvent(s) is/are present in the abovementioned buffer, for example 50% formamide, the temperature under standard conditions is approximately 40° C., 42° C. or 45° C. The hybridization conditions for DNA:DNA hybrids are preferably for example 0.1×SSC and 20° C., 25° C., 30° C., 35° C., 40° C. or 45° C., preferably between 30° C. and 45° C. The hybridization conditions for DNA:RNA hybrids are preferably for example 0.1×SSC and 30° C., 35° C., 40° C., 45° C., 50° C. or 55° C., preferably between 45° C. and 55° C. The abovementioned hybridization temperatures are determined for example for a nucleic acid approximately 100 bp (=base pairs) in length and a G+C content of 50% in the absence of formamide. The skilled worker knows to determine the hybridization conditions required with the aid of textbooks, for example the ones mentioned above, or from the following textbooks: Sambrook et al., “Molecular Cloning”, Cold Spring Harbor Laboratory, 1989; Hames and Higgins (Ed.) 1985, “Nucleic Acids Hybridization: A Practical Approach”, IRL Press at Oxford University Press, Oxford; Brown (Ed.) 1991, “Essential Molecular Biology: A Practical Approach”, IRL Press at Oxford University Press, Oxford.

[0550] A further example of one such stringent hybridization condition is hybridization at 4×SSC at 65° C., followed by a washing in 0.1×SSC at 65° C. for one hour. Alternatively, an exemplary stringent hybridization condition is in 50% formamide, 4×SSC at 42° C. Further, the conditions during the wash step can be selected from the range of conditions delimited by low-stringency conditions (approximately 2×SSC at 50° C.) and high-stringency conditions (approximately 0.2×SSC at 50° C., preferably at 65° C.) (20×SSC: 0.3M sodium citrate, 3M NaCl, pH 7.0). In addition, the temperature during the wash step can be raised from low-stringency conditions at room temperature, approximately 22° C., to higher-stringency conditions at approximately 65° C. Both of the parameters salt concentration and temperature can be varied simultaneously, or else one of the two parameters can be kept constant while only the other is varied. Denaturants, for example formamide or SDS, may also be employed during the hybridization. In the presence of 50% formamide, hybridization is preferably effected at 42° C. Relevant factors like i) length of treatment, ii) salt conditions, iii) detergent conditions, iv) competitor DNAs, v) temperature and vi) probe selection can be combined case by case so that not all possibilities can be mentioned herein.

[0551] Thus, in a preferred embodiment, Northern blots are prehybridized with Rothi-Hybri-Quick buffer (Roth, Karlsruhe) at 68° C. for 2 h. Hybridzation with radioactive labelled probe is done overnight at 68° C. Subsequent washing steps are performed at 68° C. with 1×SSC.

[0552] For Southern blot assays the membrane is prehybridized with Rothi-Hybri-Quick buffer (Roth, Karlsruhe) at 68° C. for 2 h. The hybridization with radioactive labelled probe is conducted over night at 68° C. Subsequently the hybridization buffer is discarded and the filter shortly washed using 2×SSC; 0.1% SDS. After discarding the washing buffer new 2×SSC; 0.1% SDS buffer is added and incubated at 68° C. for 15 minutes. This washing step is performed twice followed by an additional washing step using 1×SSC; 0.1% SDS at 68° C. for 10 min.

[0553] Some examples of conditions for DNA hybridization (Southern blot assays) and wash step are shown hereinbelow:
[0554] (1) Hybridization conditions can be selected, for example, from the following conditions:
[0555] a) 4×SSC at 65° C.,
[0556] b) 6×SSC at 45° C.,
[0557] c) 6×SSC, 100 mg/ml denatured fragmented fish sperm DNA at 68° C.,
[0558] d) 6×SSC, 0.5% SDS, 100 mg/ml denatured salmon sperm DNA at 68° C.,
[0559] e) 6×SSC, 0.5% SDS, 100 mg/ml denatured fragmented salmon sperm DNA, 50% formamide at 42° C.,
[0560] f) 50% formamide, 4×SSC at 42° C.,
[0561] g) 50% (vol/vol) formamide, 0.1% bovine serum albumin, 0.1% Ficoll, 0.1% polyvinylpyrrolidone, 50 mM sodium phosphate buffer pH 6.5, 750 mM NaCl, 75 mM sodium citrate at 42° C.,
[0562] h) 2× or 4×SSC at 50° C. (low-stringency condition), or
[0563] i) 30 to 40% formamide, 2× or 4×SSC at 42° C. (low-stringency condition).
[0564] (2) Wash steps can be selected, for example, from the following conditions:
[0565] a) 0.015 M NaCl/0.0015 M sodium citrate/0.1% SDS at 50° C.
[0566] b) 0.1×SSC at 65° C.
[0567] c) 0.1×SSC, 0.5% SDS at 68° C.
[0568] d) 0.1×SSC, 0.5% SDS, 50% formamide at 42° C.
[0569] e) 0.2×SSC, 0.1% SDS at 42° C.
[0570] f) 2×SSC at 65° C. (low-stringency condition).

[0571] Polypeptides having above-mentioned activity, i.e. conferring the increased resistance to biotic stress, preferably pathogenic fungi as compared to a corresponding non-transformed wild type control plant cell, plant or part thereof, derived from other organisms, can be encoded by other DNA sequences which hybridize to the sequences shown in table I, columns 5 and 7 under relaxed hybridization conditions and which code on expression for peptides conferring the increased resistance to biotic stress, preferably pathogenic fungi as compared to a corresponding non-transformed wild type control plant cell, plant or part thereof.

[0572] Further, some applications have to be performed at low stringency hybridisation conditions, without any consequences for the specificity of the hybridisation. For example, a Southern blot analysis of total DNA could be probed with a nucleic acid molecule of the present invention and washed at low stringency (55° C. in 2×SSPE, 0.1% SDS). The hybridisation analysis could reveal a simple pattern of only genes encoding polypeptides of the present invention or used in the process of the invention, e.g. having herein-mentioned activity of increasing the tolerance and/or resistance to biotic stress and preferably a further yield related trait as compared to a corresponding non-transformed wild type plant cell, plant or part thereof. A further example of such low-stringent hybridization conditions is 4×SSC at 50° C. or hybridization with 30 to 40% formamide at 42° C. Such molecules comprise those which are fragments, analogues or derivatives of the polypeptide of the invention or used in the process of the invention and differ, for example, by way of amino acid and/or nucleotide deletion(s), insertion(s), substitution (s), addition(s) and/or recombination (s) or any other modification(s) known in the art either alone or in combination from the above-described amino acid sequences or their underlying nucleotide sequence(s). However, it is preferred to use high stringency hybridisation conditions.

[0573] Hybridization should advantageously be carried out with fragments of at least 5, 10, 15, 20, 25, 30, 35 or 40 bp, advantageously at least 50, 60, 70 or 80 bp, preferably at least 90, 100 or 110 bp. Most preferably are fragments of at least 15, 20, 25 or 30 bp. Preferably are also hybridizations with at least 100 bp or 200, very especially preferably at least 400 bp in length. In an especially preferred embodiment, the hybridization should be carried out with the entire nucleic acid sequence with conditions described above.

[0574] The terms “fragment”, “fragment of a sequence” or “part of a sequence” mean a truncated sequence of the original sequence referred to. The truncated sequence (nucleic acid or protein sequence) can vary widely in length; the minimum size being a sequence of sufficient size to provide a sequence with at least a comparable function and/or activity of the original sequence referred to or hybridizing with the nucleic acid molecule of the invention or used in the process of the invention under stringent conditions, while the maximum size is not critical. In some applications, the maximum size usually is not substantially greater than that required to provide the desired activity and/or function(s) of the original sequence.

[0575] Typically, the truncated amino acid sequence will range from about 5 to about 310 amino acids in length. More typically, however, the sequence will be a maximum of about 250 amino acids in length, preferably a maximum of about 200 or 100 amino acids. It is usually desirable to select sequences of at least about 10, 12 or 15 amino acids, up to a maximum of about 20 or 25 amino acids.

[0576] The term “epitope” relates to specific immunoreactive sites within an antigen, also known as antigenic determinates. These epitopes can be a linear array of monomers in a polymeric composition—such as amino acids in a protein—or consist of or comprise a more complex secondary or tertiary structure. Those of skill will recognize that immunogens (i.e., substances capable of eliciting an immune response) are antigens; however, some antigen, such as haptens, are not immunogens but may be made immunogenic by coupling to a carrier molecule. The term “antigen” includes references to a substance to which an antibody can be generated and/or to which the antibody is specifically immunoreactive.

[0577] In one embodiment the present invention relates to a epitope of the polypeptide of the present invention or used in the process of the present invention and confers an increased resistance to biotic stress, preferably pathogenic fungi as compared to a corresponding non-transformed wild type control plant cell, plant or part thereof.

[0578] The term “one or several amino acids” relates to at least one amino acid but not more than that number of amino acids, which would result in a homology of below 50% identity. Preferably, the identity is more than 70% or 80%, more preferred are 85%, 90%, 91%, 92%, 93%, 94% or 95%, even more preferred are 96%, 97%, 98%, or 99% identity.

[0579] Further, the nucleic acid molecule of the invention comprises a nucleic acid molecule, which is a complement of one of the nucleotide sequences of above mentioned nucleic acid molecules or a portion thereof. A nucleic acid molecule which is complementary to one of the nucleotide sequences shown in table I, columns 5 and 7 is one which is sufficiently complementary to one of the nucleotide sequences shown in table I, columns 5 and 7 such that it can hybridize to one of the nucleotide sequences shown in table I, columns 5 and 7, thereby forming a stable duplex. Preferably, the hybridisation is performed under stringent hybridization conditions. However, a complement of one of the herein disclosed sequences is preferably a sequence complement thereto according to the base pairing of nucleic acid molecules well known to the skilled person. For example, the bases A and G undergo base pairing with the bases T and U or C, resp. and visa versa. Modifications of the bases can influence the base-pairing partner.

[0580] The nucleic acid molecule of the invention comprises a nucleotide sequence which is at least about 30%, 35%, 40% or 45%, preferably at least about 50%, 55%, 60% or 65%, more preferably at least about 70%, 80%, or 90%, and even more preferably at least about 95%, 97%, 98%, 99% or more homologous to a nucleotide sequence shown in table I, columns 5 and 7, or a portion thereof and preferably has above mentioned activity, in particular having a tolerance and/or resistance to biotic stress and preferably a further yield related trait increasing activity after increasing the activity or an activity of a gene product as shown in table II, column 3 by for example expression either in the cytsol or in an organelle such as a plastid or mitochondria or both, preferably in plastids.

[0581] The nucleic acid molecule of the invention comprises a nucleotide sequence which hybridizes, preferably hybridizes under stringent conditions as defined herein, to one of the nucleotide sequences shown in table I, columns 5 and 7, or a portion thereof and encodes a protein having above-mentioned activity, e.g. conferring an increased resistance to biotic stress, preferably pathogenic fungi and preferably a further yield related trait as compared to a corresponding non-transformed wild type control plant cell, plant or part thereof by for example expression either in the cytsol or in an organelle such as a plastid or mitochondria or both, preferably in plastids, and optionally, the activity selected from the group consisting of: b3262-protein, b3644-protein, chloramphenicol resistance protein homolog ydeA, chorismate mutase-T and prephenate dehydrogenase, Gamma subunit of the translation initiation factor eIF2B, glucose dehydrogenase, glucose-6-phosphate 1-dehydrogenase, peptidyl-prolyl cis-trans isomerase A (rotamase A), recombinase A, ribosomal protein, RNA polymerase sigma-E factor (sigma-24), Splicing factor that is found in the Cef1p subcomplex of the spliceosome (Prp46p), sulfite reductase (NADPH), flavoprotein beta subunit, transcription regulator farR, fatty acyl-responsive, transmembrane pore-generating protein mglC, YCR087W-protein, YGR150c-protein, YIL172C-protein, YLR168C-protein, YLR407W-protein, and YOR299W-protein.

[0582] Moreover, the nucleic acid molecule of the invention can comprise only a portion of the coding region of one of the sequences shown in table I, columns 5 and 7, for example a fragment which can be used as a probe or primer or a fragment encoding a biologically active portion of the polypeptide of the present invention or of a polypeptide used in the process of the present invention, i.e. having above-mentioned activity, e.g. conferring an increase of the tolerance and/or resistance to biotic stress and preferably a further yield related trait as compared to a corresponding non-transformed wild type plant cell, plant or part thereof if its activity is increased by for example expression either in the cytsol or in an organelle such as a plastid or mitochondria or both, preferably in plastids. The nucleotide sequences determined from the cloning of the present protein-according-to-the-invention-encoding gene allows for the generation of probes and primers designed for use in identifying and/or cloning its homologues in other cell types and organisms. The probe/primer typically comprises substantially purified oligonucleotide. The oligonucleotide typically comprises a region of nucleotide sequence that hybridizes under stringent conditions to at least about 12, 15 preferably about 20 or 25, more preferably about 40, 50 or 75 consecutive nucleotides of a sense strand of one of the sequences set forth, e.g., in table I, columns 5 and 7, an anti-sense sequence of one of the sequences, e.g., set forth in table I, columns 5 and 7, or naturally occurring mutants thereof. Primers based on a nucleotide of invention can be used in PCR reactions to clone homologues of the polypeptide of the invention or of the polypeptide used in the process of the invention, e.g. as the primers described in the examples of the present invention, e.g. as shown in the examples. A PCR with the primers shown in table III, column 7 will result in a fragment of the gene product as shown in table II, column 3.

[0583] Primer sets are interchangable. The person skilled in the art knows to combine said primers to result in the desired product, e.g. in a full length clone or a partial sequence. Probes based on the sequences of the nucleic acid molecule of the invention or used in the process of the present invention can be used to detect transcripts or genomic sequences encoding the same or homologous proteins. The probe can further comprise a label group attached thereto, e.g. the label group can be a radioisotope, a fluorescent compound, an enzyme, or an enzyme co-factor. Such probes can be used as a part of a genomic marker test kit for identifying cells which express an polypepetide of the invention or used in the process of the present invention, such as by measuring a level of an encoding nucleic acid molecule in a sample of cells, e.g., detecting mRNA levels or determining, whether a genomic gene comprising the sequence of the polynucleotide of the invention or used in the process of the present invention has been mutated or deleted.

[0584] The nucleic acid molecule of the invention encodes a polypeptide or portion thereof which includes an amino acid sequence which is sufficiently homologous to the amino acid sequence shown in table II, columns 5 and 7 such that the protein or portion thereof maintains the ability to participate in the increase of tolerance and/or resistance to biotic stress and preferably a further yield related trait as compared to a corresponding non-transformed wild type plant cell, plant or part thereof, in particular increasing the activity as mentioned above or as described in the examples in plants is comprised.

[0585] As used herein, the language “sufficiently homologous” refers to proteins or portions thereof which have amino acid sequences which include a minimum number of identical or equivalent amino acid residues (e.g., an amino acid residue which has a similar side chain as an amino acid residue in one of the sequences of the polypeptide of the present invention) to an amino acid sequence shown in table II, columns 5 and 7 such that the protein or portion thereof is able to participate in the increase of the increase of tolerance and/or resistance to stress, the increased resistance to biotic stress, preferably pathogenic fungi as compared to a corresponding non-transformed wild type plant cell, plant or part thereof. For examples having the activity of a protein as shown in table II, column 3 and as described herein.

[0586] In one embodiment, the nucleic acid molecule of the present invention comprises a nucleic acid that encodes a portion of the protein of the present invention. The protein is at least about 30%, 35%, 40%, 45% or 50%, preferably at least about 55%, 60%, 65% or 70%, and more preferably at least about 75%, 80%, 85%, 90%, 91%, 92%, 93% or 94% and most preferably at least about 95%, 97%, 98%, 99% or more homologous to an entire amino acid sequence of table II, columns 5 and 7 and having above-mentioned activity, e.g. conferring an increased resistance to biotic stress, preferably pathogenic fungi as compared to a corresponding non-transformed wild type control plant cell, plant or part thereof by for example expression either in the cytsol or in an organelle such as a plastid or mitochondria or both, preferably in plastids.

[0587] Portions of proteins encoded by the nucleic acid molecule of the invention are preferably biologically active, preferably having above-mentioned annotated activity, e.g. conferring an increase in tolerance and/or resistance to stress, the increased resistance to biotic stress, preferably pathogenic fungi as as compared to a corresponding non-transformed wild type plant cell, plant or part thereof after increase of activity.

[0588] As mentioned herein, the term “biologically active portion” is intended to include a portion, e.g., a domain/motif, that confers increase in tolerance and/or resistance to biotic stress and preferably a further yield related trait as compared to a corresponding non-transformed wild type plant cell, plant or part thereof or has an immunological activity such that it is binds to an antibody binding specifically to the polypeptide of the present invention or a polypeptide used in the process of the present invention for increased resistance to biotic stress, preferably pathogenic fungi as compared to a corresponding non-transformed wild type control plant cell, plant or part thereof.

[0589] The invention further relates to nucleic acid molecules that differ from one of the nucleotide sequences shown in table I A, columns 5 and 7 (and portions thereof) due to degeneracy of the genetic code and thus encode a polypeptide of the present invention, in particular a polypeptide having above mentioned activity, e.g. as that polypeptides depicted by the sequence shown in table II, columns 5 and 7 or the functional homologues. Advantageously, the nucleic acid molecule of the invention comprises, or in an other embodiment has, a nucleotide sequence encoding a protein comprising, or in an other embodiment having, an amino acid sequence shown in table II, columns 5 and 7 or the functional homologues. In a still further embodiment, the nucleic acid molecule of the invention encodes a full length protein which is substantially homologous to an amino acid sequence shown in table II, columns 5 and 7 or the functional homologues. However, in a preferred embodiment, the nucleic acid molecule of the present invention does not consist of the sequence shown in table I, preferably table IA, columns 5 and 7.

[0590] In addition, it will be appreciated by those skilled in the art that DNA sequence polymorphisms that lead to changes in the amino acid sequences may exist within a population. Such genetic polymorphism in the gene encoding the polypeptide of the invention or comprising the nucleic acid molecule of the invention may exist among individuals within a population due to natural variation.

[0591] As used herein, the terms “gene” and “recombinant gene” refer to nucleic acid molecules comprising an open reading frame encoding the polypeptide of the invention or comprising the nucleic acid molecule of the invention or encoding the polypeptide used in the process of the present invention, preferably from a crop plant or from a microorgansim useful for the method of the invention. Such natural variations can typically result in 1-5% variance in the nucleotide sequence of the gene. Any and all such nucleotide variations and resulting amino acid polymorphisms in genes encoding a polypeptide of the invention or comprising a the nucleic acid molecule of the invention that are the result of natural variation and that do not alter the functional activity as described are intended to be within the scope of the invention.

[0592] Nucleic acid molecules corresponding to natural variants homologues of a nucleic acid molecule of the invention, which can also be a cDNA, can be isolated based on their homology to the nucleic acid molecules disclosed herein using the nucleic acid molecule of the invention, or a portion thereof, as a hybridization probe according to standard hybridization techniques under stringent hybridization conditions.

[0593] Accordingly, in another embodiment, a nucleic acid molecule of the invention is at least 15, 20, 25 or 30 nucleotides in length. Preferably, it hybridizes under stringent conditions to a nucleic acid molecule comprising a nucleotide sequence of the nucleic acid molecule of the present invention or used in the process of the present invention, e.g. comprising the sequence shown in table I, columns 5 and 7. The nucleic acid molecule is preferably at least 20, 30, 50, 100, 250 or more nucleotides in length.

[0594] The term “hybridizes under stringent conditions” is defined above. In one embodiment, the term “hybridizes under stringent conditions” is intended to describe conditions for hybridization and washing under which nucleotide sequences at least 30%, 40%, 50% or 65% identical to each other typically remain hybridized to each other. Preferably, the conditions are such that sequences at least about 70%, more preferably at least about 75% or 80%, and even more preferably at least about 85%, 90% or 95% or more identical to each other typically remain hybridized to each other.

[0595] Preferably, nucleic acid molecule of the invention that hybridizes under stringent conditions to a sequence shown in table I, columns 5 and 7 corresponds to a naturally-occurring nucleic acid molecule of the invention. As used herein, a “naturally-occurring” nucleic acid molecule refers to an RNA or DNA molecule having a nucleotide sequence that occurs in nature (e.g., encodes a natural protein). Preferably, the nucleic acid molecule encodes a natural protein having above-mentioned activity, e.g. conferring the tolerance and/or resistance to biotic stress and preferably a further yield related trait increase after increasing the expression or activity thereof or the activity of a protein of the invention or used in the process of the invention by for example expression the nucleic acid sequence of the gene product in the cytsol and/or in an organelle such as a plastid or mitochondria, preferably in plastids.

[0596] In addition to naturally-occurring variants of the sequences of the polypeptide or nucleic acid molecule of the invention as well as of the polypeptide or nucleic acid molecule used in the process of the invention that may exist in the population, the skilled artisan will further appreciate that changes can be introduced by mutation into a nucleotide sequence of the nucleic acid molecule encoding the polypeptide of the invention or used in the process of the present invention, thereby leading to changes in the amino acid sequence of the encoded said polypeptide, without altering the functional ability of the polypeptide, preferably not decreasing said activity.

[0597] For example, nucleotide substitutions leading to amino acid substitutions at “non-essential” amino acid residues can be made in a sequence of the nucleic acid molecule of the invention or used in the process of the invention, e.g. shown in table I, columns 5 and 7.

[0598] A “non-essential” amino acid residue is a residue that can be altered from the wild-type sequence of one without altering the activity of said polypeptide, whereas an “essential” amino acid residue is required for an activity as mentioned above, e.g. leading to an increase in the tolerance and/or resistance to biotic stress and preferably a further yield related trait as compared to a corresponding non-transformed wild type plant cell, plant or part thereof in an organism after an increase of activity of the polypeptide. Other amino acid residues, however, (e.g., those that are not conserved or only semi-conserved in the domain having said activity) may not be essential for activity and thus are likely to be amenable to alteration without altering said activity.

[0599] Further, a person skilled in the art knows that the codon usage between organisms can differ. Therefore, he may adapt the codon usage in the nucleic acid molecule of the present invention to the usage of the organism or the cell compartment for example of the plastid or mitochondria in which the polynucleotide or polypeptide is expressed.

[0600] Accordingly, the invention relates to nucleic acid molecules encoding a polypeptide having above-mentioned activity, in an organisms or parts thereof by for example expression either in the cytsol or in an organelle such as a plastid or mitochondria or both, preferably in plastids that contain changes in amino acid residues that are not essential for said activity. Such polypeptides differ in amino acid sequence from a sequence contained in the sequences shown in table II, columns 5 and 7 yet retain said activity described herein. The nucleic acid molecule can comprise a nucleotide sequence encoding a polypeptide, wherein the polypeptide comprises an amino acid sequence at least about 50% identical to an amino acid sequence shown in table II, columns 5 and 7 and is capable of participation in the increased biotic stress resistance and preferably a further yield related trait as compared to a corresponding non-transformed wild type plant cell, plant or part thereof after increasing its activity, e.g. its expression by for example expression either in the cytsol or in an organelle such as a plastid or mitochondria or both, preferably in plastids. Preferably, the protein encoded by the nucleic acid molecule is at least about 60% identical to the sequence shown in table II, columns 5 and 7, more preferably at least about 70% identical to one of the sequences shown in table II, columns 5 and 7, even more preferably at least about 80%, 90%, 95% homologous to the sequence shown in table II, columns 5 and 7, and most preferably at least about 96%, 97%, 98%, or 99% identical to the sequence shown in table II, columns 5 and 7.

[0601] To determine the percentage homology (=identity, herein used interchangeably) of two amino acid sequences or of two nucleic acid molecules, the sequences are written one underneath the other for an optimal comparison (for example gaps may be inserted into the sequence of a protein or of a nucleic acid in order to generate an optimal alignment with the other protein or the other nucleic acid).

[0602] The amino acid residues or nucleic acid molecules at the corresponding amino acid positions or nucleotide positions are then compared. If a position in one sequence is occupied by the same amino acid residue or the same nucleic acid molecule as the corresponding position in the other sequence, the molecules are homologous at this position (i.e. amino acid or nucleic acid “homology” as used in the present context corresponds to amino acid or nucleic acid “identity”. The percentage homology between the two sequences is a function of the number of identical positions shared by the sequences (i.e. % homology=number of identical positions/total number of positions×100). The terms “homology” and “identity” are thus to be considered as synonyms.

[0603] For the determination of the percentage homology (=identity) of two or more amino acids or of two or more nucleotide sequences several computer software programs have been developed. The homology of two or more sequences can be calculated with for example the software fasta, which presently has been used in the version fasta 3 (W. R. Pearson and D. J. Lipman (1988), Improved Tools for Biological Sequence Comparison. PNAS 85:2444-2448; W. R. Pearson (1990) Rapid and Sensitive Sequence Comparison with FASTP and FASTA, Methods in Enzymology 183:63-98; W. R. Pearson and D. J. Lipman (1988) Improved Tools for Biological Sequence Comparison. PNAS 85:2444-2448; W. R. Pearson (1990); Rapid and Sensitive Sequence Comparison with FASTP and FASTAMethods in Enzymology 183:63-98). Another useful program for the calculation of homologies of different sequences is the standard blast program, which is included in the Biomax pedant software (Biomax, Munich, Federal Republic of Germany). This leads unfortunately sometimes to suboptimal results since blast does not always include complete sequences of the subject and the querry. Nevertheless as this program is very efficient it can be used for the comparison of a huge number of sequences. The following settings are typically used for such a comparisons of sequences:

-p Program Name [String]; -d Database [String]; default=nr; -i Query File [File In]; default=stdin; -e Expectation value (E) [Real]; default=10.0; -m alignment view options: 0=pairwise; 1=query-anchored showing identities; 2=query-anchored no identities; 3=flat query-anchored, show identities; 4=flat query-anchored, no identities; 5=query-anchored no identities and blunt ends; 6=flat query-anchored, no identities and blunt ends; 7=XML Blast output; 8=tabular; 9 tabular with comment lines [Integer]; default=0; -o BLAST report Output File [File Out] Optional; default=stdout; -F Filter query sequence (DUST with blastn, SEG with others) [String]; default=T; -G Cost to open a gap (zero invokes default behavior) [Integer]; default=0; -E Cost to extend a gap (zero invokes default behavior) [Integer]; default=0; -X X dropoff value for gapped alignment (in bits) (zero invokes default behavior); blastn 30, megablast 20, tblastx 0, all others 15 [Integer]; default=0; -I Show GI's in deflines [T/F]; default=F; q Penalty for a nucleotide mismatch (blastn only) [Integer]; default=−3; -r Reward for a nucleotide match (blastn only) [Integer]; default=1; -v Number of database sequences to show one-line descriptions for (V) [Integer]; default=500; -b Number of database sequence to show alignments for (B) [Integer]; default=250; -f Threshold for extending hits, default if zero; blastp 11, blastn 0, blastx 12, tblastn 13; tblastx 13, megablast 0 [Integer]; default=0; -g Perform gapped alignment (not available with tblastx) [T/F]; default=T; -Q Query Genetic code to use [Integer]; default=1; -D DB Genetic code (for tblast[nx] only) [Integer]; default=1; -a Number of processors to use [Integer]; default=1; -O SeqAlign file [File Out] Optional; -J Believe the query defline [T/F]; default=F; -M Matrix [String]; default=BLOSUM62; -W Word size, default if zero (blastn 11, megablast 28, all others 3) [Integer]; default=0; -z Effective length of the database (use zero for the real size) [Real]; default=0; -K Number of best hits from a region to keep (off by default, if used a value of 100 is recommended) [Integer]; default=0; -P 0 for multiple hit, 1 for single hit [Integer]; default=0; -Y Effective length of the search space (use zero for the real size) [Real]; default=0; -S Query strands to search against database (for blast[nx], and tblastx); 3 is both, 1 is top, 2 is bottom [Integer]; default=3; -T Produce HTML output [T/F]; default=F; -I Restrict search of database to list of GI's [String] Optional; -U Use lower case filtering of FASTA sequence [T/F] Optional; default=F; -y X dropoff value for ungapped extensions in bits (0.0 invokes default behavior); blastn 20, megablast 10, all others 7 [Real]; default=0.0; -Z X dropoff value for final gapped alignment in bits (0.0 invokes default behavior); blastn/megablast 50, tblastx 0, all others 25 [Integer]; default=0; -R PSITBLASTN checkpoint file [File In] Optional; -n MegaBlast search [T/F]; default=F; -L Location on query sequence [String] Optional; -A Multiple Hits window size, default if zero (blastn/megablast 0, all others 40 [Integer]; default=0; -w Frame shift penalty (OOF algorithm for blastx) [Integer]; default=0; -t Length of the largest intron allowed in tblastn for linking HSPs (0 disables linking) [Integer]; default=0.

[0604] Results of high quality are reached by using the algorithm of Needleman and Wunsch or Smith and Waterman. Therefore programs based on said algorithms are preferred. Advantageously the comparisons of sequences can be done with the program PileUp (J. Mol. Evolution., 25, 351 (1987), Higgins et al., CABIOS 5, 151 (1989)) or preferably with the programs “Gap” and “Needle”, which are both based on the algorithms of Needleman and Wunsch (J. Mol. Biol. 48; 443 (1970)), and “BestFit”, which is based on the algorithm of Smith and Waterman (Adv. Appl. Math. 2; 482 (1981)). “Gap” and “BestFit” are part of the GCG software-package (Genetics Computer Group, 575 Science Drive, Madison, Wis., USA 53711 (1991); Altschul et al., (Nucleic Acids Res. 25, 3389 (1997)), “Needle” is part of the The European Molecular Biology Open Software Suite (EMBOSS) (Trends in Genetics 16 (6), 276 (2000)). Therefore preferably the calculations to determine the percentages of sequence homology are done with the programs “Gap” or “Needle” over the whole range of the sequences. The following standard adjustments for the comparison of nucleic acid sequences were used for “Needle”: matrix: EDNAFULL, Gap_penalty: 10.0, Extend_penalty: 0.5. The following standard adjustments for the comparison of nucleic acid sequences were used for “Gap”: gap weight: 50, length weight: 3, average match: 10.000, average mismatch: 0.000.

[0605] For example a sequence, which has 80% homology with sequence SEQ ID NO: 9 at the nucleic acid level is understood as meaning a sequence which, upon comparison with the sequence SEQ ID NO: 9 by the above program “Needle” with the above parameter set, has a 80% identity.

[0606] Homology between two polypeptides is understood as meaning the identity of the amino acid sequence over in each case the entire sequence length which is calculated by comparison with the aid of the above program “Needle” using Matrix: EBLOSUM62, Gap_penalty: 8.0, Extend_penalty: 2.0.

[0607] For example a sequence which has a 80% homology with sequence SEQ ID NO: 10 at the protein level is understood as meaning a sequence which, upon comparison with the sequence SEQ ID NO: 10 by the above program “Needle” with the above parameter set, has a 80% identity.

[0608] Functional equivalents derived from one of the polypeptides as shown in table II, columns 5 and 7 according to the invention by substitution, insertion or deletion have at least 30%, 35%, 40%, 45% or 50%, preferably at least 55%, 60%, 65% or 70% by preference at least 80%, especially preferably at least 85% or 90%, 91%, 92%, 93% or 94%, very especially preferably at least 95%, 97%, 98% or 99% homology with one of the polypeptides as shown in table II, columns 5 and 7 according to the invention and are distinguished by essentially the same properties as the polypeptide as shown in table II, columns 5 and 7.

[0609] Functional equivalents derived from the nucleic acid sequence as shown in table I, columns 5 and 7 according to the invention by substitution, insertion or deletion have at least 30%, 35%, 40%, 45% or 50%, preferably at least 55%, 60%, 65% or 70% by preference at least 80%, especially preferably at least 85% or 90%, 91%, 92%, 93% or 94%, very especially preferably at least 95%, 97%, 98% or 99% homology with one of the polypeptides as shown in table II, columns 5 and 7 according to the invention and encode polypeptides having essentially the same properties as the polypeptide as shown in table II, columns 5 and 7.

[0610] “Essentially the same properties” of a functional equivalent is above all understood as meaning that the functional equivalent has above mentioned activity, by for example expression either in the cytsol or in an organelle such as a plastid or mitochondria or both, preferably in plastids while increasing the amount of protein, activity or function of said functional equivalent in an organism, e.g. a microorgansim, a plant or plant or animal tissue, plant or animal cells or a part of the same.

[0611] A nucleic acid molecule encoding an homologous to a protein sequence of table II, columns 5 and 7 can be created by introducing one or more nucleotide substitutions, additions or deletions into a nucleotide sequence of the nucleic acid molecule of the present invention, in particular of table I, columns 5 and 7 such that one or more amino acid substitutions, additions or deletions are introduced into the encoded protein. Mutations can be introduced into the encoding sequences of table I, columns 5 and 7 by standard techniques, such as site-directed mutagenesis and PCR-mediated mutagenesis.

[0612] Preferably, conservative amino acid substitutions are made at one or more predicted non-essential amino acid residues. A “conservative amino acid substitution” is one in which the amino acid residue is replaced with an amino acid residue having a similar side chain. Families of amino acid residues having similar side chains have been defined in the art. These families include amino acids with basic side chains (e.g., lysine, arginine, histidine), acidic side chains (e.g., aspartic acid, glutamic acid), uncharged polar side chains (e.g., glycine, asparagine, glutamine, serine, threonine, tyrosine, cysteine), nonpolar side chains (e.g., alanine, valine, leucine, isoleucine, proline, phenylalanine, methionine, tryptophane), beta-branched side chains (e.g., threonine, valine, isoleucine) and aromatic side chains (e.g., tyrosine, phenylalanine, tryptophane, histidine).

[0613] Thus, a predicted nonessential amino acid residue in a polypeptide of the invention or a polypeptide used in the process of the invention is preferably replaced with another amino acid residue from the same family. Alternatively, in another embodiment, mutations can be introduced randomly along all or part of a coding sequence of a nucleic acid molecule of the invention or used in the process of the invention, such as by saturation mutagenesis, and the resultant mutants can be screened for activity described herein to identify mutants that retain or even have increased above mentioned activity, e.g. conferring an increased resistance to biotic stress, preferably pathogenic fungi as compared to a corresponding non-transformed wild type control plant cell, plant or part thereof.

[0614] Following mutagenesis of one of the sequences of shown herein, the encoded protein can be expressed recombinantly and the activity of the protein can be determined using, for example, assays described herein (see Examples).

[0615] A high homology of the nucleic acid molecule used in the process according to the invention can be found for database entries by Gap search.

[0616] Homologues of the nucleic acid sequences used, with the sequence shown in table I, columns 5 and 7, comprise also allelic variants with at least approximately 30%, 35%, 40% or 45% homology, by preference at least approximately 50%, 60% or 70%, more preferably at least approximately 90%, 91%, 92%, 93%, 94% or 95% and even more preferably at least approximately 96%, 97%, 98%, 99% or more homology with one of the nucleotide sequences shown or the abovementioned derived nucleic acid sequences or their homologues, derivatives or analogues or parts of these. Allelic variants encompass in particular functional variants which can be obtained by deletion, insertion or substitution of nucleotides from the sequences shown, preferably from table I, columns 5 and 7, or from the derived nucleic acid sequences, the intention being, however, that the enzyme activity or the biological activity of the resulting proteins synthesized is advantageously retained or increased.

[0617] In one embodiment of the present invention, the nucleic acid molecule of the invention or used in the process of the invention comprises the sequences shown in any of the table I, columns 5 and 7. It is preferred that the nucleic acid molecule comprises as little as possible other nucleotides not shown in any one of table I, columns 5 and 7. In one embodiment, the nucleic acid molecule comprises less than 500, 400, 300, 200, 100, 90, 80, 70, 60, 50 or 40 further nucleotides. In a further embodiment, the nucleic acid molecule comprises less than 30, 20 or 10 further nucleotides. In one embodiment, the nucleic acid molecule use in the process of the invention is identical to the sequences shown in table I, columns 5 and 7.

[0618] Also preferred is that the nucleic acid molecule used in the process of the invention encodes a polypeptide comprising the sequence shown in table II, columns 5 and 7. In one embodiment, the nucleic acid molecule encodes less than 150, 130, 100, 80, 60, 50, 40 or 30 further amino acids. In a further embodiment, the encoded polypeptide comprises less than 20, 15, 10, 9, 8, 7, 6 or 5 further amino acids. In one embodiment used in the inventive process, the encoded polypeptide is identical to the sequences shown in table II, columns 5 and 7.

[0619] In one embodiment, the nucleic acid molecule of the invention or used in the process encodes a polypeptide comprising the sequence shown in table II, columns 5 and 7 comprises less than 100 further nucleotides. In a further embodiment, said nucleic acid molecule comprises less than 30 further nucleotides. In one embodiment, the nucleic acid molecule used in the process is identical to a coding sequence of the sequences shown in table I, columns 5 and 7.

[0620] Polypeptides (=proteins), which still have the essential biological or enzymatic activity of the polypeptide of the present invention conferring an increased biotic stress resistance and preferably a further yield related trait as compared to a corresponding non-transformed wild type plant cell, plant or part thereof i.e. whose activity is essentially not reduced, are polypeptides with at least 10% or 20%, by preference 30% or 40%, especially preferably 50% or 60%, very especially preferably 80% or 90 or more of the wild type biological activity or enzyme activity, advantageously, the activity is essentially not reduced in comparison with the activity of a polypeptide shown in table II, columns 5 and 7 expressed under identical conditions.

[0621] Homologues of table I, columns 5 and 7 or of the derived sequences of table II, columns 5 and 7 also mean truncated sequences, cDNA, single-stranded DNA or RNA of the coding and noncoding DNA sequence. Homologues of said sequences are also understood as meaning derivatives, which comprise noncoding regions such as, for example, UTRs, terminators, enhancers or promoter variants. The promoters upstream of the nucleotide sequences stated can be modified by one or more nucleotide substitution(s), insertion(s) and/or deletion(s) without, however, interfering with the functionality or activity either of the promoters, the open reading frame (=ORF) or with the 3′-regulatory region such as terminators or other 3′ regulatory regions, which are far away from the ORF. It is furthermore possible that the activity of the promoters is increased by modification of their sequence, or that they are replaced completely by more active promoters, even promoters from heterologous organisms. Appropriate promoters are known to the person skilled in the art and are mentioned herein below.

[0622] In addition to the nucleic acid molecules encoding the BSRP described above, another aspect of the invention pertains to negative regulators of the activity of a nucleic acid molecules selected from the group according to table I, column 5 and/or 7, preferably column 7. Antisense polynucleotides thereto are thought to inhibit the downregulating activity of those negative regulators by specifically binding the target polynucleotide and interfering with transcription, splicing, transport, translation, and/or stability of the target polynucleotide. Methods are described in the prior art for targeting the antisense polynucleotide to the chromosomal DNA, to a primary RNA transcript, or to a processed mRNA. Preferably, the target regions include splice sites, translation initiation codons, translation termination codons, and other sequences within the open reading frame.

[0623] The term “antisense,” for the purposes of the invention, refers to a nucleic acid comprising a polynucleotide that is sufficiently complementary to all or a portion of a gene, primary transcript, or processed mRNA, so as to interfere with expression of the endogenous gene. “Complementary” polynucleotides are those that are capable of base pairing according to the standard Watson-Crick complementarity rules. Specifically, purines will base pair with pyrimidines to form a combination of guanine paired with cytosine (G:C) and adenine paired with either thymine (A:T) in the case of DNA, or adenine paired with uracil (A:U) in the case of RNA. It is understood that two polynucleotides may hybridize to each other even if they are not completely complementary to each other, provided that each has at least one region that is substantially complementary to the other. The term “antisense nucleic acid” includes single stranded RNA as well as double-stranded DNA expression cassettes that can be transcribed to produce an antisense RNA. “Active” antisense nucleic acids are antisense RNA molecules that are capable of selectively hybridizing with a negative regulator of the activity of a nucleic acid molecules encoding a polypeptide having at least 80% sequence identity with the polypeptide selected from the group according to table II, column 5 and/or 7, preferably column 7.

[0624] The antisense nucleic acid can be complementary to an entire negative regulator strand, or to only a portion thereof. In an embodiment, the antisense nucleic acid molecule is antisense to a “noncoding region” of the coding strand of a nucleotide sequence encoding a BSRP. The term “noncoding region” refers to 5′ and 3′ sequences that flank the coding region that are not translated into amino acids (i.e., also referred to as 5′ and 3′ untranslated regions). The antisense nucleic acid molecule can be complementary to only a portion of the noncoding region of BSRP mRNA. For example, the antisense oligonucleotide can be complementary to the region surrounding the translation start site of BSRP mRNA. An antisense oligonucleotide can be, for example, about 5, 10, 15, 20, 25, 30, 35, 40, 45 or 50 nucleotides in length. Typically, the antisense molecules of the present invention comprise an RNA having 60-100% sequence identity with at least 14 consecutive nucleotides of a noncoding region of one of the nucleic acid of table I. Preferably, the sequence identity will be at least 70%, more preferably at least 75%, 80%, 85%, 90%, 95%, 98% and most preferably 99%.

[0625] An antisense nucleic acid of the invention can be constructed using chemical synthesis and enzymatic ligation reactions using procedures known in the art. For example, an antisense nucleic acid (e.g., an antisense oligonucleotide) can be chemically synthesized using naturally occurring nucleotides or variously modified nucleotides designed to increase the biological stability of the molecules or to increase the physical stability of the duplex formed between the antisense and sense nucleic acids, e.g., phosphorothioate derivatives and acridine substituted nucleotides can be used. Examples of modified nucleotides which can be used to generate the antisense nucleic acid include 5-fluorouracil, 5-bromouracil, 5-chlorouracil, 5-iodouracil, hypoxanthine, xanthine, 4-acetylcytosine, 5-(carboxyhydroxylmethyl)uracil, 5-carboxymethylaminomethyl-2-thiouridine, 5-carboxymethylaminomethyluracil, dihydrouracil, beta-D-galactosylqueosine, inosine, N6-isopentenyladenine, 1-methylguanine, 1-methylinosine, 2,2-dimethylguanine, 2-methyladenine, 2-methylguanine, 3-methylcytosine, 5-methylcytosine, N6-adenine, 7-methylguanine, 5-methylaminomethyluracil, 5-methoxyaminomethyl-2-thiouracil, beta-D-mannosylqueosine, 5′-methoxycarboxymethyluracil, 5-methoxyuracil, 2-methylthio-N6-isopentenyladenine, uracil-5-oxyacetic acid (v), wybutoxosine, pseudouracil, queosine, 2-thiocytosine, 5-methyl-2-thiouracil, 2-thiouracil, 4-thiouracil, 5-methyluracil, uracil-5-oxyacetic acid methylester, uracil-5-oxyacetic acid (v), 5-methyl-2-thiouracil, 3-(3-amino-3-N-2-carboxypropyl)uracil, (acp3)w, and 2,6-diaminopurine. Alternatively, the antisense nucleic acid can be produced biologically using an expression vector into which a nucleic acid has been subcloned in an antisense orientation (i.e., RNA transcribed from the inserted nucleic acid will be of an antisense orientation to a target nucleic acid of interest, described further in the following subsection).

[0626] In yet another embodiment, the antisense nucleic acid molecule of the invention is an alpha-anomeric nucleic acid molecule. An alpha-anomeric nucleic acid molecule forms specific double-stranded hybrids with complementary RNA in which, contrary to the usual b-units, the strands run parallel to each other (Gaultier et al., 1987, Nucleic Acids. Res. 15:6625-6641). The antisense nucleic acid molecule can also comprise a 2′-o-methylribonucleotide (Inoue et al., 1987, Nucleic Acids Res. 15:6131-6148) or a chimeric RNA-DNA analogue (Inoue et al., 1987, FEBS Lett. 215:327-330).

[0627] The antisense nucleic acid molecules of the invention are typically administered to a cell or generated in situ such that they hybridize with or bind to cellular mRNA and/or genomic DNA. The hybridization can be by conventional nucleotide complementarity to form a stable duplex, or, for example, in the case of an antisense nucleic acid molecule which binds to DNA duplexes, through specific interactions in the major groove of the double helix. The antisense molecule can be modified such that it specifically binds to a receptor or an antigen expressed on a selected cell surface, e.g., by linking the antisense nucleic acid molecule to a peptide or an antibody which binds to a cell surface receptor or antigen. The antisense nucleic acid molecule can also be delivered to cells using the vectors described herein. To achieve sufficient intracellular concentrations of the antisense molecules, vector constructs in which the antisense nucleic acid molecule is placed under the control of a strong prokaryotic, viral, or eukaryotic (including plant) promoter are preferred.

[0628] As an alternative to antisense polynucleotides, ribozymes, sense polynucleotides, or double stranded RNA (dsRNA) can be used to reduce expression of a BSRP polypeptide. By “ribozyme” is meant a catalytic RNA-based enzyme with ribonuclease activity which is capable of cleaving a single-stranded nucleic acid, such as an mRNA, to which it has a complementary region. Ribozymes (e.g., hammerhead ribozymes described in Haselhoff and Gerlach, 1988, Nature 334:585-591) can be used to catalytically cleave BSRP mRNA transcripts to thereby inhibit translation of BSRP mRNA. A ribozyme having specificity for a BSRP-encoding nucleic acid can be designed based upon the nucleotide sequence of a BSRP cDNA, as disclosed herein or on the basis of a heterologous sequence to be isolated according to methods taught in this invention. For example, a derivative of a Tetrahymena L-19 IVS RNA can be constructed in which the nucleotide sequence of the active site is complementary to the nucleotide sequence to be cleaved in a BSRP-encoding mRNA. See, e.g., U.S. Pat. Nos. 4,987,071 and 5,116,742 to Cech et al. Alternatively, BSRP mRNA can be used to select a catalytic RNA having a specific ribonuclease activity from a pool of RNA molecules. See, e.g., Bartel, D. and Szostak, J. W., 1993, Science 261:1411-1418. In preferred embodiments, the ribozyme will contain a portion having at least 7, 8, 9, 10, 12, 14, 16, 18 or 20 nucleotides, and more preferably 7 or 8 nucleotides, that have 100% complementarity to a portion of the target RNA. Methods for making ribozymes are known to those skilled in the art. See, e.g., U.S. Pat. Nos. 6,025,167; 5,773,260; and 5,496,698.

[0629] The term “dsRNA,” as used herein, refers to RNA hybrids comprising two strands of RNA. The dsRNAs can be linear or circular in structure. In a preferred embodiment, dsRNA is specific for a polynucleotide encoding either the polypeptide according to table II or a polypeptide having at least 70% sequence identity with a polypeptide according to table II. The hybridizing RNAs may be substantially or completely complementary. By “substantially complementary,” is meant that when the two hybridizing RNAs are optimally aligned using the BLAST program as described above, the hybridizing portions are at least 95% complementary. Preferably, the dsRNA will be at least 100 base pairs in length. Typically, the hybridizing RNAs will be of identical length with no over hanging 5′ or 3′ ends and no gaps. However, dsRNAs having 5′ or 3′ overhangs of up to 100 nucleotides may be used in the methods of the invention.

[0630] The dsRNA may comprise ribonucleotides or ribonucleotide analogs, such as 2′-O-methyl ribosyl residues, or combinations thereof. See, e.g., U.S. Pat. Nos. 4,130,641 and 4,024,222. A dsRNA polyriboinosinic acid:polyribocytidylic acid is described in U.S. Pat. No. 4,283,393. Methods for making and using dsRNA are known in the art. One method comprises the simultaneous transcription of two complementary DNA strands, either in vivo, or in a single in vitro reaction mixture. See, e.g., U.S. Pat. No. 5,795,715. In one embodiment, dsRNA can be introduced into a plant or plant cell directly by standard transformation procedures. Alternatively, dsRNA can be expressed in a plant cell by transcribing two complementary RNAs.

[0631] Other methods for the inhibition of endogenous gene expression, such as triple helix formation (Moser et al., 1987, Science 238:645-650 and Cooney et al., 1988, Science 241:456-459) and cosuppression (Napoli et al., 1990, The Plant Cell 2:279-289) are known in the art. Partial and full-length cDNAs have been used for the cosuppression of endogenous plant genes. See, e.g., U.S. Pat. Nos. 4,801,340, 5,034,323, 5,231,020, and 5,283,184; Van der Kroll et al., 1990, The Plant Cell 2:291-299; Smith et al., 1990, Mol. Gen. Genetics 224:477-481 and Napoli et al., 1990, The Plant Cell 2:279-289.

[0632] For sense suppression, it is believed that introduction of a sense polynucleotide blocks transcription of the corresponding target gene. The sense polynucleotide will have at least 65% sequence identity with the target plant gene or RNA. Preferably, the percent identity is at least 80%, 90%, 95% or more. The introduced sense polynucleotide need not be full length relative to the target gene or transcript. Preferably, the sense polynucleotide will have at least 65% sequence identity with at least 100 consecutive nucleotides of one of the nucleic acids as depicted in Table I. The regions of identity can comprise introns and/or exons and untranslated regions. The introduced sense polynucleotide may be present in the plant cell transiently, or may be stably integrated into a plant chromosome or extrachromosomal replicon.

[0633] Further, object of the invention is an expression vector comprising a nucleic acid molecule comprising a nucleic acid molecule selected from the group consisting of:
[0634] a) a nucleic acid molecule encoding the polypeptide shown in column 5 or 7 of Table II;
[0635] b) a nucleic acid molecule shown in column 5 or 7 of Table I;
[0636] c) a nucleic acid molecule, which, as a result of the degeneracy of the genetic code, can be derived from a polypeptide sequence depicted in column 5 or 7 of Table II and confers an increased resistance to biotic stress, preferably pathogenic fungi as compared to a corresponding non-transformed wild type control plant cell, a plant or a part thereof;
[0637] d) a nucleic acid molecule having at least 30% identity with the nucleic acid molecule sequence of a polynucleotide comprising the nucleic acid molecule shown in column 5 or 7 of Table I and confers an increased resistance to biotic stress, preferably pathogenic fungi as compared to a corresponding non-transformed wild type control plant cell, a plant or a part thereof;
[0638] e) a nucleic acid molecule encoding a polypeptide having at least 30% identity with the amino acid sequence of the polypeptide encoded by the nucleic acid molecule of (a) to (c) and having the activity represented by a polypeptide comprising a polypeptide as depicted in column 5 of Table I and confers an increased resistance to biotic stress, preferably pathogenic fungi as compared to a corresponding non-transformed wild type control plant cell, a plant or a part thereof;
[0639] f) nucleic acid molecule which hybridizes with a nucleic acid molecule of (a) to (c) under stringent hybridization conditions and confers an increased resistance to biotic stress, preferably pathogenic fungi as compared to a corresponding non-transformed wild type control plant cell, a plant or a part thereof;
[0640] g) a nucleic acid molecule encoding a polypeptide which can be isolated with the aid of monoclonal or polyclonal antibodies made against a polypeptide encoded by one of the nucleic acid molecules of (a) to (e) and having the activity represented by the nucleic acid molecule comprising a polynucleotide as depicted in column 5 of Table I;
[0641] h) a nucleic acid molecule encoding a polypeptide comprising the consensus sequence or one or more polypeptide motifs as shown in column 7 of Table IV and preferably having the activity represented by polypeptide comprising a polypeptide as depicted in column 5 of Table II or IV;
[0642] h) a nucleic acid molecule encoding a polypeptide having the activity represented by a protein as depicted in column 5 of Table II and confers an increased resistance to biotic stress, preferably pathogenic fungi as compared to a corresponding non-transformed wild type control plant cell, a plant or a part thereof;
[0643] i) nucleic acid molecule which comprises a polynucleotide, which is obtained by amplifying a cDNA library or a genomic library using the primers in column 7 of Table III and preferably having the activity represented by a polypeptide comprising a polypeptide as depicted in column 5 of Table II or IV;
[0644] and
[0645] j) a nucleic acid molecule which is obtainable by screening a suitable nucleic acid library under stringent hybridization conditions with a probe comprising a complementary sequence of a nucleic acid molecule of (a) or (b) or with a fragment thereof, having at least 15 nt, preferably 20 nt, 30 nt, 50 nt, 100 nt, 200 nt or 500 nt of a nucleic acid molecule complementary to a nucleic acid molecule sequence characterized in (a) to (e) and encoding a polypeptide having the activity represented by a protein comprising a polypeptide as depicted in column 5 of Table II,
   whereby the nucleic acid molecule according to (a) to (j) is at least in one or more nucleotides, preferably different from the sequence depicted in column 5 or 7 of Table I A and preferably which encodes a protein which preferably differs at least in one or more amino acids from the protein sequences depicted in column 5 or 7 of Table II A.

[0646] The invention further provides an isolated recombinant expression vector comprising a stress related protein encoding nucleic acid as described above, wherein expression of the vector or stress related protein encoding nucleic acid, respectively in a host cell results in increased tolerance and/or resistance to stress, preferably plant disease, preferably caused by pathogenic fungi as compared to the corresponding non-transformed wild type of the host cell. As used herein, the term “vector” refers to a nucleic acid molecule capable of transporting another nucleic acid to which it has been linked. One type of vector is a “plasmid”, which refers to a circular double stranded DNA loop into which additional DNA segments can be ligated. Another type of vector is a viral vector, wherein additional DNA segments can be ligated into the viral genome. Further types of vectors can be linearized nucleic acid sequences, such as transposons, which are pieces of DNA which can copy and insert themselves. There have been 2 types of transposons found: simple transposons, known as Insertion Sequences and composite transposons, which can have several genes as well as the genes that are required for transposition.

[0647] Certain vectors are capable of autonomous replication in a host cell into which they are introduced (e.g., bacterial vectors having a bacterial origin of replication and episomal mammalian vectors). Other vectors (e.g., non-episomal mammalian vectors) are integrated into the genome of a host cell upon introduction into the host cell, and thereby are replicated along with the host genome. Moreover, certain vectors are capable of directing the expression of genes to which they are operatively linked. Such vectors are referred to herein as “expression vectors”. In general, expression vectors of utility in recombinant DNA techniques are often in the form of plasmids. In the present specification, “plasmid” and “vector” can be used interchangeably as the plasmid is the most commonly used form of vector. However, the invention is intended to include such other forms of expression vectors, such as viral vectors (e.g., replication defective retroviruses, adenoviruses and adeno-associated viruses), which serve equivalent functions.

[0648] A plant expression cassette preferably contains regulatory sequences capable of driving gene expression in plant cells and operably linked so that each sequence can fulfill its function, for example, termination of transcription by polyadenylation signals. Preferred polyadenylation signals are those originating from Agrobacterium tumefaciens T-DNA such as the gene 3 known as octopine synthase of the Ti-plasmid pTiACH5 (Gielen et al., 1984 EMBO J. 3:835) or functional equivalents thereof but also all other terminators functionally active in plants are suitable.

[0649] As plant gene expression is very often not limited on transcriptional levels, a plant expression cassette preferably contains other operably linked sequences like translational enhancers such as the overdrive-sequence containing the 5″-untranslated leader sequence from tobacco mosaic virus enhancing the protein per RNA ratio (Gallie et al., 1987 Nucl. Acids Research 15:8693-8711).

[0650] Plant gene expression has to be operably linked to an appropriate promoter conferring gene expression in a timely, cell or tissue specific manner. Preferred are promoters driving constitutive expression (Benfey et al., 1989 EMBO J. 8:2195-2202) like those derived from plant viruses like the 35S CaMV (Franck et al., 1980 Cell 21:285-294), the 19S CaMV (see also U.S. Pat. No. 5,352,605 and PCT Application No. WO 8402913) or plant promoters like those from Rubisco small subunit described in U.S. Pat. No. 4,962,028.

[0651] Additional advantageous regulatory sequences are, for example, included in the plant promoters such as CaMV/35S [Franck et al., Cell 21 (1980) 285-294], PRP1 [Ward et al., Plant. Mol. Biol. 22 (1993)], SSU, OCS, lib4, usp, STLS1, B33, LEB4, nos or in the ubiquitin, napin or phaseolin promoter. Also advantageous in this connection are inducible promoters such as the promoters described in EP-A-0 388 186 (benzyl sulfonamide inducible), Plant J. 2, 1992: 397-404 (Gatz et al., Tetracyclin inducible), EP-A-0 335 528 (abscisic acid inducible) or WO 93/21334 (ethanol or cyclohexenol inducible). Additional useful plant promoters are the cytosolic FBPase promotor or ST-LSI promoter of the potato (Stockhaus et al., EMBO J. 8, 1989, 2445), the phosphorybosyl phyrophoshate amido transferase promoter of Glycine max (gene bank accession No. U87999) or the noden specific promoter described in EP-A-0 249 676. Additional particularly advantageous promoters are seed specific promoters which can be used for monokotyledones or dikotyledones and are described in U.S. Pat. No. 5,608,152 (napin promoter from rapeseed), WO 98/45461 (phaseolin promoter from Arobidopsis), U.S. Pat. No. 5,504,200 (phaseolin promoter from Phaseolus vulgaris), WO 91/13980 (Bce4 promoter from Brassica) and Baeumlein et al., Plant J., 2, 2, 1992: 233-239 (LEB4 promoter from leguminosa). Said promoters are useful in dikotyledones. The following promoters are useful for example in monokotyledones Ipt-2- or Ipt-1-promoter from barley (WO 95/15389 and WO 95/23230) or hordein promoter from barley. Other useful promoters are described in WO 99/16890.

[0652] It is possible in principle to use all natural promoters with their regulatory sequences like those mentioned above for the novel process. It is also possible and advantageous in addition to use synthetic promoters.

[0653] The gene construct may also comprise further genes which are to be inserted into the organisms and which are for example involved in stress resistance increase. These genes can be heterologous or homologous in origin. The inserted genes may have their own promoter or else be under the control of same promoter as the sequences of the nucleic acid of table I or their homologs.

[0654] The gene construct advantageously comprises, for expression of the other genes present, additionally 3′ and/or 5′ terminal regulatory sequences to enhance expression, which are selected for optimal expression depending on the selected host organism and gene or genes.

[0655] These regulatory sequences are intended to make specific expression of the genes and protein expression possible as mentioned above. This may mean, depending on the host organism, for example that the gene is expressed or overexpressed only after induction, or that it is immediately expressed and/or overexpressed.

[0656] The regulatory sequences or factors may moreover preferably have a beneficial effect on expression of the introduced genes, and thus increase it. It is possible in this way for the regulatory elements to be enhanced advantageously at the transcription level by using strong transcription signals such as promoters and/or enhancers. However, in addition, it is also possible to enhance translation by, for example, improving the stability of the mRNA.

[0657] Other preferred sequences for use in plant gene expression cassettes are targeting-sequences necessary to direct the gene product in its appropriate cell compartment (for review see Kermode, 1996 Crit. Rev. Plant Sci. 15(4):285-423 and references cited therein) such as the vacuole, the nucleus, all types of plastids like amyloplasts, chloroplasts, chromoplasts, the extracellular space, mitochondria, the endoplasmic reticulum, oil bodies, peroxisomes and other compartments of plant cells.

[0658] Plant gene expression can also be facilitated via an inducible promoter (for review see Gatz, 1997 Annu. Rev. Plant Physiol. Plant Mol. Biol. 48:89-108). Chemically inducible promoters are especially suitable if gene expression is wanted to occur in a time specific manner.

[0659] Table 1 lists several examples of promoters that may be used to regulate transcription of the stress related protein nucleic acid coding sequences.

TABLE 1
Examples of tissue-specific and stress-inducible promoters in plants

| Expression | Reference |
|---|---|
| Cor78 - Cold, drought, salt, | Ishitani, et al., Plant Cell 9: 1935-1949 (1997). |
| ABA, wounding-inducible | Yamaguchi-Shinozaki and Shinozaki, Plant Cell |
| | 6: 251-264 (1994). |
| Rci2A - Cold, dehydration-inducible | Capel et al., Plant Physiol 115: 569-576 (1997) |
| Rd22 - Drought, salt | Yamaguchi-Shinozaki and Shinozaki, Mol Gen |
| | Genet 238: 17-25 (1993). |
| Cor15A - Cold, dehydration, ABA | Baker et al., Plant Mol. Biol. 24: 701-713 (1994). |
| GH3 - Auxin inducible | Liu et al., Plant Cell 6: 645-657 (1994) |
| ARSK1 - Root, salt inducible | Hwang and Goodman, Plant J 8: 37-43 (1995). |
| PtxA - Root, salt inducible | GenBank accession X67427 |
| SbHRGP3 - Root specific | Ahn et al., Plant Cell 8: 1477-1490 (1998). |
| KST1 - Guard cell specific | Plesch et al., Plant Journal. 28(4): 455-64, (2001) |
| KAT1 - Guard cell specific | Plesch et al., Gene 249: 83-89 (2000) |
| | Nakamura et al., Plant Physiol. 109: 371-374 (1995) |
| salicylic acid inducible | PCT Application No. WO 95/19443 |
| tetracycline inducible | Gatz et al. Plant J. 2: 397-404 (1992) |
| Ethanol inducible | PCT Application No. WO 93/21334 |
| pathogen inducible PRP1 | Ward et al., 1993 Plant. Mol. Biol. 22: 361-366 |
| heat inducible hsp80 | U.S. Pat. No. 5,187,267 |
| cold inducible alpha-amylase | PCT Application No. WO 96/12814 |
| Wound-inducible pinll | European Patent No. 375091 |
| RD29A - salt-inducible | Yamaguchi-Shinozalei et al. (1993) Mol. Gen. Genet. |
| | 236: 331-340 |
| plastid-specific viral RNA- | PCT Application No. WO 95/16783 and. WO |
| polymerase | 97/06250 |

[0660] Other promotors, e.g. superpromotor (Ni et al., Plant Journal 7, 1995: 661-676), Ubiquitin promotor (Callis et al., J. Biol. Chem., 1990, 265: 12486-12493; U.S. Pat. No. 5,510,474; U.S. Pat. No. 6,020,190; Kawalleck et al., Plant. Molecular Biology, 1993, 21: 673-684) or 34S promotor (GenBank Accession numbers M59930 and X16673) were similar useful for the present invention and are known to a person skilled in the art.

[0661] Developmental stage-preferred promoters are preferentially expressed at certain stages of development. Tissue and organ preferred promoters include those that are preferentially expressed in certain tissues or organs, such as leaves, roots, seeds, or xylem. Examples of tissue preferred and organ preferred promoters include, but are not limited to fruit-preferred, ovule-preferred, male tissue-preferred, seed-preferred, integument-preferred, tuber-preferred, stalk-preferred, pericarp-preferred, and leaf-preferred, stigma-preferred, pollen-preferred, anther-preferred, a petal-preferred, sepal-preferred, pedicel-preferred, silique-preferred, stem-preferred, root-preferred promoters, and the like. Seed preferred promoters are preferentially expressed during seed development and/or germination. For example, seed preferred promoters can be embryo-preferred, endosperm preferred, and seed coat-preferred. See Thompson et al., 1989, BioEssays 10:108. Examples of seed preferred promoters include, but are not limited to, cellulose synthase (celA), Cim1, gamma-zein, globulin-1, maize 19 kD zein (cZ19B1), and the like.

[0662] Other promoters useful in the expression cassettes of the invention include, but are not limited to, the major chlorophyll a/b binding protein promoter, histone promoters, the Ap3 promoter, the β-conglycin promoter, the napin promoter, the soybean lectin promoter, the maize 15 kD zein promoter, the 22 kD zein promoter, the 27 kD zein promoter, the g-zein promoter, the waxy, shrunken 1, shrunken 2 and bronze promoters, the Zm13 promoter (U.S. Pat. No. 5,086,169), the maize polygalacturonase promoters (PG) (U.S. Pat. Nos. 5,412,085 and 5,545,546), and the SGB6 promoter (U.S. Pat. No. 5,470,359), as well as synthetic or other natural promoters.

[0663] Additional flexibility in controlling heterologous gene expression in plants may be obtained by using DNA binding domains and response elements from heterologous sources (i.e., DNA binding domains from non-plant sources). An example of such a heterologous DNA binding domain is the LexA DNA binding domain (Brent and Ptashne, 1985, Cell 43:729-736).

[0664] The invention further provides a recombinant expression vector comprising a BSRP DNA molecule of the invention cloned into the expression vector in an antisense orientation. That is, the DNA molecule is operatively linked to a regulatory sequence in a manner that allows for expression (by transcription of the DNA molecule) of an RNA molecule that is antisense to a BSRP mRNA. Regulatory sequences operatively linked to a nucleic acid molecule cloned in the antisense orientation can be chosen which direct the continuous expression of the antisense RNA molecule in a variety of cell types. For instance, viral promoters and/or enhancers, or regulatory sequences can be chosen which direct constitutive, tissue specific, or cell type specific expression of antisense RNA. The antisense expression vector can be in the form of a recombinant plasmid, phagemid, or attenuated virus wherein antisense nucleic acids are produced under the control of a high efficiency regulatory region. The activity of the regulatory region can be determined by the cell type into which the vector is introduced. For a discussion of the regulation of gene expression using antisense genes, see Weintraub, H. et al., 1986, Antisense RNA as a molecular tool for genetic analysis, Reviews—Trends in Genetics, Vol. 1(1), and Mol et al., 1990, FEBS Letters 268:427-430.

[0665] Another aspect of the invention pertains to isolated BSRP, and biologically active portions thereof. An “isolated” or “purified” polypeptide or biologically active portion thereof is free of some of the cellular material when produced by recombinant DNA techniques, or chemical precursors or other chemicals when chemically synthesized. The language “substantially free of cellular material” includes preparations of BSRP in which the polypeptide is separated from some of the cellular components of the cells in which it is naturally or recombinantly produced. In one embodiment, the language “substantially free of cellular material” includes preparations of a BSRP having less than about 30% (by dry weight) of non-BSRP material (also referred to herein as a “contaminating polypeptide”), more preferably less than about 20% of non-BSRP material, still more preferably less than about 10% of non-BSRP material, and most preferably less than about 5% non-BSRP material.

[0666] When the BSRP or biologically active portion thereof is recombinantly produced, it is also preferably substantially free of culture medium, i.e., culture medium represents less than about 20%, more preferably less than about 10%, and most preferably less than about 5% of the volume of the polypeptide preparation. The language “substantially free of chemical precursors or other chemicals” includes preparations of BSRP in which the polypeptide is separated from chemical precursors or other chemicals that are involved in the synthesis of the polypeptide. In one embodiment, the language “substantially free of chemical precursors or other chemicals” includes preparations of a BSRP having less than about 30% (by dry weight) of chemical precursors or non-BSRP chemicals, more preferably less than about 20% chemical precursors or non-BSRP chemicals, still more preferably less than about 10% chemical precursors or non-BSRP chemicals, and most preferably less than about 5% chemical precursors or non-BSRP chemicals. In preferred embodiments, isolated polypeptides, or biologically active portions thereof, lack contaminating polypeptides from the same organism from which the BSRP is derived. Typically, such polypeptides are produced by recombinant expression of, for example, a Saccharomyces cerevisiae, E. coli or Brassica napus, Glycine max, Zea mays or Oryza sativa BSRP in plants other than Saccharomyces cerevisiae, E. coli, or microorganisms such as C. glutamicum, ciliates, algae or fungi.

[0667] The nucleic acid molecules, polypeptides, polypeptide homologs, fusion polypeptides, primers, vectors, and host cells described herein can be used in one or more of the following methods: identification of Saccharomyces cerevisiae, E. coli or Brassica napus, Glycine max, Zea mays or Oryza sativa and related organisms; mapping of genomes of organisms related to Saccharomyces cerevisiae, E. coli; identification and localization of Saccharomyces cerevisiae, E. coli or Brassica napus, Glycine max, Zea mays or Oryza sativa sequences of interest; evolutionary studies; determination of BSRP regions required for function; modulation of a BSRP activity; modulation of the metabolism of one or more cell functions; modulation of the transmembrane transport of one or more compounds; modulation of stress resistance; and modulation of expression of BSRP nucleic acids.

[0668] The BSRP nucleic acid molecules of the invention are also useful for evolutionary and polypeptide structural studies. The metabolic and transport processes in which the molecules of the invention participate are utilized by a wide variety of prokaryotic and eukaryotic cells; by comparing the sequences of the nucleic acid molecules of the present invention to those encoding similar enzymes from other organisms, the evolutionary relatedness of the organisms can be assessed. Similarly, such a comparison permits an assessment of which regions of the sequence are conserved and which are not, which may aid in determining those regions of the polypeptide that are essential for the functioning of the enzyme. This type of determination is of value for polypeptide engineering studies and may give an indication of what the polypeptide can tolerate in terms of mutagenesis without losing function.

[0669] Manipulation of the BSRP nucleic acid molecules of the invention may result in the production of BSRP having functional differences from the wild-type BSRP. These polypeptides may be improved in efficiency or activity, may be present in greater numbers in the cell than is usual, or may be decreased in efficiency or activity.

[0670] There are a number of mechanisms by which the alteration of a BSRP of the invention may directly affect stress response and/or stress tolerance. In the case of plants expressing BSRP, increased transport can lead to improved salt and/or solute partitioning within the plant tissue and organs. By either increasing the number or the activity of transporter molecules which exportionic molecules from the cell, it may be possible to affect the salt and cold tolerance of the cell.

[0671] The effect of the genetic modification in plants, on stress tolerance can be assessed by growing the modified plant under less than suitable conditions and then analyzing the growth characteristics and/or metabolism of the plant. Such analysis techniques are well known to one skilled in the art, and include dry weight, wet weight, polypeptide synthesis, carbohydrate synthesis, lipid synthesis, evapotranspiration rates, general plant and/or crop yield, flowering, reproduction, seed setting, root growth, respiration rates, photosynthesis rates, etc. (Applications of HPLC in Biochemistry in: Laboratory Techniques in Biochemistry and Molecular Biology, vol. 17; Rehm et al., 1993 Biotechnology, vol. 3, Chapter III: Product recovery and purification, page 469-714, VCH: Weinheim; Belter, P. A. et al., 1988, Bioseparations: downstream processing for biotechnology, John Wiley and Sons; Kennedy, J. F. and Cabral, J. M. S., 1992, Recovery processes for biological materials, John Wiley and Sons; Shaeiwitz, J. A. and Henry, J. D., 1988, Biochemical separations, in: Ulmann's Encyclopedia of Industrial Chemistry, vol. B3, Chapter 11, page 1-27, VCH: Weinheim; and Dechow, F. J., 1989, Separation and purification techniques in biotechnology, Noyes Publications).

[0672] For example, yeast expression vectors comprising the nucleic acids disclosed herein, or fragments thereof, can be constructed and transformed into Saccharomyces cerevisiae using standard protocols. The resulting transgenic cells can then be assayed for fail or alteration of their tolerance to biotic stress, preferably caused by plant disease, preferably by pathogenic fungi or drought, salt, and cold stress. Similarly, plant expression vectors comprising the nucleic acids disclosed herein, or fragments thereof, can be constructed and transformed into an appropriate plant cell such as Arabidopsis, soy, rape, maize, cotton, rice, wheat, Medicago truncatula, etc., using standard protocols. The resulting transgenic cells and/or plants derived therefrom can then be assayed for fail or alteration of their tolerance to biotic stress, preferably caused by plant disease, preferably by pathogenic or drought, salt, cold stress.

[0673] The engineering of one or more genes according to table I and coding for the BSRP of table II of the invention may also result in BSRP having altered activities which indirectly impact the stress response and/or stress tolerance of algae, plants, ciliates, or fungi, or other microorganisms like C. glutamicum.

[0674] Additionally, the sequences disclosed herein, or fragments thereof, can be used to generate knockout mutations in the genomes of various organisms, such as bacteria, mammalian cells, yeast cells, and plant cells (Girke, T., 1998, The Plant Journal 15:39-48). The resultant knockout cells can then be evaluated for their ability or capacity to tolerate various stress conditions, their response to various stress conditions, and the effect on the phenotype and/or genotype of the mutation. For other methods of gene inactivation, see U.S. Pat. No. 6,004,804 “Non-Chimeric Mutational Vectors” and Puttaraju et al., 1999, Spliceosome-mediated RNA trans-splicing as a tool for gene therapy, Nature Biotechnology 17:246-252.

[0675] The aforementioned mutagenesis strategies for BSRP resulting in increased stress resistance are not meant to be limiting; variations on these strategies will be readily apparent to one skilled in the art. Using such strategies, and incorporating the mechanisms disclosed herein, the nucleic acid and polypeptide molecules of the invention may be utilized to generate algae, ciliates, plants, fungi, or other microorganisms like C. glutamicum expressing mutated BSRP nucleic acid and polypeptide molecules such that the stress tolerance is improved.

[0676] The present invention also provides antibodies that specifically bind to a BSRP, or a portion thereof, as encoded by a nucleic acid described herein. Antibodies can be made by many well-known methods (See, e.g. Harlow and Lane, “Antibodies; A Laboratory Manual,” Cold Spring Harbor Laboratory, Cold Spring Harbor, N.Y., (1988)). Briefly, purified antigen can be injected into an animal in an amount and in intervals sufficient to elicit an immune response. Antibodies can either be purified directly, or spleen cells can be obtained from the animal. The cells can then fused with an immortal cell line and screened for antibody secretion. The antibodies can be used to screen nucleic acid clone libraries for cells secreting the antigen. Those positive clones can then be sequenced. See, for example, Kelly et al., 1992, Bio/Technology 10:163-167; Bebbington et al., 1992, Bio/Technology 10:169-175.

[0677] The phrases “selectively binds” and “specifically binds” with the polypeptide refer to a binding reaction that is determinative of the presence of the polypeptide in a heterogeneous population of polypeptides and other biologics. Thus, under designated immunoassay conditions, the specified antibodies bound to a particular polypeptide do not bind in a significant amount to other polypeptides present in the sample. Selective binding of an antibody under such conditions may require an antibody that is selected for its specificity for a particular polypeptide. A variety of immunoassay formats may be used to select antibodies that selectively bind with a particular polypeptide. For example, solid-phase ELISA immunoassays are routinely used to select antibodies selectively immunoreactive with a polypeptide. See Harlow and Lane, “Antibodies, A Laboratory Manual,” Cold Spring Harbor Publications, New York, (1988), for a description of immunoassay formats and conditions that could be used to determine selective binding.

[0678] In some instances, it is desirable to prepare monoclonal antibodies from various hosts. A description of techniques for preparing such monoclonal antibodies may be found in Stites et al., eds., “Basic and Clinical Immunology,” (Lange Medical Publications, Los Altos, Calif., Fourth Edition) and references cited therein, and in Harlow and Lane, “Antibodies, A Laboratory Manual,” Cold Spring Harbor Publications, New York, (1988).

[0679] Gene expression in plants is regulated by the interaction of protein transcription factors with specific nucleotide sequences within the regulatory region of a gene. One example of transcription factors are polypeptides that contain zinc finger (ZF) motifs. Each ZF module is approximately 30 amino acids long folded around a zinc ion. The DNA recognition domain of a ZF protein is a α-helical structure that inserts into the major grove of the DNA double helix. The module contains three amino acids that bind to the DNA with each amino acid contacting a single base pair in the target DNA sequence. ZF motifs are arranged in a modular repeating fashion to form a set of fingers that recognize a contiguous DNA sequence. For example, a three-fingered ZF motif will recognize 9 bp of DNA. Hundreds of proteins have been shown to contain ZF motifs with between 2 and 37 ZF modules in each protein (Isalan M, et al., 1998 Biochemistry 37(35):12026-33; Moore M, et al., 2001 Proc. Natl. Acad. Sci. USA 98(4):1432-1436 and 1437-1441; U.S. Pat. No. 6,007,988 and U.S. Pat. No. 6,013,453).

[0680] The regulatory region of a plant gene contains many short DNA sequences (cis-acting elements) that serve as recognition domains for transcription factors, including ZF proteins. Similar recognition domains in different genes allow the coordinate expression of several genes encoding enzymes in a metabolic pathway by common transcription factors. Variation in the recognition domains among members of a gene family facilitates differences in gene expression within the same gene family, for example, among tissues and stages of development and in response to environmental conditions.

[0681] Typical ZF proteins contain not only a DNA recognition domain but also a functional domain that enables the ZF protein to activate or repress transcription of a specific gene. Experimentally, an activation domain has been used to activate transcription of the target gene (U.S. Pat. No. 5,789,538 and patent application WO9519431), but it is also possible to link a transcription repressor domain to the ZF and thereby inhibit transcription (patent applications WO00/47754 and WO2001002019). It has been reported that an enzymatic function such as nucleic acid cleavage can be linked to the ZF (patent application WO00/20622)

[0682] The invention provides a method that allows one skilled in the art to isolate the regulatory region of one or more stress related protein encoding genes from the genome of a plant cell and to design zinc finger transcription factors linked to a functional domain that will interact with the regulatory region of the gene. The interaction of the zinc finger protein with the plant gene can be designed in such a manner as to alter expression of the gene and preferably thereby to confer increased biotic stress resistance and preferably a further yield related trait.

[0683] In particular, the invention provides a method of producing a transgenic plant with a stress related protein coding nucleic acid, wherein expression of the nucleic acid(s) in the plant results in increased tolerance to environmental stress as compared to a wild type plant comprising: (a) transforming a plant cell with an expression vector comprising a stress related protein encoding nucleic acid, and (b) generating from the plant cell a transgenic plant with an increased tolerance to environmental stress as compared to a wild type plant. For such plant transformation, binary vectors such as pBinAR can be used (Höfgen and Willmitzer, 1990 Plant Science 66:221-230). Moreover suitable binary vectors are for example pBIN19, pBI101, pGPTV or pPZP (Hajukiewicz, P. et al., 1994, Plant Mol. Biol., 25: 989-994).

[0684] Construction of the binary vectors can be performed by ligation of the cDNA into the T-DNA. 5′ to the cDNA a plant promoter activates transcription of the cDNA. A polyadenylation sequence is located 3′ to the cDNA. Tissue-specific expression can be achieved by using a tissue specific promoter as listed above. Also, any other promoter element can be used. For constitutive expression within the whole plant, the CaMV 35S promoter can be used. The expressed protein can be targeted to a cellular compartment using a signal peptide, for example for plastids, mitochondria or endoplasmic reticulum (Kermode, 1996 Crit. Rev. Plant Sci. 4(15):285-423). The signal peptide is cloned 5′ in frame to the cDNA to archive subcellular localization of the fusion protein. Additionally, promoters that are responsive to abiotic stresses can be used with, such as the Arabidopsis promoter RD29A. One skilled in the art will recognize that the promoter used should be operatively linked to the nucleic acid such that the promoter causes transcription of the nucleic acid which results in the synthesis of a mRNA which encodes a polypeptide.

[0685] Alternate methods of transfection include the direct transfer of DNA into developing flowers via electroporation or Agrobacterium mediated gene transfer. Agrobacterium mediated plant transformation can be performed using for example the GV3101(pMP90) (Koncz and Schell, 1986 Mol. Gen. Genet. 204:383-396) or LBA4404 (Ooms et al., Plasmid, 1982, 7: 15-29; Hoekema et al., Nature, 1983, 303: 179-180) Agrobacterium tumefaciens strain. Transformation can be performed by standard trans-formation and regeneration techniques (Deblaere et al., 1994 Nucl. Acids. Res. 13:4777-4788; Gelvin and Schilperoort, Plant Molecular Biology Manual, 2nd Ed.—Dordrecht: Kluwer Academic Publ., 1995.—in Sect., Ringbuc Zentrale Signatur: BT11-P ISBN 0-7923-2731-4; Glick, B R and Thompson, J E, Methods in Plant Molecular Biology and Biotechnology, Boca Raton: CRC Press, 1993.-360 S., ISBN 0-8493-5164-2). For example, rapeseed can be transformed via cotyledon or hypocotyl trans-formation (Moloney et al., 1989 Plant Cell Reports 8:238-242; De Block et al., 1989 Plant Physiol. 91:694-701). Use of antibiotics for Agrobacterium and plant selection depends on the binary vector and the Agrobacterium strain used for transformation. Rapeseed selection is normally performed using kanamycin as selectable plant marker. Agrobacterium mediated gene transfer to flax can be performed using, for example, a technique described by Mlynarova et al., 1994 Plant Cell Report 13:282-285. Additionally, transformation of soybean can be performed using for example a technique described in European Patent No. 0424 047, U.S. Pat. No. 5,322,783, European Patent No. 0397 687, U.S. Pat. No. 5,376,543 or U.S. Pat. No. 5,169,770. Transformation of maize can be achieved by particle bombardment, polyethylene glycol mediated DNA uptake or via the silicon carbide fiber technique (see, for example, Freeling and Walbot “The maize handbook” Springer Verlag: New York (1993) ISBN 3-540-97826-7). A specific example of maize transformation is found in U.S. Pat. No. 5,990,387 and a specific example of wheat transformation can be found in PCT Application No. WO 93/07256.

[0686] Growing the modified plants under stress conditions and then screening and analyzing the growth characteristics and/or metabolic activity assess the effect of the genetic modification in plants on increased biotic stress resistance and preferably a further yield related trait. Such analysis techniques are well known to one skilled in the art. They include next to screening (Römpp Lexikon Biotechnologie, Stuttgart/New York: Georg Thieme Verlag 1992, “screening” p. 701) dry weight, wet weight, protein synthesis, carbohydrate synthesis, lipid synthesis, evapotranspiration rates, general plant and/or crop yield, flowering, reproduction, seed setting, root growth, respiration rates, photosynthesis rates, etc. (Applications of HPLC in Biochemistry in: Laboratory Techniques in Biochemistry and Molecular Biology, vol. 17; Rehm et al., 1993 Biotechnology, vol. 3, Chapter III: Product recovery and purification, page 469-714, VCH: Weinheim; Better, P. A. et al., 1988 Bioseparations: downstream processing for biotechnology, John Wiley and Sons; Kennedy, J. F. and Cabral, J. M. S., 1992 Recovery processes for biological materials, John Wiley and Sons; Shaeiwitz, J. A. and Henry, J. D., 1988 Biochemical separations, in: Ulmann's Encyclopedia of Industrial Chemistry, vol. B3, Chapter 11, page 1-27, VCH: Weinheim; and Dechow, F. J. (1989) Separation and purification techniques in biotechnology, Noyes Publications).

[0687] In one embodiment, the present invention relates to a method for the identification of a gene product conferring increased resistance to biotic stress, preferably pathogenic fungi as compared to a corresponding non-transformed wild type control cell in a cell of an organism for example plant, comprising the following steps:

a) contacting, e.g. hybridising, some or all nucleic acid molecules of a sample, e.g. cells, tissues, plants or microorganisms or a nucleic acid library, which can contain a candidate gene encoding a gene product conferring increased stress resistance, preferably to plant disease, preferably caused by pathogenic fungi, with a nucleic acid molecule as shown in column 5 or 7 of Table I A or B or a functional homologue thereof;
b) identifying the nucleic acid molecules, which hybridize under relaxed stringent conditions with said nucleic acid molecule, in particular to the nucleic acid molecule sequence shown in column 5 or 7 of Table I and, optionally, isolating the full length cDNA clone or complete genomic clone;
c) identifying the candidate nucleic acid molecules or a fragment thereof in host cells, preferably in a plant cell
d) increasing the expressing of the identified nucleic acid molecules in the host cells for which increased resistance to plant disease, preferably caused by pathogenic fungi as desired
e) assaying the level of increased stress resistance of the host cells; and
f) identifying the nucleic acid molecule and its gene product which increased expression confers increased stress resistance in the host cell compared to the wild type.

[0688] Relaxed hybridisation conditions are: After standard hybridisation procedures washing steps can be performed at low to medium stringency conditions usually with washing conditions of 40°-55° C. and salt conditions between 2×SSC and 0.2×SSC with 0.1% SDS in comparison to stringent washing conditions as e.g. 60° to 68° C. with 0.1% SDS. Further examples can be found in the references listed above for the stringend hybridization conditions. Usually washing steps are repeated with increasing stringency and length until a useful signal to noise ratio is detected and depend on many factors as the target, e.g. its purity, GC-content, size etc, the probe, e.g. its length, is it a RNA or a DNA probe, salt conditions, washing or hybridisation temperature, washing or hybridisation time etc.

[0689] In another embodiment, the present invention relates to a method for the identification of a gene product the expression of which confers increased stress resistance in a cell, comprising the following steps:

a) identifying a nucleic acid molecule in an organism, which is at least 20%, preferably 25%, more preferably 30%, even more preferred are 35%. 40% or 50%, even more preferred are 60%, 70% or 80%, most preferred are 90% or 95% or more homolog to the nucleic acid molecule encoding a protein comprising the polypeptide molecule as shown in column 5 or 7 of Table II or comprising a consensus sequence or a polypeptide motif as shown in column 7 of Table IV or being encoded by a nucleic acid molecule comprising a polynucleotide as shown in column 5 or 7 of Table I or a homologue thereof as described herein, for example via homology search in a data bank;
b) enhancing the expression of the identified nucleic acid molecules in the host cells;
c) assaying the level of increased stress resistance, preferably to plant disease, preferably caused by pathogenic fungi in the host cells; and
d) identifying the host cell, in which the enhanced expression confers increased stress resistance in the host cell compared to a wild type.

[0690] Further, the nucleic acid molecule disclosed herein, in particular the nucleic acid molecule shown column 5 or 7 of Table I A or B, may be sufficiently homologous to the sequences of related species such that these nucleic acid molecules may serve as markers for the construction of a genomic map in related organism or for association mapping. Furthermore natural variation in the genomic regions corresponding to nucleic acids disclosed herein, in particular the nucleic acid molecule shown column 5 or 7 of Table I A or B, or homologous thereof may lead to variation in the activity of the proteins disclosed herein, in particular the proteins comprising polypeptides as shown in column 5 or 7 of Table II A or B or comprising the consensus sequence or the polypeptide motif as shown in column 7 of Table IV, and their homolgous and in consequence in natural variation in tolerance and/or resistance to biotic stress and preferably a further yield related trait.

[0691] In consequence natural variation eventually also exists in form of more active allelic variants leading already to a relative increase in the tolerance and/or resistance to biotic stress and preferably a further yield related trait. Different variants of the nucleic acids molecule disclosed herein, in particular the nucleic acid comprising the nucleic acid molecule as shown column 5 or 7 of Table I A or B, which corresponds to different tolerance and/or stress resistance levels can be identified and used for marker assisted breeding for increased stress resistance, preferably to plant disease, preferably caused by pathogenic fungi.

[0692] Accordingly, the present invention relates to a method for breeding plants for increased stress resistance, preferably to plant disease, preferably caused by pathogenic fungi, comprising

a) selecting a first plant variety with increased stress resistance, preferably to plant disease, preferably caused by pathogenic fungi based on increased expression of a nucleic acid of the invention as disclosed herein, in particular of a nucleic acid molecule comprising a nucleic acid molecule as shown in column 5 or 7 of Table I A or B or a polypeptide comprising a polypeptide as shown in column 5 or 7 of Table II A or B or comprising a consensus sequence or a polypeptide motif as shown in column 7 of Table IV, or a homologue thereof as described herein;
b) associating the level of tolerance and/or resistance to stress, preferably to plant disease, preferably caused by pathogenic fungi with the expression level or the genomic structure of a gene encoding said polypeptide or said nucleic acid molecule;
c) crossing the first plant variety with a second plant variety, which significantly differs in its level of tolerance and/or resistance to stress and
e) identifying, which of the offspring varieties has got increased levels level of tolerance and/or resistance to stress by the expression level of said polypeptide or nucleic acid molecule or the genomic structure of the genes encoding said polypeptide or nucleic acid molecule of the invention.

[0693] In one embodiment, the expression level of the gene according to step (b) is increased.

[0694] Yet another embodiment of the invention relates to a process for the identification of a compound conferring increased resistance to biotic stress, preferably pathogenic fungi as compared to a corresponding non-transformed wild type control plant cell, a plant or a part thereof in a plant cell, a plant or a part thereof, a plant or a part thereof, comprising the steps:

a) culturing a plant cell; a plant or a part thereof maintaining a plant expressing the polypeptide as shown in column 5 or 7 of Table II or being encoded by a nucleic acid molecule comprising a polynucleotide as shown in column 5 or 7 of Table I or a homologue thereof as described herein or a polynucleotide encoding said polypeptide and conferring an increased resistance to biotic stress, preferably pathogenic fungi as compared to a corresponding non-transformed wild type control plant cell, a plant or a part thereof; a non-transformed wild type plant or a part thereof and providing a readout system capable of interacting with the polypeptide under suitable conditions which permit the interaction of the polypeptide with this readout system in the presence of a chemical compound or a sample comprising a plurality of chemical compounds and capable of providing a detectable signal in response to the binding of a chemical compound to said polypeptide under conditions which permit the expression of said readout system and of the protein as shown in column 5 or 7 of Table II or being encoded by a nucleic acid molecule comprising a polynucleotide as shown in column 5 or 7 of Table I or a homologue thereof as described herein; and
b) identifying if the chemical compound is an effective agonist by detecting the presence or absence or decrease or increase of a signal produced by said readout system.

[0695] Said compound may be chemically synthesized or microbiologically produced and/or comprised in, for example, samples, e.g., cell extracts from, e.g., plants, animals or microorganisms, e.g. pathogens. Furthermore, said compound(s) may be known in the art but hitherto not known to be capable of activating the polypeptide of the present invention. The reaction mixture may be a cell free extract or may comprise a cell or tissue culture. Suitable set ups for the process for identification of a compound of the invention are known to the person skilled in the art and are, for example, generally described in Alberts et al., Molecular Biology of the Cell, third edition (1994), in particular Chapter 17. The compounds may be, e.g., added to the reaction mixture, culture medium, injected into the cell or sprayed onto the plant.

[0696] If a sample containing a compound is identified in the process, then it is either possible to isolate the compound from the original sample identified as containing the compound capable of activating or increasing biotic stress resistance and preferably a further yield related trait as compared to a corresponding non-transformed wild type, or one can further subdivide the original sample, for example, if it consists of a plurality of different compounds, so as to reduce the number of different substances per sample and repeat the method with the subdivisions of the original sample. Depending on the complexity of the samples, the steps described above can be performed several times, preferably until the sample identified according to the said process only comprises a limited number of or only one substance(s). Preferably said sample comprises substances of similar chemical and/or physical properties, and most preferably said substances are identical. Preferably, the compound identified according to the described method above or its derivative is further formulated in a form suitable for the application in plant breeding or plant cell and tissue culture.

[0697] The compounds which can be tested and identified according to said process may be expression libraries, e.g., cDNA expression libraries, peptides, proteins, nucleic acids, antibodies, small organic compounds, hormones, peptidomimetics, PNAs or the like (Milner, Nature Medicine 1 (1995), 879-880; Hupp, Cell 83 (1995), 237-245; Gibbs, Cell 79 (1994), 193-198 and references cited supra). Said compounds can also be functional derivatives or analogues of known inhibitors or activators. Methods for the preparation of chemical derivatives and analogues are well known to those skilled in the art and are described in, for example, Beilstein, Handbook of Organic Chemistry, Springer edition New York Inc., 175 Fifth Avenue, New York, N.Y. 10010 U.S.A. and Organic Synthesis, Wiley, New York, USA. Furthermore, said derivatives and analogues can be tested for their effects according to methods known in the art. Furthermore, peptidomimetics and/or computer aided design of appropriate derivatives and analogues can be used, for example, according to the methods described above. The cell or tissue that may be employed in the process preferably is a host cell, plant cell or plant tissue of the invention described in the embodiments hereinbefore.

[0698] Thus, in a further embodiment the invention relates to a compound obtained or identified according to the method for identifying an agonist of the invention said compound being an antagonist of the polypeptide of the present invention.

[0699] Accordingly, in one embodiment, the present invention further relates to a compound identified by the method for identifying a compound of the present invention.

[0700] In one embodiment, the invention relates to an antibody specifically recognizing the compound or agonist of the present invention.

[0701] The invention also relates to a diagnostic composition comprising at least one of the aforementioned nucleic acid molecules, antisense nucleic acid molecule, RNAi, snRNA, dsRNA, siRNA, miRNA, ta-siRNA, cosuppression molecule, ribozyme, vectors, proteins, antibodies or compounds of the invention and optionally suitable means for detection.

[0702] The diagnostic composition of the present invention is suitable for the isolation of mRNA from a cell and contacting the mRNA so obtained with a probe comprising a nucleic acid probe as described above under hybridizing conditions, detecting the presence of mRNA hybridized to the probe, and thereby detecting the expression of the protein in the cell. Further methods of detecting the presence of a protein according to the present invention comprise immunotechniques well known in the art, for example enzyme linked immunoadsorbent assay. Furthermore, it is possible to use the nucleic acid molecules according to the invention as molecular markers or primers in plant breeding. Suitable means for detection are well known to a person skilled in the art, e.g. buffers and solutions for hydridization assays, e.g. the afore-mentioned solutions and buffers, further and means for Southern-, Western-, Northern- etc.-blots, as e.g. described in Sambrook et al. are known. In one embodiment diagnostic composition contain PCR primers designed to specifically detect the presence or the expression level of the nucleic acid molecule to be reduced in the process of the invention, e.g. of the nucleic acid molecule of the invention, or to discriminate between different variants or alleles of the nucleic acid molecule of the invention or which activity is to be reduced in the process of the invention.

[0703] In another embodiment, the present invention relates to a kit comprising the nucleic acid molecule, the vector, the host cell, the polypeptide, or the antisense, RNAi, snRNA, dsRNA, siRNA, miRNA, ta-siRNA, cosuppression molecule, or ribozyme molecule, or the viral nucleic acid molecule, the antibody, plant cell, the plant or plant tissue, the harvestable part, the propagation material and/or the compound and/or agonist identified according to the method of the invention.

[0704] The compounds of the kit of the present invention may be packaged in containers such as vials, optionally with/in buffers and/or solution. If appropriate, one or more of said components might be packaged in one and the same container. Additionally or alternatively, one or more of said components might be adsorbed to a solid support as, e.g. a nitrocellulose filter, a glass plate, a chip, or a nylon membrane or to the well of a micro titerplate. The kit can be used for any of the herein described methods and embodiments, e.g. for the production of the host cells, transgenic plants, pharmaceutical compositions, detection of homologous sequences, identification of antagonists or agonists, as food or feed or as a supplement thereof or as supplement for the treating of plants, etc.

[0705] Further, the kit can comprise instructions for the use of the kit for any of said embodiments.

[0706] In one embodiment said kit comprises further a nucleic acid molecule encoding one or more of the aforementioned protein, and/or an antibody, a vector, a host cell, an antisense nucleic acid, a plant cell or plant tissue or a plant. In another embodiment said kit comprises PCR primers to detect and discriminate the nucleic acid molecule to be reduced in the process of the invention, e.g. of the nucleic acid molecule of the invention.

[0707] In a further embodiment, the present invention relates to a method for the production of an agricultural composition providing the nucleic acid molecule for the use according to the process of the invention, the nucleic acid molecule of the invention, the vector of the invention, the antisense, RNAi, snRNA, dsRNA, siRNA, miRNA, ta-siRNA, cosuppression molecule, ribozyme, or antibody of the invention, the viral nucleic acid molecule of the invention, or the polypeptide of the invention or comprising the steps of the method according to the invention for the identification of said compound or agonist; and formulating the nucleic acid molecule, the vector or the polypeptide of the invention or the agonist, or compound identified according to the methods or processes of the present invention or with use of the subject matters of the present invention in a form applicable as plant agricultural composition.

[0708] In another embodiment, the present invention relates to a method for the production of the plant culture composition comprising the steps of the method of the present invention; and formulating the compound identified in a form acceptable as agri-cultural composition.

[0709] Under “acceptable as agricultural composition” is understood, that such a composition is in agreement with the laws regulating the content of fungicides, plant nutrients, herbizides, etc. Preferably such a composition is without any harm for the protected plants and the animals (humans included) fed therewith.

[0710] Throughout this application, various publications are referenced. The disclosures of all of these publications and those references cited within those publications in their entireties are hereby incorporated by reference into this application in order to more fully describe the state of the art to which this invention pertains.

[0711] It should also be understood that the foregoing relates to preferred embodiments of the present invention and that numerous changes and variations may be made therein without departing from the scope of the invention. The invention is further illustrated by the following examples, which are not to be construed in any way as limiting. On the contrary, it is to be clearly understood that various other embodiments, modifications and equivalents thereof, which, after reading the description herein, may suggest themselves to those skilled in the art without departing from the spirit of the present invention and/or the scope of the claims.

### EXAMPLE 1

### Engineering Stress-Tolerant Arabidopsis Plants by Over-Expressing Genes Coding for BSRP

[0712] Example 1: Cloning of the inventive sequences according to the SEQ ID NO: 38 or SEQ ID NO: 1660 respectively for the expression in plants

[0713] Unless otherwise specified, standard methods as described in Sambrook et al., Molecular Cloning: A laboratory manual, Cold Spring Harbor 1989, Cold Spring Harbor Laboratory Press are used.

[0714] The inventive sequences were amplified by PCR as described in the protocol of the Pfu Ultra, Pfu Turbo or Herculase DNA polymerase (Stratagene).

[0715] The composition for the protocol of the Pfu Ultra, Pfu Turbo or Herculase DNA polymerase was as follows: 1×PCR buffer (Stratagene), 0.2 mM of each dNTP, 100 ng genomic DNA of Saccharomyces cerevisiae (strain S288C; Research Genetics, Inc., now Invitrogen) or Escherichia coli (strain MG1655; E. coli Genetic Stock Center), 50 pmol forward primer, 50 pmol reverse primer, 2.5 u Pfu Ultra, Pfu Turbo or Herculase DNA polymerase.

[0716] The amplification cycles were as follows:

[0717] Saccharomyces cerevisiae: 1 cycle of 2-3 minutes at 94-95° C., followed by 25-36 cycles of in each case 1 minute at 95° C. or 30 seconds at 94° C., 45 seconds at 50° C., 30 seconds at 50° C. or 30 seconds at 55° C. and 210-480 seconds at 72° C., followed by 1 cycle of 8 minutes at 72° C., then 4° C.

[0718] Escherichia coli: 1 cycle of 2-3 minutes at 94° C., followed by 25-30 cycles of in each case 30 seconds at 94° C., 30 seconds at 55-60° C. and 5-10 minutes at 72° C., followed by 1 cycle of 10 minutes at 72° C., then 4° C.

[0719] The following adapter sequences were added to Saccharomyces cerevisiae ORF specific primers (see table IV) for cloning purposes:

i)
SEQ ID NO: 10
foward primer: 5′-GGAATTCCAGCTGACCACC-3′
ii)
SEQ ID NO: 11
reverse primer: 5′-GATCCCCGGGAATTGCCATG-3′

[0720] The following adapter sequences were added to Escherichia coli ORF specific primers for cloning purposes:

iii)
SEQ ID NO: 12
forward primer: 5′-TTGCTOTTCC-3′
iv)
SEQ ID NO: 13
reverse primer: 5′-TTGCTCTTCG-3′

[0721] Therefore for amplification and cloning of Saccharomyces cerevisiae SEQ ID NO: 1660, a primer consisting of the adaptor sequence i) and the ORF specific sequence SEQ ID NO: 1662 and a second primer consisting of the adaptor sequence ii) and the ORF specific sequence SEQ ID NO: 1663 were used.

[0722] For amplification and cloning of Escherichia coli SEQ ID NO: 38a primer consisting of the adaptor sequence iii) and the ORF specific sequence SEQ ID NO: 130 and a second primer consisting of the adaptor sequence iiii) and the ORF specific sequence SEQ ID NO: 131 were used.

[0723] Construction of Binary Vectors for Non-Targeted Expression of Proteins

[0724] “Non-targeted” expression in this context means, that no additional targeting sequence was added to the ORF to be expressed.

[0725] For non-targeted constitutive expression in preferentially green tissues the following binary vectors were used for cloning: pMTX155 SEQ ID NO 1 and VC-MME220-1qcz SEQ ID NO 4.

[0726] For cloning the ORFs from yeast, the binary vector pMTX155 containing the enhanced 35S (Big35S) promoter SEQ ID NO: 8 (Comai et al., Plant Mol Biol 15, 373-383 (1990) was used.

[0727] For cloning the ORFs from E. coli, the binary vector VC-MME220-1 qcz containing the super promoter SEQ ID NO: 9 (Ni et al., Plant Journal 7, 661 (1995), WO 95/14098) was used.

[0728] Other useful binary vectors are known to the skilled worker; an overview of binary vectors and their use can be found in Hellens, R., Mullineaux, P. and Klee H., ((2000) “A guide to Agrobacterium binary vectors”, Trends in Plant Science, Vol. 5 No. 10, 446-451]. Such vectors have to be equally equipped with appropriate promoters and targeting sequences.

[0729] Construction of binary vectors for targeting of expressed proteins to the plastids.

[0730] For constitutive expression the binary vectors used for cloning the targeting sequence were VC-MME354-1QCZ SEQ ID NO: 2 and VC-MME432-1qcz SEQ ID NO: 5.

[0731] Amplification of the plastidic targeting sequence of the gene FNR from Spinacia oleracea and construction of vector for plastid-targeted expression in preferential green tissues.

[0732] In order to amplify the targeting sequence of the FNR gene from S. oleracea, genomic DNA was extracted from leaves of 4 weeks old S. oleracea plants (DNeasy Plant Mini Kit, Qiagen, Hilden). The gDNA was used as the template for a PCR.

[0733] To enable cloning of the transit sequence into the vector VC-MME489-1QCZ SEQ ID NO: 7 an EcoRI restriction enzyme recognition sequence was added to both the forward and reverse primers, whereas for cloning into the vector VC-MME220-1 qcz SEQ ID NO: 4 a PmeI restriction enzyme recognition sequence was added to the forward primer and a NcoI site was added to the reverse primer.

FNR5EcoResgen
SEQ ID NO: 14
ATA gAA TTC gCA TAA ACT TAT CTT CAT AgT TgC C
FNR3EcoResgen
SEQ ID NO: 15
ATA gAA TTC AgA ggC gAT CTg ggC CCT
FNR5PmeColic
SEQ ID NO: 16
ATA gTT TAA ACg CAT AAA CTT ATC TTC ATA gTT gCC
FNR3NcoColic
SEQ ID NO: 17
ATA CCA Tgg AAg AgC AAg Agg CgA TCT ggg CCC T

[0734] The sequence SEQ ID NO: 18 amplified from genomic spinach DNA, comprised a 5″UTR (bp1-166), and the coding region (bp 166-273 and 351-419). The coding sequence is interrupted by an intronic sequence from by 274 to-bp 350.

gcataaacttatcttcatagttgccactccaatttgctccttgaatct
cctccacccaatacataatccactcctccatcacccacttcactacta
aatcaaacttaactctgttttctctctcctcctttcatttcttattct
tccaatcatcgtactccgccatgaccaccgctgtcaccgccgctgttt
ctttcccctctaccaaaaccacctctctctccgcccgaagctcctccg
tcatttcccctgacaaaatcagctacaaaaaggtgattcccaatttca
ctgtgttttttattaataatttgttattttgatgatgagatgattaat
ttgggtgctgcaggttcctttgtactacaggaatgtatctgcaactgg
gaaaatgggacccatcagggcccagatcgcctct

[0735] The PCR fragment derived with the primers FNR5EcoResgen and FNR3EcoResgen was digested with EcoRI and ligated in the vector VC-MME489-1 QCZ, that had also been digested with EcoRI. The correct orientation of the FNR targeting sequence was tested by sequencing. The vector generated in this ligation step was VC-MME354-1QCZ SEQ ID NO: 2.

[0736] The PCR fragment derived with the primers FNR5PmeColic and FNR3NcoColic was digested with PmeI and NcoI and ligated into the vector VC-MME220-1 qcz that had been digested with SmaI and NcoI. The vector generated in this ligation step was VC-MME432-1qcz SEQ ID NO: 5.

[0737] For cloning ORFs from S. cerevisiae amplified as described above into a vector containing the Resgen adapter sequence (pMTX155) the vector DNA was treated with the restriction enzyme NcoI. For cloning of ORFs from E. coli into the vectors containing the Colic adapter sequence (VC-MME220-1 qcz), the vector DNA was treated with the restriction enzymes PacI and NcoI following the standard protocol (MBI Fermentas). In all cases the reaction was stopped by inactivation at 70° C. for 20 minutes and purified over QIAquick or NucleoSpin Extract II columns following the standard protocol (Qiagen or Macherey-Nagel).

[0738] Then the PCR-product representing the amplified ORF with the respective adapter sequences and the vector DNA were treated with T4 DNA polymerase according to the standard protocol (MBI Fermentas) to produce single stranded overhangs with the parameters 1 unit T4 DNA polymerase at 37° C. for 2-10 minutes for the vector and 1-2 u T4 DNA polymerase at 15-17° C. for 10-60 minutes for the PCR product representing the ORF.

[0739] The reaction was stopped by addition of high-salt buffer and purified over QIAquick QIAquick or NucleoSpin Extract II columns following the standard protocol (Qiagen or Macherey-Nagel).

[0740] Approximately 30-60 ng of prepared vector and a defined amount of prepared amplificate were mixed and hybridized at 65° C. for 15 minutes followed by 37° C. 0.1° C./1 seconds, followed by 37° C. 10 minutes, followed by 0.1° C./1 seconds, then 4-10° C.

[0741] The ligated constructs were transformed in the same reaction vessel by addition of competent E. coli cells (strain DH5alpha) and incubation for 20 minutes at 1° C. followed by a heat shock for 90 seconds at 42° C. and cooling to 1-4° C. Then, complete medium (SOC) was added and the mixture was incubated for 45 minutes at 37° C. The entire mixture was subsequently plated onto an agar plate with 0.05 mg/ml kanamycin and incubated overnight at 37° C.

[0742] The outcome of the cloning step was verified by amplification with the aid of primers which bind upstream and downstream of the integration site, thus allowing the amplification of the insertion. The amplifications were carried out as described in the protocol of Taq DNA polymerase (Gibco-BRL).

[0743] The amplification cycles were as follows: 1 cycle of 1-5 minutes at 94° C., followed by 35 cycles of in each case 15-60 seconds at 94° C., 15-60 seconds at 50-66° C. and 5-15 minutes at 72° C., followed by 1 cycle of 10 minutes at 72° C., then 4-16° C.

[0744] Several colonies were checked, but only one colony for which a PCR product of the expected size was detected was used in the following steps.

[0745] A portion of this positive colony was transferred into a reaction vessel filled with complete medium (LB) supplemented with kanamycin (50 μg/ml) and incubated overnight at 37° C.

[0746] The plasmid preparation was carried out as specified in the Qiaprep or NucleoSpin Multi-96 Plus standard protocol (Qiagen or Macherey-Nagel).

### EXAMPLE 2

### Generation of Transgenic Plants which Express SEQ ID NO: 38 or SEQ ID NO: 1660 Respectively

[0747] 1-5 ng of the plasmid DNA isolated was transformed by electroporation or transformation into competent cells of Agrobacterium tumefaciens, of strain GV 3101 pMP90 (Koncz and Schell, Mol. Gen. Gent. 204, 383, 1986). Thereafter, complete medium (YEP) was added and the mixture was transferred into a fresh reaction vessel for 3 hours at 28° C. Thereafter, all of the reaction mixture was plated onto YEP agar plates supplemented with the respective antibiotics, e.g. rifampicine (0.1 mg/ml), gentamycine (0.025 mg/ml and kanamycine (0.05 mg/ml) and incubated for 48 hours at 28° C.

[0748] The agrobacteria that contains the plasmid construct were then used for the transformation of plants.

[0749] A colony was picked from the agar plate with the aid of a pipette tip and taken up in 3 ml of liquid TB medium, which also contained suitable antibiotics as described above. The preculture was grown for 48 hours at 28° C. and 120 rpm.

[0750] 400 ml of LB medium containing the same antibiotics as above were used for the main culture. The preculture was transferred into the main culture. It was grown for 18 hours at 28° C. and 120 rpm. After centrifugation at 4 000 rpm, the pellet was resuspended in infiltration medium (MS medium, 10% sucrose).

[0751] In order to grow the plants for the transformation, dishes (Piki Saat 80, green, provided with a screen bottom, 30×20×4.5 cm, from Wiesauplast, Kunststofftechnik, Germany) were half-filled with a GS 90 substrate (standard soil, Werkverband E.V., Germany). The dishes were watered overnight with 0.05% Proplant solution (Chimac-Apriphar, Belgium). A. thaliana C24 seeds (Nottingham Arabidopsis Stock Centre, UK; NASC Stock N906) were scattered over the dish, approximately 1000 seeds per dish. The dishes were covered with a hood and placed in the stratification facility (8 h, 110 μmol/m²s, 22° C.; 16 h, dark, 6° C.). After 5 days, the dishes were placed into the short-day controlled environment chamber (8 h, 130 μmol/m²s¹, 22° C.; 16 h, dark, 20° C.), where they remained for approximately 10 days until the first true leaves had formed.

[0752] The seedlings were transferred into pots containing the same substrate (Teku pots, 7 cm, LC series, manufactured by Pöppelmann GmbH & Co, Germany). Five plants were pricked out into each pot. The pots were then returned into the short-day controlled environment chamber for the plant to continue growing.

[0753] After 10 days, the plants were transferred into the greenhouse cabinet (supplementary illumination, 16 h, 340 μE/m²s, 22° C.; 8 h, dark, 20° C.), where they were allowed to grow for further 17 days.

[0754] For the transformation, 6-week-old Arabidopsis plants, which had just started flowering were immersed for 10 seconds into the above-described agrobacterial suspension which had previously been treated with 10 μl Silwett L77 (Crompton S. A., Osi Specialties, Switzerland). The respective method is described in Clough and Bent, 1998 (Clough, J C and Bent, A F. 1998 Floral dip: a simplified method for Agrobacterium-mediated transformation of Arabidopsis thaliana, Plant J. 16:735-743).

[0755] The plants were subsequently placed for 18 hours into a humid chamber. Thereafter, the pots were returned to the greenhouse for the plants to continue growing. The plants remained in the greenhouse for another 10 weeks until the seeds were ready for harvesting.

[0756] Depending on the resistance marker used for the selection of the transformed plants the harvested seeds were planted in the greenhouse and subjected to a spray selection or else first sterilized and then grown on agar plates supplemented with the respective selection agent. Since the vector contained the bar gene as the resistance marker, plantlets were sprayed four times at an interval of 2 to 3 days with 0.02% BASTA® and transformed plants were allowed to set seeds. The plants remained in the greenhouse for another 10 weeks until the seeds were ready for harvesting. The seeds of the transgenic A. thaliana plants were stored in the freezer (at −20° C.).

### EXAMPLE 3

### Fungal Resistance Screen

[0757] Plant Growth and Experiment Design

[0758] In a standard experiment nutrient rich soil (GS90, Tantau, Wansdorf, Germany) were used. Pots were filled with soil and placed into trays. Water was added to the trays to let the soil take up appropriate amount of water for the sowing procedure. The seeds for transgenic Arabidopsis thaliana C24 plants were sown in pots (10 cm diameter). Then the filled tray was covered with a transparent lid without holes and transferred into the shelf system of the growth chamber. Lid and pots were sprayed daily. Stratification was established for a period of 4 days in the dark at 4° C. for 8 h, in the light (220 μmol/m²s) at 20° C. for 16 h, relative humidity with 68%. After 4 days the parameter were changed to 12 h light and 12 h darkness and covers were removed. BASTA selection was done at day 5, 7, 10 and 12 after sowing by spraying pots with plantlets from the top. Therefore, a 0.02% (v/v) solution of BASTA concentrate (183 g/l glufosinate-ammonium) in tap water was sprayed. The location of the trays inside the chambers was changed on working days after sowing. Watering were done as necessary after covers were removed from the trays. Plants were piqued 14 days after sowing in another pot with GS90, 5 plants together in 1 pot and 3 pots per line. 4 lines and 1 wild type (in the middle) were placed together in 1 tray. The tray was covered with the lid and sprayed for 3 days. Positive (sensitive=pad3-1-wt-F1-(1)) and negative (resistant=Col-0-Lehle-F1-(1)) controls were in an extra tray. 28 days after sowing phenotypic information was valued in case of plants differ from the wild type control. 31 days after sowing tap water were added in the tray in a height of 1 cm. A day later plants were sprayed 3 times with the fungal Alternaria brassicicola or Alternaria alternata (1,5×10⁶ spores/ml) and covered again. Lid were sprayed 2 times a day with water for 2 days. 3 and 4 days after inoculation the evaluation were done.

[0759] Cultivation of the Fungus and Inoculation

[0760] The phytopythogenic fungi Alternaria brassicicola and Alternaria alternata were maintained on 2% Agar containing 2% malt-extract. The plates were incubated at 24° C. with a 12 h light/dark rhythm. To inoculate the plants, spore suspensions were prepared. Twelve-day-old fungal culture plates were rinsed with 2% malt-extract solution. The crude spore-mycelium suspension were filtered through 1 layer of gauze. The spore densities were determined by counting in a Thoma-chamber. A freshly harvested spore suspension with a density of 1,5×10⁶ Spores/ml was used to inoculate well watered plants.

[0761] Scoring of the Plants Symptoms

[0762] The disease symptoms were scored in comparison to untransformed wild type control plants. The range of scoring were between 1 and 5. Leafs with symptoms of chlorotic areas and mazaration of the tissue were counted of all three pots. The phenotype (bigness and habitus) of the plants had an influence to the final scoring.

### Table 2:

[0763] List of ORF (Column 1) from yeast (S. cerevisiae) or E. coli (Column 2) which resulted in enhanced fungal resistance as shown in column 4 when expressed as indicated in column 3 (without artificial targeting of with plastidic targeting) in comparison to non-transformed wild type plants.

TABLE 2
List of ORF (Column 1) from yeast (S. cerevisia) or E. coli
(Column 2) which resulted in enhanced fungal resistance as
shown in column 4 when expressed as indicated in column 3
(without artificial targeting of with plastidic targeting) in
comparison to non-transformed wild type plants.

| | | Artifical | Enhanced Resistance against |
|---|---|---|---|
| Orf | Organism | Target | Alternaria species |
| b0124 | E. coli | non | Alternata and brassicicola |
| b0730 | E. coli | non | Alternata and brassicicola |
| b1528 | E. coli | non | Alternata and brassicicola |
| b2148 | E. coli | non | Alternata and brassicicola |
| b2573 | E. coli | non | Alternata and brassicicola |
| b2600 | E. coli | plastidic | Alternata and brassicicola |
| b2699 | E. coli | non | Alternata and brassicicola |
| b2764 | E. coli | non | Alternata or brassicicola |
| b3262 | E. coli | non | Alternata and brassicicola |
| b3363 | E. coli | non | Alternata or brassicicola |
| b3644 | E. coli | non | Alternata or brassicicola |
| YCR087W | S. cerevisiae | non | Alternata and brassicicola |
| YGR150C | S. cerevisiae | non | Alternata and brassicicola |
| YIL172C | S. cerevisiae | non | Alternata or brassicicola |
| YLR168C | S. cerevisiae | non | Alternata and brassicicola |
| YLR407W | S. cerevisiae | non | Alternata and brassicicola |
| YNL241C | S. cerevisiae | plastidic | Alternata and brassicicola |
| YOR260W | S. cerevisiae | non | Alternata and brassicicola |
| YOR299W | S. cerevisiae | non | Alternata and brassicicola |
| YPL079W | S. cerevisiae | non | Alternata and brassicicola |
| YPL151C | S. cerevisiae | non | Alternata and brassicicola |

[0764] Materials and General Methods

[0765] Unless indicated otherwise, chemicals and reagents in the Examples were obtained from Sigma Chemical Company (St. Louis, Mo.), restriction endonucleases were from New England Biolabs (Beverly, Mass.) or Roche (Indianapolis, Ind.), oligonucleotides were synthesized by MWG Biotech Inc. (High Point, N.C.), and other modifying enzymes or kits regarding biochemicals and molecular biological assays were from Clontech (Palo Alto, Calif.), Pharmacia Biotech (Piscataway, N.J.), Promega Corporation (Madison, Wis.), or Stratagene (La Jolla, Calif.). Materials for cell culture media were obtained from Gibco/BRL (Gaithersburg, Md.) or DIFCO (Detroit, Mich.). The cloning steps carried out for the purposes of the present invention, such as, for example, restriction cleavages, agarose gel electrophoresis, purification of DNA fragments, transfer of nucleic acids to nitrocellulose and nylon membranes, linking DNA fragments, transformation of E. coli cells, growing bacteria, multiplying phages and sequence analysis of recombinant DNA, are carried out as described by Sambrook (1989). The sequencing of recombinant DNA molecules is carried out using ABI laser fluorescence DNA sequencer following the method of Sanger (Sanger 1977).

### EXAMPLE 4

### Engineering Alfalfa Plants with Increased Resistance to Biotic Stress, Preferably Pathogenic Fungi by Over-Expressing Stress Related Genes from Saccharomyces cerevisiae or E. Coli or from Brassica napus, Glycine max, Zea mays or Oryza sativa for Example

[0766] A regenerating clone of alfalfa (Medicago sativa) is transformed using the method of (McKersie et al., 1999 Plant Physiol 119: 839-847). Regeneration and transformation of alfalfa is genotype dependent and therefore a regenerating plant is required. Methods to obtain regenerating plants have been described. For example, these can be selected from the cultivar Rangelander (Agriculture Canada) or any other commercial alfalfa variety as described by Brown D C W and A Atanassov (1985. Plant Cell Tissue Organ Culture 4: 111-112). Alternatively, the RA3 variety (University of Wisconsin) is selected for use in tissue culture (Walker et al., 1978 Am J Bot 65:654-659).

[0767] Petiole explants are cocultivated with an overnight culture of Agrobacterium tumefaciens C58C1 pMP90 (McKersie et al., 1999 Plant Physiol 119: 839-847) or LBA4404 containing a binary vector. Many different binary vector systems have been described for plant transformation (e.g. An, G. in Agrobacterium Protocols. Methods in Molecular Biology vol 44, pp 47-62, Gartland K M A and M R Davey eds. Humana Press, Totowa, N.J.). Many are based on the vector pBIN19 described by Bevan (Nucleic Acid Research. 1984. 12:8711-8721) that includes a plant gene expression cassette flanked by the left and right border sequences from the Ti plasmid of Agrobacterium tumefaciens. A plant gene expression cassette consists of at least two genes—a selection marker gene and a plant promoter regulating the transcription of the cDNA or genomic DNA of the trait gene. Various selection marker genes can be used including the Arabidopsis gene encoding a mutated acetohydroxy acid synthase (AHAS) enzyme (U.S. Pat. Nos. 5,767,3666 and 6,225,105). Similarly, various promoters can be used to regulate the trait gene that provides constitutive, developmental, tissue or environmental regulation of gene transcription. In this example, the 34S promoter (GenBank Accession numbers M59930 and X16673) is used to provide constitutive expression of the trait gene.

[0768] The explants are cocultivated for 3 d in the dark on SH induction medium containing 288 mg/L Pro, 53 mg/L thioproline, 4.35 g/L K2SO4, and 100 μm acetosyringinone. The explants are washed in half-strength Murashige-Skoog medium (Murashige and Skoog, 1962) and plated on the same SH induction medium without acetosyringinone but with a suitable selection agent and suitable antibiotic to inhibit Agrobacterium growth. After several weeks, somatic embryos are transferred to BOi2Y development medium containing no growth regulators, no antibiotics, and 50 g/L sucrose. Somatic embryos are subsequently germinated on half-strength Murashige-Skoog medium. Rooted seedlings are transplanted into pots and grown in a greenhouse.

[0769] The T0 transgenic plants are propagated by node cuttings and rooted in Turface growth medium. The plants are defoliated and grown to a height of about 10 cm (approximately 2 weeks after defoliation). The plants are then subjected to plant disease, preferably pathogenic fungi.

[0770] Tolerance of plant disease, preferably pathogenic fungi are measured using methods as described in example 3 or 7. Plants that have tolerance to plant disease, preferably pathogenic fungi have higher survival rates and preferably a further yield related trait including seed yield, photosynthesis and dry matter production than susceptible plants.

### EXAMPLE 5

### Engineering Ryegrass Plants with Increased Resistance to Biotic Stress, Preferably Pathogenic Fungi by Over-Expressing Stress Related Genes from Saccharomyces cerevisiae or E. coli or from Brassica napus, Glycine max, Zea mays or Oryza sativa for Example

[0771] Seeds of several different ryegrass varieties may be used as explant sources for transformation, including the commercial variety Gunne available from Svalof Weibull seed company or the variety Affinity. Seeds are surface-sterilized sequentially with 1% Tween-20 for 1 minute, 100% bleach for 60 minutes, 3 rinses with 5 minutes each with de-ionized and distilled H2O, and then germinated for 3-4 days on moist, sterile filter paper in the dark. Seedlings are further sterilized for 1 minute with 1% Tween-20, 5 minutes with 75% bleach, and rinsed 3 times with ddH2O, 5 min each.

[0772] Surface-sterilized seeds are placed on the callus induction medium containing Murashige and Skoog basal salts and vitamins, 20 g/l sucrose, 150 mg/l asparagine, 500 mg/l casein hydrolysate, 3 g/l Phytagel, 10 mg/l BAP, and 5 mg/l dicamba. Plates are incubated in the dark at 25 C for 4 weeks for seed germination and embryogenic callus induction.

[0773] After 4 weeks on the callus induction medium, the shoots and roots of the seedlings are trimmed away, the callus is transferred to fresh media, maintained in culture for another 4 weeks, and then transferred to MSO medium in light for 2 weeks. Several pieces of callus (11-17 weeks old) are either strained through a 10 mesh sieve and put onto callus induction medium, or cultured in 100 ml of liquid ryegrass callus induction media (same medium as for callus induction with agar) in a 250 ml flask. The flask is wrapped in foil and shaken at 175 rpm in the dark at 23 C for 1 week. Sieving the liquid culture with a 40-mesh sieve collected the cells. The fraction collected on the sieve is plated and cultured on solid ryegrass callus induction medium for 1 week in the dark at 25° C. The callus is then transferred to and cultured on MS medium containing 1% sucrose for 2 weeks.

[0774] Transformation can be accomplished with either Agrobacterium of with particle bombardment methods. An expression vector is created containing a constitutive plant promoter and the cDNA of the gene in a pUC vector. The plasmid DNA is prepared from E. coli cells using with Qiagen kit according to manufacturer's instruction. Approximately 2 g of embryogenic callus is spread in the center of a sterile filter paper in a Petri dish. An aliquot of liquid MSO with 10 g/l sucrose is added to the filter paper. Gold particles (1.0 μm in size) are coated with plasmid DNA according to method of Sanford et al., 1993 and delivered to the embryogenic callus with the following parameters: 500 μg particles and 2 μg DNA per shot, 1300 psi and a target distance of 8.5 cm from stopping plate to plate of callus and 1 shot per plate of callus.

[0775] After the bombardment, calli are transferred back to the fresh callus development medium and maintained in the dark at room temperature for a 1-week period. The callus is then transferred to growth conditions in the light at 25° C. to initiate embryo differentiation with the appropriate selection agent, e.g. 250 nM Arsenal, 5 mg/l PPT or 50 mg/L kanamycin. Shoots resistant to the selection agent appear and once rotted are transferred to soil.

[0776] Samples of the primary transgenic plants (T0) are analyzed by PCR to confirm the presence of T-DNA. These results are confirmed by Southern hybridization in which DNA is electrophoresed on a 1% agarose gel and transferred to a positively charged nylon membrane (Roche Diagnostics). The PCR DIG Probe Synthesis Kit (Roche Diagnostics) is used to prepare a digoxigenin-labelled probe by PCR, and used as recommended by the manufacturer.

[0777] Transgenic T0 ryegrass plants are propagated vegetatively by excising tillers. The transplanted tillers are maintained in the greenhouse for 2 months until well established. The shoots are defoliated and allowed to grow for 2 weeks.

[0778] Tolerance of plant disease, preferably pathogenic fungi are measured using methods as described in example 3 or 7. Plants that have tolerance to plant disease, preferably pathogenic fungi have higher survival rates and preferably a further yield related trait including seed yield, photosynthesis and dry matter production than susceptible plants.

### EXAMPLE 6

### Engineering Rice Plants with Increased Resistance to Biotic Stress, Preferably Pathogenic Fungi by Over-Expressing Stress Related Genes from Saccharomyces cerevisiae or E. coli or from Brassica napus, Glycine max, Zea mays or Oryza sativa for Example

### Rice Transformation

[0779] The Agrobacterium containing the expression vector of the invention is used to transform Oryza sativa plants. Mature dry seeds of the rice japonica cultivar Nipponbare are dehusked. Sterilization is carried out by incubating for one minute in 70% ethanol, followed by 30 minutes in 0.2% HgCl₂, followed by a 6 times 15 minutes wash with sterile distilled water. The sterile seeds are then germinated on a medium containing 2,4-D (callus induction medium). After incubation in the dark for four weeks, embryogenic, scutellum-derived calli are excised and propagated on the same medium. After two weeks, the calli are multiplied or propagated by subculture on the same medium for another 2 weeks. Embryogenic callus pieces are sub-cultured on fresh medium 3 days before co-cultivation (to boost cell division activity).

[0780] Agrobacterium strain LBA4404 containing the expression vector of the invention is used for co-cultivation. Agrobacterium is inoculated on AB medium with the appropriate antibiotics and cultured for 3 days at 28° C. The bacteria are then collected and suspended in liquid co-cultivation medium to a density (OD₆₀₀) of about 1. The suspension is then transferred to a Petri dish and the calli immersed in the suspension for 15 minutes. The callus tissues are then blotted dry on a filter paper and transferred to solidified, co-cultivation medium and incubated for 3 days in the dark at 25° C. Cocultivated calli are grown on 2,4-D-containing medium for 4 weeks in the dark at 28° C. in the presence of a selection agent. During this period, rapidly growing resistant callus islands developed. After transfer of this material to a regeneration medium and incubation in the light, the embryogenic potential is released and shoots developed in the next four to five weeks. Shoots are excised from the calli and incubated for 2 to 3 weeks on an auxin-containing medium from which they are transferred to soil. Hardened shoots are grown under high humidity and short days in a greenhouse.

[0781] Approximately 35 independent T0 rice transformants are generated for one construct. The primary transformants are transferred from a tissue culture chamber to a greenhouse. After a quantitative PCR analysis to verify copy number of the T-DNA insert, only single copy transgenic plants that exhibit tolerance to the selection agent are kept for harvest of T1 seed. Seeds are then harvested three to five months after transplanting. The method yielded single locus transformants at a rate of over 50% (Aldemita and Hodges 1996, Chan et al. 1993, Hiei et al. 1994).

[0782] Tolerance of plant disease, preferably pathogenic fungi are measured using methods as described in example 3 or 7. Plants that have tolerance to plant disease, preferably pathogenic fungi have higher survival rates and preferably a further yield related trait including seed yield, photosynthesis and dry matter production than susceptible plants.

### EXAMPLE 7

### Engineering Soybean Plants with Increased Resistance to Biotic Stress, Preferably Pathogenic Fungi by Over-Expressing Stress Related Genes from Saccharomyces cerevisiae or E. coli or from Brassica napus, Glycine max, Zea mays or Oryza sativa for Example

[0783] Soybean is transformed according to the following modification of the method described in the Texas A&M U.S. Pat. No. 5,164,310. Several commercial soybean varieties are amenable to transformation by this method. The cultivar Jack (available from the Illinois Seed Foundation) is a commonly used for transformation. Seeds are sterilized by immersion in 70% (v/v) ethanol for 6 min and in 25% commercial bleach (NaOCl) supplemented with 0.1% (v/v) Tween for 20 min, followed by rinsing 4 times with sterile double distilled water. Seven-day seedlings are propagated by removing the radicle, hypocotyl and one cotyledon from each seedling. Then, the epicotyl with one cotyledon is transferred to fresh germination media in petri dishes and incubated at 25° C. under a 16-hr photoperiod (approx. 100 μE-m⁻²s−1) for three weeks. Axillary nodes (approx. 4 mm in length) were cut from 3-4 week-old plants. Axillary nodes are excised and incubated in Agrobacterium LBA4404 culture.

[0784] Many different binary vector systems have been described for plant transformation (e.g. An, G. in Agrobacterium Protocols. Methods in Molecular Biology vol 44, pp 47-62, Gartland K M A and M R Davey eds. Humana Press, Totowa, N.J.). Many are based on the vector pBIN19 described by Bevan (Nucleic Acid Research. 1984. 12:8711-8721) that includes a plant gene expression cassette flanked by the left and right border sequences from the Ti plasmid of Agrobacterium tumefaciens. A plant gene expression cassette consists of at least two genes—a selection marker gene and a plant promoter regulating the transcription of the cDNA or genomic DNA of the trait gene. Various selection marker genes can be used including the Arabidopsis gene encoding a mutated acetohydroxy acid synthase (AHAS) enzyme (U.S. Pat. Nos. 5,767,3666 and 6,225,105). Similarly, various promoters can be used to regulate the trait gene to provide constitutive, developmental, tissue or environmental regulation of gene transcription. In this example, the 34S promoter (GenBank Accession numbers M59930 and X16673) can be used to provide constitutive expression of the trait gene.

[0785] After the co-cultivation treatment, the explants are washed and transferred to selection media supplemented with 500 mg/L timentin. Shoots are excised and placed on a shoot elongation medium. Shoots longer than 1 cm are placed on rooting medium for two to four weeks prior to transplanting to soil.

[0786] The primary transgenic plants (T0) are analyzed by PCR to confirm the presence of T-DNA. These results are confirmed by Southern hybridization in which DNA is electrophoresed on a 1% agarose gel and transferred to a positively charged nylon membrane (Roche Diagnostics). The PCR DIG Probe Synthesis Kit (Roche Diagnostics) is used to prepare a digoxigenin-labelled probe by PCR, and used as recommended by the manufacturer.

[0787] Tolerance of plant disease, preferably pathogenic fungi are measured using methods as described in example 3 or 7. Plants that have tolerance to plant disease, preferably pathogenic fungi have higher survival rates and preferably a further yield related trait including seed yield, photosynthesis and dry matter production than susceptible plants.

### EXAMPLE 8

### Engineering Rapeseed/Canola Plants with Increased Resistance to Biotic Stress, Preferably Pathogenic Fungi by Over-Expressing Stress Related Genes from Saccharomyces cerevisiae or E. coli or from Brassica napus, Glycine max, Zea mays or Oryza sativa for Example

[0788] Cotyledonary petioles and hypocotyls of 5-6 day-old young seedlings are used as explants for tissue culture and transformed according to Babic et al. (1998, Plant Cell Rep 17: 183-188). The commercial cultivar Westar (Agriculture Canada) is the standard variety used for transformation, but other varieties can be used.

[0789] Agrobacterium tumefaciens LBA4404 containing a binary vector can be used for canola transformation. Many different binary vector systems have been described for plant transformation (e.g. An, G. in Agrobacterium Protocols. Methods in Molecular Biology vol 44, pp 47-62, Gartland K M A and M R Davey eds. Humana Press, Totowa, N.J.). Many are based on the vector pBIN19 described by Bevan (Nucleic Acid Research. 1984. 12:8711-8721) that includes a plant gene expression cassette flanked by the left and right border sequences from the Ti plasmid of Agrobacterium tumefaciens. A plant gene expression cassette consists of at least two genes—a selection marker gene and a plant promoter regulating the transcription of the cDNA or genomic DNA of the trait gene. Various selection marker genes can be used including the Arabidopsis gene encoding a mutated acetohydroxy acid synthase (AHAS) enzyme (U.S. Pat. Nos. 5,767,3666 and 6,225,105). Similarly, various promoters can be used to regulate the trait gene to provide constitutive, developmental, tissue or environmental regulation of gene transcription. In this example, the 34S promoter (GenBank Accession numbers M59930 and X16673) can be used to provide constitutive expression of the trait gene.

[0790] Canola seeds are surface-sterilized in 70% ethanol for 2 min., and then in 30% Clorox with a drop of Tween-20 for 10 min, followed by three rinses with sterilized distilled water. Seeds are then germinated in vitro 5 days on half strength MS medium without hormones, 1% sucrose, 0.7% Phytagar at 23° C., 16 hr. light. The cotyledon petiole explants with the cotyledon attached are excised from the in vitro seedlings, and inoculated with Agrobacterium by dipping the cut end of the petiole explant into the bacterial suspension. The explants are then cultured for 2 days on MSBAP-3 medium containing 3 mg/l BAP, 3% sucrose, 0.7% Phytagar at 23° C., 16 hr light. After two days of co-cultivation with Agrobacterium, the petiole explants are transferred to MSBAP-3 medium containing 3 mg/l BAP, cefotaxime, carbenicillin, or timentin (300 mg/l) for 7 days, and then cultured on MSBAP-3 medium with cefotaxime, carbenicillin, or timentin and selection agent until shoot regeneration. When the shoots were 5-10 mm in length, they are cut and transferred to shoot elongation medium (MSBAP-0.5, containing 0.5 mg/l BAP). Shoots of about 2 cm in length are transferred to the rooting medium (MS0) for root induction.

[0791] Samples of the primary transgenic plants (T0) are analyzed by PCR to confirm the presence of T-DNA. These results are confirmed by Southern hybridization in which DNA is electrophoresed on a 1% agarose gel and transferred to a positively charged nylon membrane (Roche Diagnostics). The PCR DIG Probe Synthesis Kit (Roche Diagnostics) is used to prepare a digoxigenin-labelled probe by PCR, and used as recommended by the manufacturer.

[0792] Tolerance of plant disease, preferably pathogenic fungi are measured using methods as described in example 3 or 7. Plants that have tolerance to plant disease, preferably pathogenic fungi have higher survival rates and preferably a further yield related trait including seed yield, photosynthesis and dry matter production than susceptible plants.

### EXAMPLE 9

### Engineering Corn Plants with Increased Resistance to Biotic Stress, Preferably Pathogenic Fungi by Over-Expressing Stress Related Genes from Saccharomyces cerevisiae or E. coli or from Brassica napus, Glycine max, Zea mays or Oryza sativa for Example

[0793] Transformation of maize (Zea Mays L.) is performed with a modification of the method described by Ishida et al. (1996. Nature Biotech 14745-50). Transformation is genotype-dependent in corn and only specific genotypes are amenable to transformation and regeneration. The inbred line A188 (University of Minnesota) or hybrids with A188 as a parent are good sources of donor material for transformation (Fromm et al. 1990 Biotech 8:833-839), but other genotypes can be used successfully as well. Ears are harvested from corn plants at approximately 11 days after pollination (DAP) when the length of immature embryos is about 1 to 1.2 mm. Immature embryos are co-cultivated with Agrobacterium tumefaciens that carry “super binary” vectors and transgenic plants are recovered through organogenesis. The super binary vector system of Japan Tobacco is described in WO patents WO94/00977 and WO95/06722. Vectors were constructed as described. Various selection marker genes can be used including the maize gene encoding a mutated acetohydroxy acid synthase (AHAS) enzyme (U.S. Pat. No. 6,025,541). Similarly, various promoters can be used to regulate the trait gene to provide constitutive, developmental, tissue or environmental regulation of gene transcription. In this example, the 34S promoter (GenBank Accession numbers M59930 and X16673) was used to provide constitutive expression of the trait gene.

[0794] Excised embryos are grown on callus induction medium, then maize regeneration medium, containing imidazolinone as a selection agent. The Petri plates are incubated in the light at 25° C. for 2-3 weeks, or until shoots develop. The green shoots are transferred from each embryo to maize rooting medium and incubated at 25° C. for 2-3 weeks, until roots develop. The rooted shoots are transplanted to soil in the greenhouse. T1 seeds are produced from plants that exhibit tolerance to the imidazolinone herbicides and which are PCR positive for the transgenes.

[0795] The T1 transgenic plants are then evaluated for their improved stress tolerance.

[0796] Tolerance of plant disease, preferably pathogenic fungi are measured using methods as described in example 3 or 7. Plants that have tolerance to plant disease, preferably pathogenic fungi have higher survival rates and preferably a further yield related trait including seed yield, photosynthesis and dry matter production than susceptible plants.

### EXAMPLE 10

### Engineering Wheat Plants with Increased Resistance to Biotic Stress, Preferably Pathogenic Fungi by Over-Expressing Stress Related Genes from Saccharomyces cerevisiae or E. coli or from Brassica napus, Glycine max, Zea mays or Oryza sativa for Example

[0797] Transformation of wheat is performed with the method described by Ishida et al. (1996 Nature Biotech. 14745-50). The cultivar Bobwhite (available from CYMMIT, Mexico) is commonly used in transformation. Immature embryos are co-cultivated with Agrobacterium tumefaciens that carry “super binary” vectors, and transgenic plants are recovered through organogenesis. The super binary vector system of Japan Tobacco is described in WO patents WO94/00977 and WO95/06722. Vectors were constructed as described. Various selection marker genes can be used including the maize gene encoding a mutated acetohydroxy acid synthase (AHAS) enzyme (U.S. Pat. No. 6,025,541). Similarly, various promoters can be used to regulate the trait gene to provide constitutive, developmental, tissue or environmental regulation of gene transcription. In this example, the 34S promoter (GenBank Accession numbers M59930 and X16673) was used to provide constitutive expression of the trait gene.

[0798] After incubation with Agrobacterium, the embryos are grown on callus induction medium, then regeneration medium, containing imidazolinone as a selection agent. The Petri plates are incubated in the light at 25° C. for 2-3 weeks, or until shoots develop. The green shoots are transferred from each embryo to rooting medium and incubated at 25° C. for 2-3 weeks, until roots develop. The rooted shoots are transplanted to soil in the greenhouse. T1 seeds are produced from plants that exhibit tolerance to the imidazolinone herbicides and which are PCR positive for the transgenes.

[0799] The T1 transgenic plants are then evaluated for their improved stress tolerance according to the method described in the previous example 3. The T1 generation of single locus insertions of the T-DNA will segregate for the transgene in a 3:1 ratio. Those progeny containing one or two copies of the transgene are tolerant of the imidazolinone herbicide, and exhibit greater tolerance of biotic stress or drought stress than those progeny lacking the transgenes. Tolerant plants have higher survival rates and preferably a further yield related trait including seed yield, photosynthesis and dry matter production than susceptible plants. Homozygous T2 plants exhibited similar phenotypes.

[0800] Tolerance of plant disease, preferably pathogenic fungi are measured using methods as described in example 3 or 7. Plants that have tolerance to plant disease, preferably pathogenic fungi have higher survival rates and preferably a further yield related trait including seed yield, photosynthesis and dry matter production than susceptible plants

### EXAMPLE 11

### Identification of Identical and Heterologous Genes

[0801] Gene sequences can be used to identify identical or heterologous genes from cDNA or genomic libraries. Identical genes (e.g. full-length cDNA clones) can be isolated via nucleic acid hybridization using for example cDNA libraries. Depending on the abundance of the gene of interest, 100,000 up to 1,000,000 recombinant bacteriophages are plated and transferred to nylon membranes. After denaturation with alkali, DNA is immobilized on the membrane by e.g. UV cross linking. Hybridization is carried out at high stringency conditions. In aqueous solution, hybridization and washing is performed at an ionic strength of 1 M NaCl and a temperature of 68° C. Hybridization probes are generated by e.g. radioactive (³²P) nick transcription labeling (High Prime, Roche, Mannheim, Germany). Signals are detected by autoradiography.

[0802] Partially identical or heterologous genes that are related but not identical can be identified in a manner analogous to the above-described procedure using low stringency hybridization and washing conditions. For aqueous hybridization, the ionic strength is normally kept at 1 M NaCl while the temperature is progressively lowered from 68 to 42° C.

[0803] Isolation of gene sequences with homology (or sequence identity/similarity) only in a distinct domain of (for example 10-20 amino acids) can be carried out by using synthetic radio labeled oligonucleotide probes. Radiolabeled oligonucleotides are prepared by phosphorylation of the 5-prime end of two complementary oligonucleotides with T4 polynucleotide kinase. The complementary oligonucleotides are annealed and ligated to form concatemers. The double stranded concatemers are than radiolabeled by, for example, nick transcription. Hybridization is normally performed at low stringency conditions using high oligonucleotide concentrations.

[0804] Oligonucleotide Hybridization Solution:

### 6×SSC

[0805] 0.01 M sodium phosphate

### 1 mM EDTA (pH 8)

### 0.5% SDS

[0806] 100 μg/ml denatured salmon sperm DNA
0.1% nonfat dried milk

[0807] During hybridization, temperature is lowered stepwise to 5-10° C. below the estimated oligonucleotide Tₘ or down to room temperature followed by washing steps and autoradiography. Washing is performed with low stringency such as 3 washing steps using 4×SSC. Further details are described by Sambrook, J. et al., 1989, “Molecular Cloning: A Laboratory Manual,” Cold Spring Harbor Laboratory Press or Ausubel, F. M. et al., 1994, “Current Protocols in Molecular Biology,” John Wiley & Sons.

### EXAMPLE 12

### Identification of Homologous or Orthologous Genes by Screening Expression Libraries with Antibodies

[0808] c-DNA clones can be used to produce recombinant polypeptide for example in E. coli (e.g. Qiagen QIAexpress pQE system). Recombinant polypeptides are then normally affinity purified via Ni-NTA affinity chromatography (Qiagen). Recombinant polypeptides are then used to produce specific antibodies for example by using standard techniques for rabbit immunization. Antibodies are affinity purified using a Ni-NTA column saturated with the recombinant antigen as described by Gu et al., 1994, BioTechniques 17:257-262. The antibody can than be used to screen expression cDNA libraries to identify orthologous or heterologous genes via an immunological screening (Sambrook, J. et al., 1989, “Molecular Cloning: A Laboratory Manual,” Cold Spring Harbor Laboratory Press or Ausubel, F. M. et al., 1994, “Current Protocols in Molecular Biology”, John Wiley & Sons).

### EXAMPLE 13

### In Vivo Mutagenesis

[0809] In vivo mutagenesis of microorganisms can be performed by passage of plasmid (or other vector) DNA through E. coli or other microorganisms (e.g. Bacillus spp. or yeasts such as Saccharomyces cerevisiae) which are impaired in their capabilities to maintain the integrity of their genetic information. Typical mutator strains have mutations in the genes for the DNA repair system (e.g., mutHLS, mutD, mutT, etc.; for reference, see Rupp, W. D., 1996, DNA repair mechanisms, in: Escherichia coli and Salmonella, p. 2277-2294, ASM: Washington.) Such strains are well known to those skilled in the art. The use of such strains is illustrated, for example, in Greener, A. and Callahan, M., 1994, Strategies 7: 32-34. Transfer of mutated DNA molecules into plants is preferably done after selection and testing in microorganisms. Transgenic plants are generated according to various examples within the exemplification of this document.

### EXAMPLE 14

### Engineering Arabidopsis Plants with Increased Resistance to Biotic Stress, Preferably Pathogenic Fungi by Over-Expressing Biotic Stress Related Protein Encoding Genes for Example from Brassica napus, Glycine Max, Zea Mays or Oryza sativa Using Stress-Inducible and Tissue-Specific Promoters

[0810] Transgenic Arabidopsis plants over-expressing stress related protein encoding genes from Brassica napus, Glycine max, Zea mays and Oryza sativa for example are created as described above to express the stress related protein encoding transgenes under the control of either a tissue-specific or stress-inducible promoter.

[0811] T2 generation plants are produced and treated with stress.

[0812] Tolerance of plant disease, preferably pathogenic fungi are measured using methods as described in example 3 or 7. Plants that have tolerance to plant disease, preferably pathogenic fungi have higher survival rates and preferably a further yield related trait including seed yield, photosynthesis and dry matter production than susceptible plants

### FIGURES

[0813] FIG. 1 Vector VC-MME220-1qcz (SEQ ID NO: 4) used for cloning gene of interest for non-targeted expression.

[0814] FIG. 2 Vector VC-MME354-1 QCZ (SEQ ID NO: 2) used for cloning gene of interest for plastidic targeted expression.

[0815] FIG. 3 Vector VC-MME432-1 qcz (SEQ ID NO: 5) used for cloning gene of interest for plastidic targeted expression.

[0816] FIG. 4 Vector VC-MME489-1 QCZ (SEQ ID NO: 7) used for cloning gene of interest for non-targeted expression and cloning of a targeting sequence.

[0817] FIG. 5 Vector pMTX155 (SEQ ID NO: 1) used for used for cloning gene of interest for non-targeted expression.

TABLE IA
Nucleic acid sequence ID numbers

| | | | | | 5. | | |
|---|---|---|---|---|---|---|---|
| | 1. | 2. | 3. | 4. | Lead | 6. | 7. |
| Application | Hit | Project | Locus | Organism | SEQ ID | Target | SEQ IDs of Nucleic Acid Homologs |
| 1 | 1 | FR_OEX | B0124 | E. coli | 38 | non-targeted | 40, 42, 44, 46, 48, 50, 52, 54, 56, 58, 60, 62, 64, 66, 68, 70, 72, |
| | | | | | | | 74, 76, 78, 80, 82, 84, 86, 88, 90, 92, 94, 96, 98, 100, 102, 104, |
| | | | | | | | 106, 108, 110, 112, 114, 116, 118, 120, 122, 124, 126, 128 |
| 1 | 2 | FR_OEX | B0730 | E. coli | 146 | non-targeted | 148, 150, 152, 154, 156 |
| 1 | 3 | FR_OEX | B1528 | E. coli | 165 | non-targeted | 167, 169, 171, 173, 175, 177, 179, 181, 183, 185, 187, 189, 191, |
| | | | | | | | 193, 195, 197, 199, 201, 203, 205, 207, 209, 211, 213, 215, 217, |
| | | | | | | | 219, 221, 223, 225, 227, 229, 231 |
| 1 | 4 | FR_OEX | B2148 | E. coli | 242 | non-targeted | 244, 246, 248, 250, 252, 254, 256, 258, 260, 262, 264, 266, 268, |
| | | | | | | | 270, 272, 274, 276, 278, 280, 282, 284, 286, 288, 290, 292, 294, |
| | | | | | | | 296, 298, 300, 302 |
| 1 | 5 | FR_OEX | B2573 | E. coli | 312 | non-targeted | 314, 316, 318, 320, 322, 324, 326, 328, 330, 332, 334, 336, 338, |
| | | | | | | | 340, 342, 344, 346, 348, 350, 352, 354, 356, 358, 360, 362, 364, |
| | | | | | | | 366, 368, 370, 372, 374, 376, 378, 380, 382, 384, 386, 388, 390, |
| | | | | | | | 392, 394, 396, 398, 400, 402, 404, 406, 408, 410, 412, 414, 416, |
| | | | | | | | 418, 420, 422, 424, 426, 428, 430, 432, 434, 436, 438, 440, 442, |
| | | | | | | | 444, 446, 448, 450, 452, 454, 456, 458, 460 |
| 1 | 6 | FR_OEX | B2600 | E. coli | 468 | plastidic | 470, 472, 474, 476, 478, 480, 482, 484, 486, 488, 490, 492, 494, |
| | | | | | | | 496, 498, 500, 502, 504, 506, 508, 510, 512, 514, 516, 518, 520, |
| | | | | | | | 522 |
| 1 | 7 | FR_OEX | B2699 | E. coli | 534 | non-targeted | 536, 538, 540, 542, 544, 546, 548, 550, 552, 554, 556, 558, 560, |
| | | | | | | | 562, 564, 566, 568, 570, 572, 574, 576, 578, 580, 582, 584, 586, |
| | | | | | | | 588, 590, 592, 594, 596, 598, 600, 602, 604, 606, 608, 610, 612, |
| | | | | | | | 614, 616, 618, 620, 622, 624, 626, 628, 630, 632, 634, 636, 638, |
| | | | | | | | 640, 642, 644, 646, 648, 650, 652, 654, 656, 658, 660, 662, 664, |
| | | | | | | | 666, 668, 670, 672, 674, 676, 678, 680, 682, 684, 686, 688, 690, |
| | | | | | | | 692, 694, 696, 698, 700, 702, 704, 706, 708, 710, 712, 714, 716, |
| | | | | | | | 718, 720, 722, 724, 726, 728, 730, 732, 734, 736, 738, 740, 742, |
| | | | | | | | 744, 746, 748, 750, 752, 754, 756, 758, 760, 762, 764, 766, 768, |
| | | | | | | | 770, 772, 774, 776, 778, 780, 782, 784, 786, 788, 790, 792, 794, |
| | | | | | | | 796, 798, 800, 802, 804, 806, 808, 810, 812, 814, 816, 818, 820, |
| | | | | | | | 822, 824, 826, 828, 830, 832, 834, 836, 838, 840, 842, 844, 846, |
| | | | | | | | 848, 850, 852, 854, 856, 858, 860, 862, 864, 866, 868, 870, 872, |
| | | | | | | | 874, 876, 878, 880, 882, 884, 886, 888, 890, 892, 894, 896, 898, |
| | | | | | | | 900, 902, 904, 906, 908, 910, 912, 914, 916, 918, 920, 922, 924, |
| | | | | | | | 926, 928, 930, 932, 934, 936 |
| 1 | 8 | FR_OEX | B2764 | E. coli | 970 | non-targeted | 972, 974, 976, 978, 980, 982, 984, 986, 988, 990, 992, 994, 996, |
| | | | | | | | 998, 1000, 1002, 1004, 1006, 1008, 1010, 1012, 1014, 1016, |
| | | | | | | | 1018, 1020, 1022, 1024, 1026, 1028, 1030, 1032, 1034, 1036, |
| | | | | | | | 1038, 1040, 1042, 1044, 1046, 1048, 1050, 1052, 1054, 1056, |
| | | | | | | | 1058, 1060, 1062, 1064, 1066, 1068, 1070, 1072, 1074, 1076, |
| | | | | | | | 1078, 1080, 1082, 1084, 1086, 1088, 1090, 1092, 1094, 1096, |
| | | | | | | | 1098, 1100, 1102, 1104, 1106, 1108, 1110, 1112, 1114, 1116, |
| | | | | | | | 1118 |
| 1 | 9 | FR_OEX | B3262 | E. coli | 1143 | non-targeted | 1145, 1147, 1149, 1151, 1153, 1155, 1157, 1159, 1161, 1163 |
| 1 | 10 | FR_OEX | B3363 | E. coli | 1174 | non-targeted | 1176, 1178, 1180, 1182, 1184, 1186, 1188, 1190, 1192, 1194, |
| | | | | | | | 1196, 1198, 1200, 1202, 1204, 1206, 1208, 1210, 1212, 1214, |
| | | | | | | | 1216, 1218, 1220, 1222, 1224, 1226, 1228, 1230, 1232, 1234, |
| | | | | | | | 1236, 1238, 1240, 1242, 1244, 1246, 1248, 1250, 1252, 1254, |
| | | | | | | | 1256, 1258, 1260, 1262, 1264, 1266, 1268, 1270, 1272, 1274, |
| | | | | | | | 1276, 1278, 1280, 1282, 1284, 1286, 1288, 1290, 1292, 1294, |
| | | | | | | | 1296, 1298, 1300, 1302, 1304, 1306, 1308, 1310, 1312, 1314, |
| | | | | | | | 1316, 1318, 1320, 1322, 1324, 1326, 1328, 1330, 1332, 1334, |
| | | | | | | | 1336, 1338, 1340, 1342, 1344, 1346, 1348, 1350, 1352, 1354, |
| | | | | | | | 1356, 1358, 1360, 1362, 1364, 1366, 1368, 1370, 1372, 1374, |
| | | | | | | | 1376, 1378, 1380, 1382, 1384, 1386, 1388, 1390, 1392, 1394, |
| | | | | | | | 1396, 1398, 1400, 1402, 1404, 1406, 1408, 1410, 1412, 1414, |
| | | | | | | | 1416, 1418, 1420, 1422, 1424, 1426, 1428, 1430, 1432, 1434, |
| | | | | | | | 1436, 1438, 1440, 1442, 1444, 1446, 1448, 1450, 1452, 1454, |
| | | | | | | | 1456, 1458, 1460, 1462, 1464, 1466, 1468, 1470, 1472, 1474, |
| | | | | | | | 1476, 1478, 1480, 1482, 1484, 1486 |
| 1 | 11 | FR_OEX | B3644 | E. coli | 1521 | non-targeted | 1523, 1525, 1527, 1529, 1531, 1533, 1535, 1537, 1539, 1541, |
| | | | | | | | 1543, 1545, 1547, 1549, 1551, 1553, 1555, 1557, 1559, 1561, |
| | | | | | | | 1563, 1565, 1567, 1569, 1571, 1573, 1575, 1577, 1579, 1581, |
| | | | | | | | 1583, 1585, 1587, 1589, 1591, 1593, 1595, 1597, 1599, 1601, |
| | | | | | | | 1603, 1605, 1607, 1609, 1611, 1613, 1615, 1617, 1619, 1621, |
| | | | | | | | 1623, 1625, 1627, 1629, 1631, 1633, 1635, 1637, 1639, 1641, |
| | | | | | | | 1643, 1645, 1647, 1649, 1651 |
| 1 | 12 | FR_OEX | YCR087W | S. cerevisiae | 1660 | non-targeted | — |
| 1 | 13 | FR_OEX | YGR150C | S. cerevisiae | 1664 | non-targeted | 1666, 1668, 1670, 1672 |
| 1 | 14 | FR_OEX | YIL172C | S. cerevisiae | 1691 | non-targeted | 1693, 1695, 1697, 1699, 1701, 1703, 1705, 1707, 1709, 1711, |
| | | | | | | | 1713, 1715, 1717, 1719, 1721, 1723, 1725, 1727, 1729, 1731, |
| | | | | | | | 1733, 1735, 1737, 1739, 1741, 1743, 1745, 1747, 1749, 1751, |
| | | | | | | | 1753, 1755, 1757, 1759, 1761, 1763, 1765, 1767, 1769, 1771, |
| | | | | | | | 1773, 1775, 1777, 1779, 1781, 1783, 1785, 1787, 1789, 1791, |
| | | | | | | | 1793, 1795, 1797, 1799, 1801, 1803, 1805, 1807, 1809, 1811, |
| | | | | | | | 1813, 1815, 1817, 1819, 1821, 1823, 1825, 1827, 1829, 1831, |
| | | | | | | | 1833, 1835, 1837, 1839, 1841, 1843, 1845, 1847, 1849 |
| 1 | 15 | FR_OEX | YLR168C | S. cerevisiae | 1859 | non-targeted | 1861, 1863, 1865, 1867, 1869, 1871, 1873, 1875, 1877, 1879, |
| | | | | | | | 1881, 1883, 1885, 1887, 1889, 1891, 1893 |
| 1 | 16 | FR_OEX | YLR407W | S. cerevisiae | 1904 | non-targeted | 1906, 1908, 1910 |
| 1 | 17 | FR_OEX | YNL241C | S. cerevisiae | 1920 | plastidic | 1922, 1924, 1926, 1928, 1930, 1932, 1934, 1936, 1938, 1940, |
| | | | | | | | 1942, 1944, 1946, 1948, 1950, 1952, 1954, 1956, 1958, 1960, |
| | | | | | | | 1962, 1964, 1966, 1968, 1970, 1972, 1974, 1976, 1978, 1980, |
| | | | | | | | 1982, 1984, 1986, 1988, 1990, 1992, 1994, 1996, 1998, 2000, |
| | | | | | | | 2002, 2004, 2006, 2008, 2010, 2012, 2014, 2016, 2018, 2020, |
| | | | | | | | 2022, 2024, 2026, 2028, 2030, 2032, 2034, 2036, 2038, 2040, |
| | | | | | | | 2042, 2044, 2046, 2048, 2050, 2052, 2054, 2056, 2058, 2060, |
| | | | | | | | 2062, 2064, 2066, 2068, 2070, 2072, 2074, 2076, 2078, 2080, |
| | | | | | | | 2082, 2084, 2086, 2088, 2090, 2092, 2094, 2096, 2098, 2100, |
| | | | | | | | 2102, 2104, 2106, 2108, 2110, 2112, 2114, 2116, 2118, 2120, |
| | | | | | | | 2122, 2124, 2126, 2128, 2130, 2132, 2134, 2136, 2138, 2140, |
| | | | | | | | 2142, 2144, 2146, 2148, 2150, 2152, 2154, 2156, 2158, 2160, |
| | | | | | | | 2162, 2164, 2166, 2168, 2170, 2172, 2174, 2176, 2178, 2180, |
| | | | | | | | 2182, 2184, 2186, 2188, 2190, 2192, 2194, 2196, 2198, 2200, |
| | | | | | | | 2202, 2204, 2206, 2208, 2210, 2212, 2214, 2216, 2218, 2220, |
| | | | | | | | 2222, 2224, 2226, 2228, 2230, 2232, 2234, 2236, 2238, 2240, |
| | | | | | | | 2242, 2244, 2246, 2248, 2250, 2252, 2254, 2256, 2258, 2260, |
| | | | | | | | 2262, 2264, 2266, 2268, 2270, 2272, 2274, 2276, 2278, 2280, |
| | | | | | | | 2282, 2284, 2286, 2288, 2290, 2292, 2294, 2296, 2298, 2300, |
| | | | | | | | 2302, 2304, 2306, 2308, 2310, 2312, 2314, 2316, 2318, 2320, |
| | | | | | | | 2322, 2324, 2326, 2328, 2330, 2332, 2334, 2336, 2338, 2340, |
| | | | | | | | 2342, 2344, 2346, 2348, 2350, 2352, 2354, 2356, 2358, 2360, |
| | | | | | | | 2362, 2364, 2366, 2368, 2370, 2372, 2374, 2376, 2378, 2380, |
| | | | | | | | 2382, 2384, 2386, 2388, 2390, 2392, 2394, 2396, 2398, 2400, |
| | | | | | | | 2402, 2404, 2406, 2408 |
| 1 | 18 | FR_OEX | YOR260W | S. cerevisiae | 2455 | non-targeted | 2457, 2459, 2461, 2463, 2465 |
| 1 | 19 | FR_OEX | YOR299W | S. cerevisiae | 2477 | non-targeted | 2479, 2481, 2483, 2485, 2487, 2489, 2491 |
| 1 | 20 | FR_OEX | YPL079W | S. cerevisiae | 2507 | non-targeted | 2509, 2511, 2513, 2515, 2517, 2519, 2521, 2523, 2525, 2527, |
| | | | | | | | 2529, 2531, 2533, 2535, 2537, 2539, 2541, 2543, 2545, 2547, |
| | | | | | | | 2549, 2551, 2553, 2555, 2557, 2559, 2561, 2563, 2565, 2567, |
| | | | | | | | 2569, 2571, 2573, 2575, 2577, 2579, 2581, 2583, 2585, 2587, |
| | | | | | | | 2589, 2591, 2593, 2595, 2597, 2599, 2601, 2603, 2605, 2607, |
| | | | | | | | 2609, 2611, 2613, 2615, 2617, 2619, 2621, 2623, 2625, 2627, |
| | | | | | | | 2629, 2631, 2633, 2635 |
| 1 | 21 | FR_OEX | YPL151C | S. cerevisiae | 2683 | non-targeted | 2685, 2687, 2689, 2691, 2693, 2695, 2697, 2699, 2701, 2703, |
| | | | | | | | 2705, 2707, 2709, 2711, 2713, 2715, 2717, 2719, 2721, 2723, |
| | | | | | | | 2725, 2727, 2729, 2731, 2733 |

TABLE IB
Nucleic acid sequence ID numbers

| | | | | | 5. | | |
|---|---|---|---|---|---|---|---|
| | 1. | 2. | 3. | 4. | Lead | 6. | 7. |
| Application | Hit | Project | Locus | Organism | SEQ ID | Target | SEQ IDs of Nucleic Acid Homologs |
| 1 | 1 | FR_OEX | B0124 | E. coli | 38 | non-targeted | — |
| 1 | 2 | FR_OEX | B0730 | E. coli | 146 | non-targeted | — |
| 1 | 3 | FR_OEX | B1528 | E. coli | 165 | non-targeted | — |
| 1 | 4 | FR_OEX | B2148 | E. coli | 242 | non-targeted | — |
| 1 | 5 | FR_OEX | B2573 | E. coli | 312 | non-targeted | — |
| 1 | 6 | FR_OEX | B2600 | E. coli | 468 | plastidic | — |
| 1 | 7 | FR_OEX | B2699 | E. coli | 534 | non-targeted | 938, 940, 942, 944, 946, 948, 950, 952, 954 |
| 1 | 8 | FR_OEX | B2764 | E. coli | 970 | non-targeted | 1120, 1122, 1124, 1126, 1128, 1130 |
| 1 | 9 | FR_OEX | B3262 | E. coli | 1143 | non-targeted | — |
| 1 | 10 | FR_OEX | B3363 | E. coli | 1174 | non-targeted | 1488, 1490, 1492, 1494, 1496, 1498, 1500, |
| | | | | | | | 1502, 1504, 1506, 1508, 1510, 1512 |
| 1 | 11 | FR_OEX | B3644 | E. coli | 1521 | non-targeted | — |
| 1 | 12 | FR_OEX | YCR087W | S. cerevisiae | 1660 | non-targeted | — |
| 1 | 13 | FR_OEX | YGR150C | S. cerevisiae | 1664 | non-targeted | — |
| 1 | 14 | FR_OEX | YIL172C | S. cerevisiae | 1691 | non-targeted | — |
| 1 | 15 | FR_OEX | YLR168C | S. cerevisiae | 1859 | non-targeted | 1895 |
| 1 | 16 | FR_OEX | YLR407W | S. cerevisiae | 1904 | non-targeted | — |
| 1 | 17 | FR_OEX | YNL241C | S. cerevisiae | 1920 | plastidic | 2410, 2412, 2414, 2416, 2418, 2420, 2422, |
| | | | | | | | 2424, 2426, 2428, 2430, 2432, 2434, 2436, |
| | | | | | | | 2438, 2440, 2442, 2444, 2446 |
| 1 | 18 | FR_OEX | YOR260W | S. cerevisiae | 2455 | non-targeted | — |
| 1 | 19 | FR_OEX | YOR299W | S. cerevisiae | 2477 | non-targeted | — |
| 1 | 20 | FR_OEX | YPL079W | S. cerevisiae | 2507 | non-targeted | 2637, 2639, 2641, 2643, 2645, 2647, 2649, |
| | | | | | | | 2651, 2653, 2655, 2657, 2659, 2661, 2663, |
| | | | | | | | 2665, 2667, 2669, 2671, 2673, 2675 |
| 1 | 21 | FR_OEX | YPL151C | S. cerevisiae | 2683 | non-targeted | 2735, 2737, 2739, 2741, 2743 |

TABLE IIA
Amino acid sequence ID numbers

| | | | | | 5. | | |
|---|---|---|---|---|---|---|---|
| | 1. | 2. | 3. | 4. | Lead | 6. | 7. |
| Application | Hit | Project | Locus | Organism | SEQ ID | Target | SEQ IDs of Polypeptide Homologs |
| 1 | 1 | FR_OEX | B0124 | E. coli | 39 | non-targeted | 41, 43, 45, 47, 49, 51, 53, 55, 57, 59, 61, 63, 65, 67, 69, 71, 73, |
| | | | | | | | 75, 77, 79, 81, 83, 85, 87, 89, 91, 93, 95, 97, 99, 101, 103, 105, |
| | | | | | | | 107, 109, 111, 113, 115, 117, 119, 121, 123, 125, 127, 129 |
| 1 | 2 | FR_OEX | B0730 | E. coli | 147 | non-targeted | 149, 151, 153, 155, 157 |
| 1 | 3 | FR_OEX | B1528 | E. coli | 166 | non-targeted | 168, 170, 172, 174, 176, 178, 180, 182, 184, 186, 188, 190, 192, |
| | | | | | | | 194, 196, 198, 200, 202, 204, 206, 208, 210, 212, 214, 216, 218, |
| | | | | | | | 220, 222, 224, 226, 228, 230, 232 |
| 1 | 4 | FR_OEX | B2148 | E. coli | 243 | non-targeted | 245, 247, 249, 251, 253, 255, 257, 259, 261, 263, 265, 267, 269, |
| | | | | | | | 271, 273, 275, 277, 279, 281, 283, 285, 287, 289, 291, 293, 295, |
| | | | | | | | 297, 299, 301, 303 |
| 1 | 5 | FR_OEX | B2573 | E. coli | 313 | non-targeted | 315, 317, 319, 321, 323, 325, 327, 329, 331, 333, 335, 337, 339, |
| | | | | | | | 341, 343, 345, 347, 349, 351, 353, 355, 357, 359, 361, 363, 365, |
| | | | | | | | 367, 369, 371, 373, 375, 377, 379, 381, 383, 385, 387, 389, 391, |
| | | | | | | | 393, 395, 397, 399, 401, 403, 405, 407, 409, 411, 413, 415, 417, |
| | | | | | | | 419, 421, 423, 425, 427, 429, 431, 433, 435, 437, 439, 441, 443, |
| | | | | | | | 445, 447, 449, 451, 453, 455, 457, 459, 461 |
| 1 | 6 | FR_OEX | B2600 | E. coli | 469 | plastidic | 471, 473, 475, 477, 479, 481, 483, 485, 487, 489, 491, 493, 495, |
| | | | | | | | 497, 499, 501, 503, 505, 507, 509, 511, 513, 515, 517, 519, 521, |
| | | | | | | | 523 |
| 1 | 7 | FR_OEX | B2699 | E. coli | 535 | non-targeted | 537, 539, 541, 543, 545, 547, 549, 551, 553, 555, 557, 559, 561, |
| | | | | | | | 563, 565, 567, 569, 571, 573, 575, 577, 579, 581, 583, 585, 587, |
| | | | | | | | 589, 591, 593, 595, 597, 599, 601, 603, 605, 607, 609, 611, 613, |
| | | | | | | | 615, 617, 619, 621, 623, 625, 627, 629, 631, 633, 635, 637, 639, |
| | | | | | | | 641, 643, 645, 647, 649, 651, 653, 655, 657, 659, 661, 663, 665, |
| | | | | | | | 667, 669, 671, 673, 675, 677, 679, 681, 683, 685, 687, 689, 691, |
| | | | | | | | 693, 695, 697, 699, 701, 703, 705, 707, 709, 711, 713, 715, 717, |
| | | | | | | | 719, 721, 723, 725, 727, 729, 731, 733, 735, 737, 739, 741, 743, |
| | | | | | | | 745, 747, 749, 751, 753, 755, 757, 759, 761, 763, 765, 767, 769, |
| | | | | | | | 771, 773, 775, 777, 779, 781, 783, 785, 787, 789, 791, 793, 795, |
| | | | | | | | 797, 799, 801, 803, 805, 807, 809, 811, 813, 815, 817, 819, 821, |
| | | | | | | | 823, 825, 827, 829, 831, 833, 835, 837, 839, 841, 843, 845, 847, |
| | | | | | | | 849, 851, 853, 855, 857, 859, 861, 863, 865, 867, 869, 871, 873, |
| | | | | | | | 875, 877, 879, 881, 883, 885, 887, 889, 891, 893, 895, 897, 899, |
| | | | | | | | 901, 903, 905, 907, 909, 911, 913, 915, 917, 919, 921, 923, 925, |
| | | | | | | | 927, 929, 931, 933, 935, 937 |
| 1 | 8 | FR_OEX | B2764 | E. coli | 971 | non-targeted | 973, 975, 977, 979, 981, 983, 985, 987, 989, 991, 993, 995, 997, |
| | | | | | | | 999, 1001, 1003, 1005, 1007, 1009, 1011, 1013, 1015, 1017, |
| | | | | | | | 1019, 1021, 1023, 1025, 1027, 1029, 1031, 1033, 1035, 1037, |
| | | | | | | | 1039, 1041, 1043, 1045, 1047, 1049, 1051, 1053, 1055, 1057, |
| | | | | | | | 1059, 1061, 1063, 1065, 1067, 1069, 1071, 1073, 1075, 1077, |
| | | | | | | | 1079, 1081, 1083, 1085, 1087, 1089, 1091, 1093, 1095, 1097, |
| | | | | | | | 1099, 1101, 1103, 1105, 1107, 1109, 1111, 1113, 1115, 1117, |
| | | | | | | | 1119 |
| 1 | 9 | FR_OEX | B3262 | E. coli | 1144 | non-targeted | 1146, 1148, 1150, 1152, 1154, 1156, 1158, 1160, 1162, 1164 |
| 1 | 10 | FR_OEX | B3363 | E. coli | 1175 | non-targeted | 1177, 1179, 1181, 1183, 1185, 1187, 1189, 1191, 1193, 1195, |
| | | | | | | | 1197, 1199, 1201, 1203, 1205, 1207, 1209, 1211, 1213, 1215, |
| | | | | | | | 1217, 1219, 1221, 1223, 1225, 1227, 1229, 1231, 1233, 1235, |
| | | | | | | | 1237, 1239, 1241, 1243, 1245, 1247, 1249, 1251, 1253, 1255, |
| | | | | | | | 1257, 1259, 1261, 1263, 1265, 1267, 1269, 1271, 1273, 1275, |
| | | | | | | | 1277, 1279, 1281, 1283, 1285, 1287, 1289, 1291, 1293, 1295, |
| | | | | | | | 1297, 1299, 1301, 1303, 1305, 1307, 1309, 1311, 1313, 1315, |
| | | | | | | | 1317, 1319, 1321, 1323, 1325, 1327, 1329, 1331, 1333, 1335, |
| | | | | | | | 1337, 1339, 1341, 1343, 1345, 1347, 1349, 1351, 1353, 1355, |
| | | | | | | | 1357, 1359, 1361, 1363, 1365, 1367, 1369, 1371, 1373, 1375, |
| | | | | | | | 1377, 1379, 1381, 1383, 1385, 1387, 1389, 1391, 1393, 1395, |
| | | | | | | | 1397, 1399, 1401, 1403, 1405, 1407, 1409, 1411, 1413, 1415, |
| | | | | | | | 1417, 1419, 1421, 1423, 1425, 1427, 1429, 1431, 1433, 1435, |
| | | | | | | | 1437, 1439, 1441, 1443, 1445, 1447, 1449, 1451, 1453, 1455, |
| | | | | | | | 1457, 1459, 1461, 1463, 1465, 1467, 1469, 1471, 1473, 1475, |
| | | | | | | | 1477, 1479, 1481, 1483, 1485, 1487 |
| 1 | 11 | FR_OEX | B3644 | E. coli | 1522 | non-targeted | 1524, 1526, 1528, 1530, 1532, 1534, 1536, 1538, 1540, 1542, |
| | | | | | | | 1544, 1546, 1548, 1550, 1552, 1554, 1556, 1558, 1560, 1562, |
| | | | | | | | 1564, 1566, 1568, 1570, 1572, 1574, 1576, 1578, 1580, 1582, |
| | | | | | | | 1584, 1586, 1588, 1590, 1592, 1594, 1596, 1598, 1600, 1602, |
| | | | | | | | 1604, 1606, 1608, 1610, 1612, 1614, 1616, 1618, 1620, 1622, |
| | | | | | | | 1624, 1626, 1628, 1630, 1632, 1634, 1636, 1638, 1640, 1642, |
| | | | | | | | 1644, 1646, 1648, 1650, 1652 |
| 1 | 12 | FR_OEX | YCR087W | S. cerevisiae | 1661 | non-targeted | — |
| 1 | 13 | FR_OEX | YGR150C | S. cerevisiae | 1665 | non-targeted | 1667, 1669, 1671, 1673 |
| 1 | 14 | FR_OEX | YIL172C | S. cerevisiae | 1692 | non-targeted | 1694, 1696, 1698, 1700, 1702, 1704, 1706, 1708, 1710, 1712, |
| | | | | | | | 1714, 1716, 1718, 1720, 1722, 1724, 1726, 1728, 1730, 1732, |
| | | | | | | | 1734, 1736, 1738, 1740, 1742, 1744, 1746, 1748, 1750, 1752, |
| | | | | | | | 1754, 1756, 1758, 1760, 1762, 1764, 1766, 1768, 1770, 1772, |
| | | | | | | | 1774, 1776, 1778, 1780, 1782, 1784, 1786, 1788, 1790, 1792, |
| | | | | | | | 1794, 1796, 1798, 1800, 1802, 1804, 1806, 1808, 1810, 1812, |
| | | | | | | | 1814, 1816, 1818, 1820, 1822, 1824, 1826, 1828, 1830, 1832, |
| | | | | | | | 1834, 1836, 1838, 1840, 1842, 1844, 1846, 1848, 1850 |
| 1 | 15 | FR_OEX | YLR168C | S. cerevisiae | 1860 | non-targeted | 1862, 1864, 1866, 1868, 1870, 1872, 1874, 1876, 1878, 1880, |
| | | | | | | | 1882, 1884, 1886, 1888, 1890, 1892, 1894 |
| 1 | 16 | FR_OEX | YLR407W | S. cerevisiae | 1905 | non-targeted | 1907, 1909, 1911 |
| 1 | 17 | FR_OEX | YNL241C | S. cerevisiae | 1921 | plastidic | 1923, 1925, 1927, 1929, 1931, 1933, 1935, 1937, 1939, 1941, |
| | | | | | | | 1943, 1945, 1947, 1949, 1951, 1953, 1955, 1957, 1959, 1961, |
| | | | | | | | 1963, 1965, 1967, 1969, 1971, 1973, 1975, 1977, 1979, 1981, |
| | | | | | | | 1983, 1985, 1987, 1989, 1991, 1993, 1995, 1997, 1999, 2001, |
| | | | | | | | 2003, 2005, 2007, 2009, 2011, 2013, 2015, 2017, 2019, 2021, |
| | | | | | | | 2023, 2025, 2027, 2029, 2031, 2033, 2035, 2037, 2039, 2041, |
| | | | | | | | 2043, 2045, 2047, 2049, 2051, 2053, 2055, 2057, 2059, 2061, |
| | | | | | | | 2063, 2065, 2067, 2069, 2071, 2073, 2075, 2077, 2079, 2081, |
| | | | | | | | 2083, 2085, 2087, 2089, 2091, 2093, 2095, 2097, 2099, 2101, |
| | | | | | | | 2103, 2105, 2107, 2109, 2111, 2113, 2115, 2117, 2119, 2121, |
| | | | | | | | 2123, 2125, 2127, 2129, 2131, 2133, 2135, 2137, 2139, 2141, |
| | | | | | | | 2143, 2145, 2147, 2149, 2151, 2153, 2155, 2157, 2159, 2161, |
| | | | | | | | 2163, 2165, 2167, 2169, 2171, 2173, 2175, 2177, 2179, 2181, |
| | | | | | | | 2183, 2185, 2187, 2189, 2191, 2193, 2195, 2197, 2199, 2201, |
| | | | | | | | 2203, 2205, 2207, 2209, 2211, 2213, 2215, 2217, 2219, 2221, |
| | | | | | | | 2223, 2225, 2227, 2229, 2231, 2233, 2235, 2237, 2239, 2241, |
| | | | | | | | 2243, 2245, 2247, 2249, 2251, 2253, 2255, 2257, 2259, 2261, |
| | | | | | | | 2263, 2265, 2267, 2269, 2271, 2273, 2275, 2277, 2279, 2281, |
| | | | | | | | 2283, 2285, 2287, 2289, 2291, 2293, 2295, 2297, 2299, 2301, |
| | | | | | | | 2303, 2305, 2307, 2309, 2311, 2313, 2315, 2317, 2319, 2321, |
| | | | | | | | 2323, 2325, 2327, 2329, 2331, 2333, 2335, 2337, 2339, 2341, |
| | | | | | | | 2343, 2345, 2347, 2349, 2351, 2353, 2355, 2357, 2359, 2361, |
| | | | | | | | 2363, 2365, 2367, 2369, 2371, 2373, 2375, 2377, 2379, 2381, |
| | | | | | | | 2383, 2385, 2387, 2389, 2391, 2393, 2395, 2397, 2399, 2401, |
| | | | | | | | 2403, 2405, 2407, 2409 |
| 1 | 18 | FR_OEX | YOR260W | S. cerevisiae | 2456 | non-targeted | 2458, 2460, 2462, 2464, 2466 |
| 1 | 19 | FR_OEX | YOR299W | S. cerevisiae | 2478 | non-targeted | 2480, 2482, 2484, 2486, 2488, 2490, 2492 |
| 1 | 20 | FR_OEX | YPL079W | S. cerevisiae | 2508 | non-targeted | 2510, 2512, 2514, 2516, 2518, 2520, 2522, 2524, 2526, 2528, |
| | | | | | | | 2530, 2532, 2534, 2536, 2538, 2540, 2542, 2544, 2546, 2548, |
| | | | | | | | 2550, 2552, 2554, 2556, 2558, 2560, 2562, 2564, 2566, 2568, |
| | | | | | | | 2570, 2572, 2574, 2576, 2578, 2580, 2582, 2584, 2586, 2588, |
| | | | | | | | 2590, 2592, 2594, 2596, 2598, 2600, 2602, 2604, 2606, 2608, |
| | | | | | | | 2610, 2612, 2614, 2616, 2618, 2620, 2622, 2624, 2626, 2628, |
| | | | | | | | 2630, 2632, 2634, 2636 |
| 1 | 21 | FR_OEX | YPL151C | S. cerevisiae | 2684 | non-targeted | 2686, 2688, 2690, 2692, 2694, 2696, 2698, 2700, 2702, 2704, |
| | | | | | | | 2706, 2708, 2710, 2712, 2714, 2716, 2718, 2720, 2722, 2724, |
| | | | | | | | 2726, 2728, 2730, 2732, 2734 |

TABLE IIB
Amino acid sequence ID numbers

| | | | | | 5. | | |
|---|---|---|---|---|---|---|---|
| | 1. | 2. | 3. | 4. | Lead | 6. | 7. |
| Application | Hit | Project | Locus | Organism | SEQ ID | Target | SEQ IDs of Polypeptide Homologs |
| 1 | 1 | FR_OEX | B0124 | E. coli | 39 | non-targeted | — |
| 1 | 2 | FR_OEX | B0730 | E. coli | 147 | non-targeted | — |
| 1 | 3 | FR_OEX | B1528 | E. coli | 166 | non-targeted | — |
| 1 | 4 | FR_OEX | B2148 | E. coli | 243 | non-targeted | — |
| 1 | 5 | FR_OEX | B2573 | E. coli | 313 | non-targeted | — |
| 1 | 6 | FR_OEX | B2600 | E. coli | 469 | plastidic | — |
| 1 | 7 | FR_OEX | B2699 | E. coli | 535 | non-targeted | 939, 941, 943, 945, 947, 949, 951, 953, 955 |
| 1 | 8 | FR_OEX | B2764 | E. coli | 971 | non-targeted | 1121, 1123, 1125, 1127, 1129, 1131 |
| 1 | 9 | FR_OEX | B3262 | E. coli | 1144 | non-targeted | — |
| 1 | 10 | FR_OEX | B3363 | E. coli | 1175 | non-targeted | 1489, 1491, 1493, 1495, 1497, 1499, 1501, 1503, |
| | | | | | | | 1505, 1507, 1509, 1511, 1513 |
| 1 | 11 | FR_OEX | B3644 | E. coli | 1522 | non-targeted | — |
| 1 | 12 | FR_OEX | YCR087W | S. cerevisiae | 1661 | non-targeted | — |
| 1 | 13 | FR_OEX | YGR150C | S. cerevisiae | 1665 | non-targeted | — |
| 1 | 14 | FR_OEX | YIL172C | S. cerevisiae | 1692 | non-targeted | — |
| 1 | 15 | FR_OEX | YLR168C | S. cerevisiae | 1860 | non-targeted | 1896 |
| 1 | 16 | FR_OEX | YLR407W | S. cerevisiae | 1905 | non-targeted | — |
| 1 | 17 | FR_OEX | YNL241C | S. cerevisiae | 1921 | plastidic | 2411, 2413, 2415, 2417, 2419, 2421, 2423, 2425, |
| | | | | | | | 2427, 2429, 2431, 2433, 2435, 2437, 2439, 2441, |
| | | | | | | | 2443, 2445, 2447 |
| 1 | 18 | FR_OEX | YOR260W | S. cerevisiae | 2456 | non-targeted | — |
| 1 | 19 | FR_OEX | YOR299W | S. cerevisiae | 2478 | non-targeted | — |
| 1 | 20 | FR_OEX | YPL079W | S. cerevisiae | 2508 | non-targeted | 2638, 2640, 2642, 2644, 2646, 2648, 2650, 2652, |
| | | | | | | | 2654, 2656, 2658, 2660, 2662, 2664, 2666, 2668, |
| | | | | | | | 2670, 2672, 2674, 2676 |
| 1 | 21 | FR_OEX | YPL151C | S. cerevisiae | 2684 | non-targeted | 2736, 2738, 2740, 2742, 2744 |

TABLE III
Primer nucleic acid sequence ID numbers

| | | | | | 5. | | |
|---|---|---|---|---|---|---|---|
| | 1. | 2. | 3. | 4. | Lead | 6. | 7. |
| Application | Hit | Project | Locus | Organism | SEQ ID | Target | SEQ IDs of Primers |
| 1 | 1 | FR_OEX | B0124 | E. coli | 38 | non-targeted | 130, 131 |
| 1 | 2 | FR_OEX | B0730 | E. coli | 146 | non-targeted | 158, 159 |
| 1 | 3 | FR_OEX | B1528 | E. coli | 165 | non-targeted | 233, 234 |
| 1 | 4 | FR_OEX | B2148 | E. coli | 242 | non-targeted | 304, 305 |
| 1 | 5 | FR_OEX | B2573 | E. coli | 312 | non-targeted | 462, 463 |
| 1 | 6 | FR_OEX | B2600 | E. coli | 468 | plastidic | 524, 525 |
| 1 | 7 | FR_OEX | B2699 | E. coli | 534 | non-targeted | 956, 957 |
| 1 | 8 | FR_OEX | B2764 | E. coli | 970 | non-targeted | 1132, 1133 |
| 1 | 9 | FR_OEX | B3262 | E. coli | 1143 | non-targeted | 1165, 1166 |
| 1 | 10 | FR_OEX | B3363 | E. coli | 1174 | non-targeted | 1514, 1515 |
| 1 | 11 | FR_OEX | B3644 | E. coli | 1521 | non-targeted | 1653, 1654 |
| 1 | 12 | FR_OEX | YCR087W | S. cerevisiae | 1660 | non-targeted | 1662, 1663 |
| 1 | 13 | FR_OEX | YGR150C | S. cerevisiae | 1664 | non-targeted | 1674, 1675 |
| 1 | 14 | FR_OEX | YIL172C | S. cerevisiae | 1691 | non-targeted | 1851, 1852 |
| 1 | 15 | FR_OEX | YLR168C | S. cerevisiae | 1859 | non-targeted | 1897, 1898 |
| 1 | 16 | FR_OEX | YLR407W | S. cerevisiae | 1904 | non-targeted | 1912, 1913 |
| 1 | 17 | FR_OEX | YNL241C | S. cerevisiae | 1920 | plastidic | 2448, 2449 |
| 1 | 18 | FR_OEX | YOR260W | S. cerevisiae | 2455 | non-targeted | 2467, 2468 |
| 1 | 19 | FR_OEX | YOR299W | S. cerevisiae | 2477 | non-targeted | 2493, 2494 |
| 1 | 20 | FR_OEX | YPL079W | S. cerevisiae | 2507 | non-targeted | 2677, 2678 |
| 1 | 21 | FR_OEX | YPL151C | S. cerevisiae | 2683 | non-targeted | 2745, 2746 |

TABLE IV
Consensus amino acid sequence ID numbers

| | | | | | 5. | | |
|---|---|---|---|---|---|---|---|
| | 1. | 2. | 3. | 4. | Lead | 6. | 7. |
| Application | Hit | Project | Locus | Organism | SEQ ID | Target | SEQ IDs of Consensus/Pattern Sequences |
| 1 | 1 | FR_OEX | B0124 | E. coli | 39 | non-targeted | 132, 133, 134, 135, 136, 137, 138, 139, 140, 141, 142, 143, 144, |
| | | | | | | | 145 |
| 1 | 2 | FR_OEX | B0730 | E. coli | 147 | non-targeted | 160, 161, 162, 163, 164 |
| 1 | 3 | FR_OEX | B1528 | E. coli | 166 | non-targeted | 235, 236, 237, 238, 239, 240, 241 |
| 1 | 4 | FR_OEX | B2148 | E. coli | 243 | non-targeted | 306, 307, 308, 309, 310, 311 |
| 1 | 5 | FR_OEX | B2573 | E. coli | 313 | non-targeted | 464, 465, 466, 467 |
| 1 | 6 | FR_OEX | B2600 | E. coli | 469 | plastidic | 526, 527, 528, 529, 530, 531, 532, 533 |
| 1 | 7 | FR_OEX | B2699 | E. coli | 535 | non-targeted | 958, 959, 960, 961, 962, 963, 964, 965, 966, 967, 968, 969 |
| 1 | 8 | FR_OEX | B2764 | E. coli | 971 | non-targeted | 1134, 1135, 1136, 1137, 1138, 1139, 1140, 1141, 1142 |
| 1 | 9 | FR_OEX | B3262 | E. coli | 1144 | non-targeted | 1167, 1168, 1169, 1170, 1171, 1172, 1173 |
| 1 | 10 | FR_OEX | B3363 | E. coli | 1175 | non-targeted | 1516, 1517, 1518, 1519, 1520 |
| 1 | 11 | FR_OEX | B3644 | E. coli | 1522 | non-targeted | 1655, 1656, 1657, 1658, 1659 |
| 1 | 12 | FR_OEX | YCR087W | S. cerevisiae | 1661 | non-targeted | — |
| 1 | 13 | FR_OEX | YGR150C | S. cerevisiae | 1665 | non-targeted | 1676, 1677, 1678, 1679, 1680, 1681, 1682, 1683, 1684, 1685, |
| | | | | | | | 1686, 1687, 1688, 1689, 1690 |
| 1 | 14 | FR_OEX | YIL172C | S. cerevisiae | 1692 | non-targeted | 1853, 1854, 1855, 1856, 1857, 1858 |
| 1 | 15 | FR_OEX | YLR168C | S. cerevisiae | 1860 | non-targeted | 1899, 1900, 1901, 1902, 1903 |
| 1 | 16 | FR_OEX | YLR407W | S. cerevisiae | 1905 | non-targeted | 1914, 1915, 1916, 1917, 1918, 1919 |
| 1 | 17 | FR_OEX | YNL241C | S. cerevisiae | 1921 | plastidic | 2450, 2451, 2452, 2453, 2454 |
| 1 | 18 | FR_OEX | YOR260W | S. cerevisiae | 2456 | non-targeted | 2469, 2470, 2471, 2472, 2473, 2474, 2475, 2476 |
| 1 | 19 | FR_OEX | YOR299W | S. cerevisiae | 2478 | non-targeted | 2495, 2496, 2497, 2498, 2499, 2500, 2501, 2502, 2503, 2504, |
| | | | | | | | 2505, 2506 |
| 1 | 20 | FR_OEX | YPL079W | S. cerevisiae | 2508 | non-targeted | 2679, 2680, 2681, 2682 |
| 1 | 21 | FR_OEX | YPL151C | S. cerevisiae | 2684 | non-targeted | 2747, 2748 |

The application's sequence listing, which the Patent Office published only in electronic form, follows.

SEQUENCE LISTING (2748 sequences)

SEQ ID NO: 1 - DNA, 8659 bp, Artificial Sequence
  plasmid pMTX155
agcttggacaatcagtaaattgaacggagaatattattcataaaaatacgatagtaacgggtgatatattcattagaatgaaccgaaaccggcggtaaggatctgagctacacatgctcaggttttttacaacgtgcacaacagaattgaaagcaaatatcatgcgatcataggcgtctcgcatatctcattaaagcagggcatgccggtcgagtcaaatctcggtgacgggcaggaccggacggggcggtaccggcaggctgaagtccagctgccagaaacccacgtcatgccagttcccgtgcttgaagccggccgcccgcagcatgccgcggggggcatatccgagcgcctcgtgcatgcgcacgctcgggtcgttgggcagcccgatgacagcgaccacgctcttgaagccctgtgcctccagggacttcagcaggtgggtgtagagcgtggagcccagtcccgtccgctggtggcggggggagacgtacacggtcgactcggccgtccagtcgtaggcgttgcgtgccttccaggggcccgcgtaggcgatgccggcgacctcgccgtccacctcggcgacgagccagggatagcgctcccgcagacggacgaggtcgtccgtccactcctgcggttcctgcggctcggtacggaagttgaccgtgcttgtctcgatgtagtggttgacgatggtgcagaccgccggcatgtccgcctcggtggcacggcggatgtcggccgggcgtcgttctgggctcatggtagactcgacggatccacgtgtggaagatatgaatttttttgagaaactagataagattaatgaatatcggtgttttggttttttcttgtggccgtctttgtttatattgagatttttcaaatcagtgcgcaagacgtgacgtaagtatccgagtcagtttttatttttctactaatttggtcgaagctttgggcggatcctctagagcagcttgccaacatggtggagcacgacactctcgtctactccaagaatatcaaagatacagtctcagaagaccaaagggctattgagacttttcaacaaagggtaatatcgggaaacctcctcggattccattgcccagctatctgtcacttcatcaaaaggacagtagaaaaggaaggtggcacctacaaatgccatcattgcgataaaggaaaggctatcgttcaagatgcctctgccgacagtggtcccaaagatggacccccacccacgaggagcatcgtggaaaaagaagacgttccaaccacgtcttcaaagcaagtggattgatgtgaacatggtggagcacgacactctcgtctactccaagaatatcaaagatacagtctcagaagaccaaagggctattgagacttttcaacaaagggtaatatcgggaaacctcctcggattccattgcccagctatctgtcacttcatcaaaaggacagtagaaaaggaaggtggcacctacaaatgccatcattgcgataaaggaaaggctatcgttcaagatgcctctgccgacagtggtcccaaagatggacccccacccacgaggagcatcgtggaaaaagaagacgttccaaccacgtcttcaaagcaagtggattgatgtgatatctccactgacgtaagggatgacgcacaatcccactatccttcgcaagacccttcctctatataaggaagttcatttcatttggagaggacagggtaccctggaattccagctgaccaccatggcaattcccggggatcagctcgaatttccccgatcgttcaaacatttggcaataaagtttcttaagattgaatcctgttgccggtcttgcgatgattatcatataatttctgttgaattacgttaagcatgtaataattaacatgtaatgcatgacgttatttatgagatgggtttttatgattagagtcccgcaattatacatttaatacgcgatagaaaacaaaatatagcgcgcaaactaggataaattatcgcgcgcggtgtcatctatgttactagatcgggaattggcatgcaagcttggcactggccgtcgttttacaacgtcgtgactgggaaaaccctggcgttacccaacttaatcgccttgcagcacatccccctttcgccagctggcgtaatagcgaagaggcccgcaccgatcgcccttcccaacagttgcgcagcctgaatggcgaatgctagagcagcttgagcttggatcagattgtcgtttcccgccttcagtttaaactatcagtgtttgacaggatatattggcgggtaaacctaagagaaaagagcgtttattagaataacggatatttaaaagggcgtgaaaaggtttatccgttcgtccatttgtatgtgcatgccaaccacagggttcccctcgggatcaaagtactttgatccaacccctccgctgctatagtgcagtcggcttctgacgttcagtgcagccgtcttctgaaaacgacatgtcgcacaagtcctaagttacgcgacaggctgccgccctgcccttttcctggcgttttcttgtcgcgtgttttagtcgcataaagtagaatacttgcgactagaaccggagacattacgccatgaacaagagcgccgccgctggcctgctgggctatgcccgcgtcagcaccgacgaccaggacttgaccaaccaacgggccgaactgcacgcggccggctgcaccaagctgttttccgagaagatcaccggcaccaggcgcgaccgcccggagctggccaggatgcttgaccacctacgccctggcgacgttgtgacagtgaccaggctagaccgcctggcccgcagcacccgcgacctactggacattgccgagcgcatccaggaggccggcgcgggcctgcgtagcctggcagagccgtgggccgacaccaccacgccggccggccgcatggtgttgaccgtgttcgccggcattgccgagttcgagcgttccctaatcatcgaccgcacccggagcgggcgcgaggccgccaaggcccgaggcgtgaagtttggcccccgccctaccctcaccccggcacagatcgcgcacgcccgcgagctgatcgaccaggaaggccgcaccgtgaaagaggcggctgcactgcttggcgtgcatcgctcgaccctgtaccgcgcacttgagcgcagcgaggaagtgacgcccaccgaggccaggcggcgcggtgccttccgtgaggacgcattgaccgaggccgacgccctggcggccgccgagaatgaacgccaagaggaacaagcatgaaaccgcaccaggacggccaggacgaaccgtttttcattaccgaagagatcgaggcggagatgatcgcggccgggtacgtgttcgagccgcccgcgcacgtctcaaccgtgcggctgcatgaaatcctggccggtttgtctgatgccaagctggcggcctggccggccagcttggccgctgaagaaaccgagcgccgccgtctaaaaaggtgatgtgtatttgagtaaaacagcttgcgtcatgcggtcgctgcgtatatgatgcgatgagtaaataaacaaatacgcaaggggaacgcatgaaggttatcgctgtacttaaccagaaaggcgggtcaggcaagacgaccatcgcaacccatctagcccgcgccctgcaactcgccggggccgatgttctgttagtcgattccgatccccagggcagtgcccgcgattgggcggccgtgcgggaagatcaaccgctaaccgttgtcggcatcgaccgcccgacgattgaccgcgacgtgaaggccatcggccggcgcgacttcgtagtgatcgacggagcgccccaggcggcggacttggctgtgtccgcgatcaaggcagccgacttcgtgctgattccggtgcagccaagcccttacgacatatgggccaccgccgacctggtggagctggttaagcagcgcattgaggtcacggatggaaggctacaagcggcctttgtcgtgtcgcgggcgatcaaaggcacgcgcatcggcggtgaggttgccgaggcgctggccgggtacgagctgcccattcttgagtcccgtatcacgcagcgcgtgagctacccaggcactgccgccgccggcacaaccgttcttgaatcagaacccgagggcgacgctgcccgcgaggtccaggcgctggccgctgaaattaaatcaaaactcatttgagttaatgaggtaaagagaaaatgagcaaaagcacaaacacgctaagtgccggccgtccgagcgcacgcagcagcaaggctgcaacgttggccagcctggcagacacgccagccatgaagcgggtcaactttcagttgccggcggaggatcacaccaagctgaagatgtacgcggtacgccaaggcaagaccattaccgagctgctatctgaatacatcgcgcagctaccagagtaaatgagcaaatgaataaatgagtagatgaattttagcggctaaaggaggcggcatggaaaatcaagaacaaccaggcaccgacgccgtggaatgccccatgtgtggaggaacgggcggttggccaggcgtaagcggctgggttgtctgccggccctgcaatggcactggaacccccaagcccgaggaatcggcgtgacggtcgcaaaccatccggcccggtacaaatcggcgcggcgctgggtgatgacctggtggagaagttgaaggccgcgcaggccgcccagcggcaacgcatcgaggcagaagcacgccccggtgaatcgtggcaagcggccgctgatcgaatccgcaaagaatcccggcaaccgccggcagccggtgcgccgtcgattaggaagccgcccaagggcgacgagcaaccagattttttcgttccgatgctctatgacgtgggcacccgcgatagtcgcagcatcatggacgtggccgttttccgtctgtcgaagcgtgaccgacgagctggcgaggtgatccgctacgagcttccagacgggcacgtagaggtttccgcagggccggccggcatggccagtgtgtgggattacgacctggtactgatggcggtttcccatctaaccgaatccatgaaccgataccgggaagggaagggagacaagcccggccgcgtgttccgtccacacgttgcggacgtactcaagttctgccggcgagccgatggcggaaagcagaaagacgacctggtagaaacctgcattcggttaaacaccacgcacgttgccatgcagcgtacgaagaaggccaagaacggccgcctggtgacggtatccgagggtgaagccttgattagccgctacaagatcgtaaagagcgaaaccgggcggccggagtacatcgagatcgagctagctgattggatgtaccgcgagatcacagaaggcaagaacccggacgtgctgacggttcaccccgattactttttgatcgatcccggcatcggccgttttctctaccgcctggcacgccgcgccgcaggcaaggcagaagccagatggttgttcaagacgatctacgaacgcagtggcagcgccggagagttcaagaagttctgtttcaccgtgcgcaagctgatcgggtcaaatgacctgccggagtacgatttgaaggaggaggcggggcaggctggcccgatcctagtcatgcgctaccgcaacctgatcgagggcgaagcatccgccggttcctaatgtacggagcagatgctagggcaaattgccctagcaggggaaaaaggtcgaaaaggtctctttcctgtggatagcacgtacattgggaacccaaagccgtacattgggaaccggaacccgtacattgggaacccaaagccgtacattgggaaccggtcacacatgtaagtgactgatataaaagagaaaaaaggcgatttttccgcctaaaactctttaaaacttattaaaactcttaaaacccgcctggcctgtgcataactgtctggccagcgcacagccgaagagctgcaaaaagcgcctacccttcggtcgctgcgctccctacgccccgccgcttcgcgtcggcctatcgcggccgctggccgctcaaaaatggctggcctacggccaggcaatctaccagggcgcggacaagccgcgccgtcgccactcgaccgccggcgcccacatcaaggcaccctgcctcgcgcgtttcggtgatgacggtgaaaacctctgacacatgcagctcccggagacggtcacagcttgtctgtaagcggatgccgggagcagacaagcccgtcagggcgcgtcagcgggtgttggcgggtgtcggggcgcagccatgacccagtcacgtagcgatagcggagtgtatactggcttaactatgcggcatcagagcagattgtactgagagtgcaccatatgcggtgtgaaataccgcacagatgcgtaaggagaaaataccgcatcaggcgctcttccgcttcctcgctcactgactcgctgcgctcggtcgttcggctgcggcgagcggtatcagctcactcaaaggcggtaatacggttatccacagaatcaggggataacgcaggaaagaacatgtgagcaaaaggccagcaaaaggccaggaaccgtaaaaaggccgcgttgctggcgtttttccataggctccgcccccctgacgagcatcacaaaaatcgacgctcaagtcagaggtggcgaaacccgacaggactataaagataccaggcgtttccccctggaagctccctcgtgcgctctcctgttccgaccctgccgcttaccggatacctgtccgcctttctcccttcgggaagcgtggcgctttctcatagctcacgctgtaggtatctcagttcggtgtaggtcgttcgctccaagctgggctgtgtgcacgaaccccccgttcagcccgaccgctgcgccttatccggtaactatcgtcttgagtccaacccggtaagacacgacttatcgccactggcagcagccactggtaacaggattagcagagcgaggtatgtaggcggtgctacagagttcttgaagtggtggcctaactacggctacactagaaggacagtatttggtatctgcgctctgctgaagccagttaccttcggaaaaagagttggtagctcttgatccggcaaacaaaccaccgctggtagcggtggtttttttgtttgcaagcagcagattacgcgcagaaaaaaaggatctcaagaagatcctttgatcttttctacggggtctgacgctcagtggaacgaaaactcacgttaagggattttggtcatgcattctaggtactaaaacaattcatccagtaaaatataatattttattttctcccaatcaggcttgatccccagtaagtcaaaaaatagctcgacatactgttcttccccgatatcctccctgatcgaccggacgcagaaggcaatgtcataccacttgtccgccctgccgcttctcccaagatcaataaagccacttactttgccatctttcacaaagatgttgctgtctcccaggtcgccgtgggaaaagacaagttcctcttcgggcttttccgtctttaaaaaatcatacagctcgcgcggatctttaaatggagtgtcttcttcccagttttcgcaatccacatcggccagatcgttattcagtaagtaatccaattcggctaagcggctgtctaagctattcgtatagggacaatccgatatgtcgatggagtgaaagagcctgatgcactccgcatacagctcgataatcttttcagggctttgttcatcttcatactcttccgagcaaaggacgccatcggcctcactcatgagcagattgctccagccatcatgccgttcaaagtgcaggacctttggaacaggcagctttccttccagccatagcatcatgtccttttcccgttccacatcataggtggtccctttataccggctgtccgtcatttttaaatataggttttcattttctcccaccagcttatataccttagcaggagacattccttccgtatcttttacgcagcggtatttttcgatcagttttttcaattccggtgatattctcattttagccatttattatttccttcctcttttctacagtatttaaagataccccaagaagctaattataacaagacgaactccaattcactgttccttgcattctaaaaccttaaataccagaaaacagctttttcaaagttgttttcaaagttggcgtataacatagtatcgacggagccgattttgaaaccgcggtgatcacaggcagcaacgctctgtcatcgttacaatcaacatgctaccctccgcgagatcatccgtgtttcaaacccggcagcttagttgccgttcttccgaatagcatcggtaacatgagcaaagtctgccgccttacaacggctctcccgctgacgccgtcccggactgatgggctgcctgtatcgagtggtgattttgtgccgagctgccggtcggggagctgttggctggctggtggcaggatatattgtggtgtaaacaaattgacgcttagacaacttaataacacattgcggacgtttttaatgtactgaattaacgccgaatta

SEQ ID NO: 2 - DNA, 9469 bp, Artificial Sequence
  plasmid VC-MME354-1QCZ
  5'UTR (2130)..(2294)
  transit_peptide (2295)..(2402)
  CDS (2295)..(2402)
  transit_peptide (2480)..(2548)
  CDS (2480)..(2548)
  CDS (2549)..(2566): adapter
agctttgggcggatcctctagaggacaatcagtaaattgaacggagaatattattcataaaaatacgatagtaacgggtgatatattcattagaatgaaccgaaaccggcggtaaggatctgagctacacatgctcaggttttttacaacgtgcacaacagaattgaaagcaaatatcatgcgatcataggcgtctcgcatatctcattaaagcagggcatgccggtcgagtcaaatctcggtgacgggcaggaccggacggggcggtaccggcaggctgaagtccagctgccagaaacccacgtcatgccagttcccgtgcttgaagccggccgcccgcagcatgccgcggggggcatatccgagcgcctcgtgcatgcgcacgctcgggtcgttgggcagcccgatgacagcgaccacgctcttgaagccctgtgcctccagggacttcagcaggtgggtgtagagcgtggagcccagtcccgtccgctggtggcggggggagacgtacacggtcgactcggccgtccagtcgtaggcgttgcgtgccttccaggggcccgcgtaggcgatgccggcgacctcgccgtccacctcggcgacgagccagggatagcgctcccgcagacggacgaggtcgtccgtccactcctgcggttcctgcggctcggtacggaagttgaccgtgcttgtctcgatgtagtggttgacgatggtgcagaccgccggcatgtccgcctcggtggcacggcggatgtcggccgggcgtcgttctgggctcatggtagactcgacggatccacgtgtggaagatatgaatttttttgagaaactagataagattaatgaatatcggtgttttggttttttcttgtggccgtctttgtttatattgagatttttcaaatcagtgcgcaagacgtgacgtaagtatccgagtcagtttttatttttctactaatttggtcgaatctagattcgacggtatcgataagctcgcggatccctgaaagcgacgttggatgttaacatctacaaattgccttttcttatcgaccatgtacgtaagcgcttacgtttttggtggacccttgaggaaactggtagctgttgtgggcctgtggtctcaagatggatcattaatttccaccttcacctacgatggggggcatcgcaccggtgagtaatattgtacggctaagagcgaatttggcctgtaggatccctgaaagcgacgttggatgttaacatctacaaattgccttttcttatcgaccatgtacgtaagcgcttacgtttttggtggacccttgaggaaactggtagctgttgtgggcctgtggtctcaagatggatcattaatttccaccttcacctacgatggggggcatcgcaccggtgagtaatattgtacggctaagagcgaatttggcctgtaggatccctgaaagcgacgttggatgttaacatctacaaattgccttttcttatcgaccatgtacgtaagcgcttacgtttttggtggacccttgaggaaactggtagctgttgtgggcctgtggtctcaagatggatcattaatttccaccttcacctacgatggggggcatcgcaccggtgagtaatattgtacggctaagagcgaatttggcctgtaggatccgcgagctggtcaatcccattgcttttgaagcagctcaacattgatctctttctcgatcgagggagatttttcaaatcagtgcgcaagacgtgacgtaagtatccgagtcagtttttatttttctactaatttggtcgtttatttcggcgtgtaggacatggcaaccgggcctgaatttcgcgggtattctgtttctattccaactttttcttgatccgcagccattaacgacttttgaatagatacgctgacacgccaagcctcgctagtcaaaagtgtaccaaacaacgctttacagcaagaacggaatgcgcgtgacgctcgcggtgacgccatttcgccttttcagaaatggataaatagccttgcttcctattatatcttcccaaattaccaatacattacactagcatctgaatttcataaccaatctcgatacaccaaatcgaagatctccctggaattcgcataaacttatcttcatagttgccactccaatttgctccttgaatctcctccacccaatacataatccactcctccatcacccacttcactactaaatcaaacttaactctgtttttctctctcctcctttcatttcttattcttccaatcatcgtactccgccatgaccaccgctgtcaccgccgctgtttctttcccctctaccaaaaccacctctctctccgcccgaagctcctccgtcatttcccctgacaaaatcagctacaaaaaggtgattcccaatttcactgtgttttttattaataatttgttattttgatgatgagatgattaatttgggtgctgcaggttcctttgtactacaggaatgtatctgcaactgggaaaatgggacccatcagggcccagatcgcctctgaattccagctgaccaccatggcaattcccggggatcagctcgaatttccccgatcgttcaaacatttggcaataaagtttcttaagattgaatcctgttgccggtcttgcgatgattatcatataatttctgttgaattacgttaagcatgtaataattaacatgtaatgcatgacgttatttatgagatgggtttttatgattagagtcccgcaattatacatttaatacgcgatagaaaacaaaatatagcgcgcaaactaggataaattatcgcgcgcggtgtcatctatgttactagatcgggaattggcatgcaagcttggcactggccgtcgttttacaacgtcgtgactgggaaaaccctggcgttacccaacttaatcgccttgcagcacatccccctttcgccagctggcgtaatagcgaagaggcccgcaccgatcgcccttcccaacagttgcgcagcctgaatggcgaatgctagagcagcttgagcttggatcagattgtcgtttcccgccttcagtttaaactatcagtgtttgacaggatatattggcgggtaaacctaagagaaaagagcgtttattagaataatcggatatttaaaagggcgtgaaaaggtttatccgttcgtccatttgtatgtgcatgccaaccacagggttcccctcgggatcaaagtactttgatccaacccctccgctgctatagtgcagtcggcttctgacgttcagtgcagccgtcttctgaaaacgacatgtcgcacaagtcctaagttacgcgacaggctgccgccctgcccttttcctggcgttttcttgtcgcgtgttttagtcgcataaagtagaatacttgcgactagaaccggagacattacgccatgaacaagagcgccgccgctggcctgctgggctatgcccgcgtcagcaccgacgaccaggacttgaccaaccaacgggccgaactgcacgcggccggctgcaccaagctgttttccgagaagatcaccggcaccaggcgcgaccgcccggagctggccaggatgcttgaccacctacgccctggcgacgttgtgacagtgaccaggctagaccgcctggcccgcagcacccgcgacctactggacattgccgagcgcatccaggaggccggcgcgggcctgcgtagcctggcagagccgtgggccgacaccaccacgccggccggccgcatggtgttgaccgtgttcgccggcattgccgagttcgagcgttccctaatcatcgaccgcacccggagcgggcgcgaggccgccaaggcccgaggcgtgaagtttggcccccgccctaccctcaccccggcacagatcgcgcacgcccgcgagctgatcgaccaggaaggccgcaccgtgaaagaggcggctgcactgcttggcgtgcatcgctcgaccctgtaccgcgcacttgagcgcagcgaggaagtgacgcccaccgaggccaggcggcgcggtgccttccgtgaggacgcattgaccgaggccgacgccctggcggccgccgagaatgaacgccaagaggaacaagcatgaaaccgcaccaggacggccaggacgaaccgtttttcattaccgaagagatcgaggcggagatgatcgcggccgggtacgtgttcgagccgcccgcgcacgtctcaaccgtgcggctgcatgaaatcctggccggtttgtctgatgccaagctggcggcctggccggccagcttggccgctgaagaaaccgagcgccgccgtctaaaaaggtgatgtgtatttgagtaaaacagcttgcgtcatgcggtcgctgcgtatatgatgcgatgagtaaataaacaaatacgcaaggggaacgcatgaaggttatcgctgtacttaaccagaaaggcgggtcaggcaagacgaccatcgcaacccatctagcccgcgccctgcaactcgccggggccgatgttctgttagtcgattccgatccccagggcagtgcccgcgattgggcggccgtgcgggaagatcaaccgctaaccgttgtcggcatcgaccgcccgacgattgaccgcgacgtgaaggccatcggccggcgcgacttcgtagtgatcgacggagcgccccaggcggcggacttggctgtgtccgcgatcaaggcagccgacttcgtgctgattccggtgcagccaagcccttacgacatatgggccaccgccgacctggtggagctggttaagcagcgcattgaggtcacggatggaaggctacaagcggcctttgtcgtgtcgcgggcgatcaaaggcacgcgcatcggcggtgaggttgccgaggcgctggccgggtacgagctgcccattcttgagtcccgtatcacgcagcgcgtgagctacccaggcactgccgccgccggcacaaccgttcttgaatcagaacccgagggcgacgctgcccgcgaggtccaggcgctggccgctgaaattaaatcaaaactcatttgagttaatgaggtaaagagaaaatgagcaaaagcacaaacacgctaagtgccggccgtccgagcgcacgcagcagcaaggctgcaacgttggccagcctggcagacacgccagccatgaagcgggtcaactttcagttgccggcggaggatcacaccaagctgaagatgtacgcggtacgccaaggcaagaccattaccgagctgctatctgaatacatcgcgcagctaccagagtaaatgagcaaatgaataaatgagtagatgaattttagcggctaaaggaggcggcatggaaaatcaagaacaaccaggcaccgacgccgtggaatgccccatgtgtggaggaacgggcggttggccaggcgtaagcggctgggttgcctgccggccctgcaatggcactggaacccccaagcccgaggaatcggcgtgagcggtcgcaaaccatccggcccggtacaaatcggcgcggcgctgggtgatgacctggtggagaagttgaaggccgcgcaggccgcccagcggcaacgcatcgaggcagaagcacgccccggtgaatcgtggcaagcggccgctgatcgaatccgcaaagaatcccggcaaccgccggcagccggtgcgccgtcgattaggaagccgcccaagggcgacgagcaaccagattttttcgttccgatgctctatgacgtgggcacccgcgatagtcgcagcatcatggacgtggccgttttccgtctgtcgaagcgtgaccgacgagctggcgaggtgatccgctacgagcttccagacgggcacgtagaggtttccgcagggccggccggcatggccagtgtgtgggattacgacctggtactgatggcggtttcccatctaaccgaatccatgaaccgataccgggaagggaagggagacaagcccggccgcgtgttccgtccacacgttgcggacgtactcaagttctgccggcgagccgatggcggaaagcagaaagacgacctggtagaaacctgcattcggttaaacaccacgcacgttgccatgcagcgtacgaagaaggccaagaacggccgcctggtgacggtatccgagggtgaagccttgattagccgctacaagatcgtaaagagcgaaaccgggcggccggagtacatcgagatcgagctagctgattggatgtaccgcgagatcacagaaggcaagaacccggacgtgctgacggttcaccccgattactttttgatcgatcccggcatcggccgttttctctaccgcctggcacgccgcgccgcaggcaaggcagaagccagatggttgttcaagacgatctacgaacgcagtggcagcgccggagagttcaagaagttctgtttcaccgtgcgcaagctgatcgggtcaaatgacctgccggagtacgatttgaaggaggaggcggggcaggctggcccgatcctagtcatgcgctaccgcaacctgatcgagggcgaagcatccgccggttcctaatgtacggagcagatgctagggcaaattgccctagcaggggaaaaaggtcgaaaaggtctctttcctgtggatagcacgtacattgggaacccaaagccgtacattgggaaccggaacccgtacattgggaacccaaagccgtacattgggaaccggtcacacatgtaagtgactgatataaaagagaaaaaaggcgatttttccgcctaaaactctttaaaacttattaaaactcttaaaacccgcctggcctgtgcataactgtctggccagcgcacagccgaagagctgcaaaaagcgcctacccttcggtcgctgcgctccctacgccccgccgcttcgcgtcggcctatcgcggccgctggccgctcaaaaatggctggcctacggccaggcaatctaccagggcgcggacaagccgcgccgtcgccactcgaccgccggcgcccacatcaaggcaccctgcctcgcgcgtttcggtgatgacggtgaaaacctctgacacatgcagctcccggagacggtcacagcttgtctgtaagcggatgccgggagcagacaagcccgtcagggcgcgtcagcgggtgttggcgggtgtcggggcgcagccatgacccagtcacgtagcgatagcggagtgtatactggcttaactatgcggcatcagagcagattgtactgagagtgcaccatatgcggtgtgaaataccgcacagatgcgtaaggagaaaataccgcatcaggcgctcttccgcttcctcgctcactgactcgctgcgctcggtcgttcggctgcggcgagcggtatcagctcactcaaaggcggtaatacggttatccacagaatcaggggataacgcaggaaagaacatgtgagcaaaaggccagcaaaaggccaggaaccgtaaaaaggccgcgttgctggcgtttttccataggctccgcccccctgacgagcatcacaaaaatcgacgctcaagtcagaggtggcgaaacccgacaggactataaagataccaggcgtttccccctggaagctccctcgtgcgctctcctgttccgaccctgccgcttaccggatacctgtccgcctttctcccttcgggaagcgtggcgctttctcatagctcacgctgtaggtatctcagttcggtgtaggtcgttcgctccaagctgggctgtgtgcacgaaccccccgttcagcccgaccgctgcgccttatccggtaactatcgtcttgagtccaacccggtaagacacgacttatcgccactggcagcagccactggtaacaggattagcagagcgaggtatgtaggcggtgctacagagttcttgaagtggtggcctaactacggctacactagaaggacagtatttggtatctgcgctctgctgaagccagttaccttcggaaaaagagttggtagctcttgatccggcaaacaaaccaccgctggtagcggtggtttttttgtttgcaagcagcagattacgcgcagaaaaaaaggatctcaagaagatcctttgatcttttctacggggtctgacgctcagtggaacgaaaactcacgttaagggattttggtcatgcattctaggtactaaaacaattcatccagtaaaatataatattttattttctcccaatcaggcttgatccccagtaagtcaaaaaatagctcgacatactgttcttccccgatatcctccctgatcgaccggacgcagaaggcaatgtcataccacttgtccgccctgccgcttctcccaagatcaataaagccacttactttgccatctttcacaaagatgttgctgtctcccaggtcgccgtgggaaaagacaagttcctcttcgggcttttccgtctttaaaaaatcatacagctcgcgcggatctttaaatggagtgtcttcttcccagttttcgcaatccacatcggccagatcgttattcagtaagtaatccaattcggctaagcggctgtctaagctattcgtatagggacaatccgatatgtcgatggagtgaaagagcctgatgcactccgcatacagctcgataatcttttcagggctttgttcatcttcatactcttccgagcaaaggacgccatcggcctcactcatgagcagattgctccagccatcatgccgttcaaagtgcaggacctttggaacaggcagctttccttccagccatagcatcatgtccttttcccgttccacatcataggtggtccctttataccggctgtccgtcatttttaaatataggttttcattttctcccaccagcttatataccttagcaggagacattccttccgtatcttttacgcagcggtatttttcgatcagttttttcaattccggtgatattctcattttagccatttattatttccttcctcttttctacagtatttaaagataccccaagaagctaattataacaagacgaactccaattcactgttccttgcattctaaaaccttaaataccagaaaacagctttttcaaagttgttttcaaagttggcgtataacatagtatcgacggagccgattttgaaaccgcggtgatcacaggcagcaacgctctgtcatcgttacaatcaacatgctaccctccgcgagatcatccgtgtttcaaacccggcagcttagttgccgttcttccgaatagcatcggtaacatgagcaaagtctgccgccttacaacggctctcccgctgacgccgtcccggactgatgggctgcctgtatcgagtggtgattttgtgccgagctgccggtcggggagctgttggctggctggtggcaggatatattgtggtgtaaacaaattgacgcttagacaacttaataacacattgcggacgtttttaatgtactgaattaacgccgaatta

SEQ ID NO: 3 - protein, 65 aa, Artificial Sequence
  Synthetic Construct
MTTAVTAAVSFPSTKTTSLSARSSSVISPDKISYKKVPLYYRNVSATGKMGPIRAQIASEFQLTT

SEQ ID NO: 4 - DNA, 9045 bp, Artificial Sequence
  plasmid VC-MME220-1qcz
agcttggacaatcagtaaattgaacggagaatattattcataaaaatacgatagtaacgggtgatatattcattagaatgaaccgaaaccggcggtaaggatctgagctacacatgctcaggttttttacaacgtgcacaacagaattgaaagcaaatatcatgcgatcataggcgtctcgcatatctcattaaagcagggcatgccggtcgagtcaaatctcggtgacgggcaggaccggacggggcggtaccggcaggctgaagtccagctgccagaaacccacgtcatgccagttcccgtgcttgaagccggccgcccgcagcatgccgcggggggcatatccgagcgcctcgtgcatgcgcacgctcgggtcgttgggcagcccgatgacagcgaccacgctcttgaagccctgtgcctccagggacttcagcaggtgggtgtagagcgtggagcccagtcccgtccgctggtggcggggggagacgtacacggtcgactcggccgtccagtcgtaggcgttgcgtgccttccaggggcccgcgtaggcgatgccggcgacctcgccgtccacctcggcgacgagccagggatagcgctcccgcagacggacgaggtcgtccgtccactcctgcggttcctgcggctcggtacggaagttgaccgtgcttgtctcgatgtagtggttgacgatggtgcagaccgccggcatgtccgcctcggtggcacggcggatgtcggccgggcgtcgttctgggctcatggtagactcgacggatccacgtgtggaagatatgaatttttttgagaaactagataagattaatgaatatcggtgttttggttttttcttgtggccgtctttgtttatattgagatttttcaaatcagtgcgcaagacgtgacgtaagtatccgagtcagtttttatttttctactaatttggtcgaagctttgggcggatcctctagattcgacggtatcgataagctcgcggatccctgaaagcgacgttggatgttaacatctacaaattgccttttcttatcgaccatgtacgtaagcgcttacgtttttggtggacccttgaggaaactggtagctgttgtgggcctgtggtctcaagatggatcattaatttccaccttcacctacgatggggggcatcgcaccggtgagtaatattgtacggctaagagcgaatttggcctgtaggatccctgaaagcgacgttggatgttaacatctacaaattgccttttcttatcgaccatgtacgtaagcgcttacgtttttggtggacccttgaggaaactggtagctgttgtgggcctgtggtctcaagatggatcattaatttccaccttcacctacgatggggggcatcgcaccggtgagtaatattgtacggctaagagcgaatttggcctgtaggatccctgaaagcgacgttggatgttaacatctacaaattgccttttcttatcgaccatgtacgtaagcgcttacgtttttggtggacccttgaggaaactggtagctgttgtgggcctgtggtctcaagatggatcattaatttccaccttcacctacgatggggggcatcgcaccggtgagtaatattgtacggctaagagcgaatttggcctgtaggatccgcgagctggtcaatcccattgcttttgaagcagctcaacattgatctctttctcgatcgagggagatttttcaaatcagtgcgcaagacgtgacgtaagtatccgagtcagtttttatttttctactaatttggtcgtttatttcggcgtgtaggacatggcaaccgggcctgaatttcgcgggtattctgtttctattccaactttttcttgatccgcagccattaacgacttttgaatagatacgctgacacgccaagcctcgctagtcaaaagtgtaccaaacaacgctttacagcaagaacggaatgcgcgtgacgctcgcggtgacgccatttcgccttttcagaaatggataaatagccttgcttcctattatatcttcccaaattaccaatacattacactagcatctgaatttcataaccaatctcgatacaccaaatcgaagatctcccgggttgctcttccatggcaatgattaattaacgaagagcaagagctcgaatttccccgatcgttcaaacatttggcaataaagtttcttaagattgaatcctgttgccggtcttgcgatgattatcatataatttctgttgaattacgttaagcatgtaataattaacatgtaatgcatgacgttatttatgagatgggtttttatgattagagtcccgcaattatacatttaatacgcgatagaaaacaaaatatagcgcgcaaactaggataaattatcgcgcgcggtgtcatctatgttactagatcgggaattggcatgcaagcttggcactggccgtcgttttacaacgtcgtgactgggaaaaccctggcgttacccaacttaatcgccttgcagcacatccccctttcgccagctggcgtaatagcgaagaggcccgcaccgatcgcccttcccaacagttgcgcagcctgaatggcgaatgctagagcagcttgagcttggatcagattgtcgtttcccgccttcagtttaaactatcagtgtttgacaggatatattggcgggtaaacctaagagaaaagagcgtttattagaataatcggatatttaaaagggcgtgaaaaggtttatccgttcgtccatttgtatgtgcatgccaaccacagggttcccctcgggatcaaagtactttgatccaacccctccgctgctatagtgcagtcggcttctgacgttcagtgcagccgtcttctgaaaacgacatgtcgcacaagtcctaagttacgcgacaggctgccgccctgcccttttcctggcgttttcttgtcgcgtgttttagtcgcataaagtagaatacttgcgactagaaccggagacattacgccatgaacaagagcgccgccgctggcctgctgggctatgcccgcgtcagcaccgacgaccaggacttgaccaaccaacgggccgaactgcacgcggccggctgcaccaagctgttttccgagaagatcaccggcaccaggcgcgaccgcccggagctggccaggatgcttgaccacctacgccctggcgacgttgtgacagtgaccaggctagaccgcctggcccgcagcacccgcgacctactggacattgccgagcgcatccaggaggccggcgcgggcctgcgtagcctggcagagccgtgggccgacaccaccacgccggccggccgcatggtgttgaccgtgttcgccggcattgccgagttcgagcgttccctaatcatcgaccgcacccggagcgggcgcgaggccgccaaggcccgaggcgtgaagtttggcccccgccctaccctcaccccggcacagatcgcgcacgcccgcgagctgatcgaccaggaaggccgcaccgtgaaagaggcggctgcactgcttggcgtgcatcgctcgaccctgtaccgcgcacttgagcgcagcgaggaagtgacgcccaccgaggccaggcggcgcggtgccttccgtgaggacgcattgaccgaggccgacgccctggcggccgccgagaatgaacgccaagaggaacaagcatgaaaccgcaccaggacggccaggacgaaccgtttttcattaccgaagagatcgaggcggagatgatcgcggccgggtacgtgttcgagccgcccgcgcacgtctcaaccgtgcggctgcatgaaatcctggccggtttgtctgatgccaagctggcggcctggccggccagcttggccgctgaagaaaccgagcgccgccgtctaaaaaggtgatgtgtatttgagtaaaacagcttgcgtcatgcggtcgctgcgtatatgatgcgatgagtaaataaacaaatacgcaaggggaacgcatgaaggttatcgctgtacttaaccagaaaggcgggtcaggcaagacgaccatcgcaacccatctagcccgcgccctgcaactcgccggggccgatgttctgttagtcgattccgatccccagggcagtgcccgcgattgggcggccgtgcgggaagatcaaccgctaaccgttgtcggcatcgaccgcccgacgattgaccgcgacgtgaaggccatcggccggcgcgacttcgtagtgatcgacggagcgccccaggcggcggacttggctgtgtccgcgatcaaggcagccgacttcgtgctgattccggtgcagccaagcccttacgacatatgggccaccgccgacctggtggagctggttaagcagcgcattgaggtcacggatggaaggctacaagcggcctttgtcgtgtcgcgggcgatcaaaggcacgcgcatcggcggtgaggttgccgaggcgctggccgggtacgagctgcccattcttgagtcccgtatcacgcagcgcgtgagctacccaggcactgccgccgccggcacaaccgttcttgaatcagaacccgagggcgacgctgcccgcgaggtccaggcgctggccgctgaaattaaatcaaaactcatttgagttaatgaggtaaagagaaaatgagcaaaagcacaaacacgctaagtgccggccgtccgagcgcacgcagcagcaaggctgcaacgttggccagcctggcagacacgccagccatgaagcgggtcaactttcagttgccggcggaggatcacaccaagctgaagatgtacgcggtacgccaaggcaagaccattaccgagctgctatctgaatacatcgcgcagctaccagagtaaatgagcaaatgaataaatgagtagatgaattttagcggctaaaggaggcggcatggaaaatcaagaacaaccaggcaccgacgccgtggaatgccccatgtgtggaggaacgggcggttggccaggcgtaagcggctgggttgcctgccggccctgcaatggcactggaacccccaagcccgaggaatcggcgtgagcggtcgcaaaccatccggcccggtacaaatcggcgcggcgctgggtgatgacctggtggagaagttgaaggccgcgcaggccgcccagcggcaacgcatcgaggcagaagcacgccccggtgaatcgtggcaagcggccgctgatcgaatccgcaaagaatcccggcaaccgccggcagccggtgcgccgtcgattaggaagccgcccaagggcgacgagcaaccagattttttcgttccgatgctctatgacgtgggcacccgcgatagtcgcagcatcatggacgtggccgttttccgtctgtcgaagcgtgaccgacgagctggcgaggtgatccgctacgagcttccagacgggcacgtagaggtttccgcagggccggccggcatggccagtgtgtgggattacgacctggtactgatggcggtttcccatctaaccgaatccatgaaccgataccgggaagggaagggagacaagcccggccgcgtgttccgtccacacgttgcggacgtactcaagttctgccggcgagccgatggcggaaagcagaaagacgacctggtagaaacctgcattcggttaaacaccacgcacgttgccatgcagcgtacgaagaaggccaagaacggccgcctggtgacggtatccgagggtgaagccttgattagccgctacaagatcgtaaagagcgaaaccgggcggccggagtacatcgagatcgagctagctgattggatgtaccgcgagatcacagaaggcaagaacccggacgtgctgacggttcaccccgattactttttgatcgatcccggcatcggccgttttctctaccgcctggcacgccgcgccgcaggcaaggcagaagccagatggttgttcaagacgatctacgaacgcagtggcagcgccggagagttcaagaagttctgtttcaccgtgcgcaagctgatcgggtcaaatgacctgccggagtacgatttgaaggaggaggcggggcaggctggcccgatcctagtcatgcgctaccgcaacctgatcgagggcgaagcatccgccggttcctaatgtacggagcagatgctagggcaaattgccctagcaggggaaaaaggtcgaaaaggtctctttcctgtggatagcacgtacattgggaacccaaagccgtacattgggaaccggaacccgtacattgggaacccaaagccgtacattgggaaccggtcacacatgtaagtgactgatataaaagagaaaaaaggcgatttttccgcctaaaactctttaaaacttattaaaactcttaaaacccgcctggcctgtgcataactgtctggccagcgcacagccgaagagctgcaaaaagcgcctacccttcggtcgctgcgctccctacgccccgccgcttcgcgtcggcctatcgcggccgctggccgctcaaaaatggctggcctacggccaggcaatctaccagggcgcggacaagccgcgccgtcgccactcgaccgccggcgcccacatcaaggcaccctgcctcgcgcgtttcggtgatgacggtgaaaacctctgacacatgcagctcccggagacggtcacagcttgtctgtaagcggatgccgggagcagacaagcccgtcagggcgcgtcagcgggtgttggcgggtgtcggggcgcagccatgacccagtcacgtagcgatagcggagtgtatactggcttaactatgcggcatcagagcagattgtactgagagtgcaccatatgcggtgtgaaataccgcacagatgcgtaaggagaaaataccgcatcaggcgctcttccgcttcctcgctcactgactcgctgcgctcggtcgttcggctgcggcgagcggtatcagctcactcaaaggcggtaatacggttatccacagaatcaggggataacgcaggaaagaacatgtgagcaaaaggccagcaaaaggccaggaaccgtaaaaaggccgcgttgctggcgtttttccataggctccgcccccctgacgagcatcacaaaaatcgacgctcaagtcagaggtggcgaaacccgacaggactataaagataccaggcgtttccccctggaagctccctcgtgcgctctcctgttccgaccctgccgcttaccggatacctgtccgcctttctcccttcgggaagcgtggcgctttctcatagctcacgctgtaggtatctcagttcggtgtaggtcgttcgctccaagctgggctgtgtgcacgaaccccccgttcagcccgaccgctgcgccttatccggtaactatcgtcttgagtccaacccggtaagacacgacttatcgccactggcagcagccactggtaacaggattagcagagcgaggtatgtaggcggtgctacagagttcttgaagtggtggcctaactacggctacactagaaggacagtatttggtatctgcgctctgctgaagccagttaccttcggaaaaagagttggtagctcttgatccggcaaacaaaccaccgctggtagcggtggtttttttgtttgcaagcagcagattacgcgcagaaaaaaaggatctcaagaagatcctttgatcttttctacggggtctgacgctcagtggaacgaaaactcacgttaagggattttggtcatgcattctaggtactaaaacaattcatccagtaaaatataatattttattttctcccaatcaggcttgatccccagtaagtcaaaaaatagctcgacatactgttcttccccgatatcctccctgatcgaccggacgcagaaggcaatgtcataccacttgtccgccctgccgcttctcccaagatcaataaagccacttactttgccatctttcacaaagatgttgctgtctcccaggtcgccgtgggaaaagacaagttcctcttcgggcttttccgtctttaaaaaatcatacagctcgcgcggatctttaaatggagtgtcttcttcccagttttcgcaatccacatcggccagatcgttattcagtaagtaatccaattcggctaagcggctgtctaagctattcgtatagggacaatccgatatgtcgatggagtgaaagagcctgatgcactccgcatacagctcgataatcttttcagggctttgttcatcttcatactcttccgagcaaaggacgccatcggcctcactcatgagcagattgctccagccatcatgccgttcaaagtgcaggacctttggaacaggcagctttccttccagccatagcatcatgtccttttcccgttccacatcataggtggtccctttataccggctgtccgtcatttttaaatataggttttcattttctcccaccagcttatataccttagcaggagacattccttccgtatcttttacgcagcggtatttttcgatcagttttttcaattccggtgatattctcattttagccatttattatttccttcctcttttctacagtatttaaagataccccaagaagctaattataacaagacgaactccaattcactgttccttgcattctaaaaccttaaataccagaaaacagctttttcaaagttgttttcaaagttggcgtataacatagtatcgacggagccgattttgaaaccgcggtgatcacaggcagcaacgctctgtcatcgttacaatcaacatgctaccctccgcgagatcatccgtgtttcaaacccggcagcttagttgccgttcttccgaatagcatcggtaacatgagcaaagtctgccgccttacaacggctctcccgctgacgccgtcccggactgatgggctgcctgtatcgagtggtgattttgtgccgagctgccggtcggggagctgttggctggctggtggcaggatatattgtggtgtaaacaaattgacgcttagacaacttaataacacattgcggacgtttttaatgtactgaattaacgccgaatta

SEQ ID NO: 5 - DNA, 9466 bp, Artificial Sequence
  plasmid VC-MME432-1qcz
  5'UTR (2125)..(2289)
  transit_peptide (2290)..(2397)
  CDS (2290)..(2397)
  transit_peptide (2475)..(2543)
  CDS (2475)..(2543)
  CDS (2544)..(2552): adapter
gctttgggcggatcctctagaggacaatcagtaaattgaacggagaatattattcataaaaatacgatagtaacgggtgatatattcattagaatgaaccgaaaccggcggtaaggatctgagctacacatgctcaggttttttacaacgtgcacaacagaattgaaagcaaatatcatgcgatcataggcgtctcgcatatctcattaaagcagggcatgccggtcgagtcaaatctcggtgacgggcaggaccggacggggcggtaccggcaggctgaagtccagctgccagaaacccacgtcatgccagttcccgtgcttgaagccggccgcccgcagcatgccgcggggggcatatccgagcgcctcgtgcatgcgcacgctcgggtcgttgggcagcccgatgacagcgaccacgctcttgaagccctgtgcctccagggacttcagcaggtgggtgtagagcgtggagcccagtcccgtccgctggtggcggggggagacgtacacggtcgactcggccgtccagtcgtaggcgttgcgtgccttccaggggcccgcgtaggcgatgccggcgacctcgccgtccacctcggcgacgagccagggatagcgctcccgcagacggacgaggtcgtccgtccactcctgcggttcctgcggctcggtacggaagttgaccgtgcttgtctcgatgtagtggttgacgatggtgcagaccgccggcatgtccgcctcggtggcacggcggatgtcggccgggcgtcgttctgggctcatggtagactcgacggatccacgtgtggaagatatgaatttttttgagaaactagataagattaatgaatatcggtgttttggttttttcttgtggccgtctttgtttatattgagatttttcaaatcagtgcgcaagacgtgacgtaagtatccgagtcagtttttatttttctactaatttggtcgaatctagattcgacggtatcgataagctcgcggatccctgaaagcgacgttggatgttaacatctacaaattgccttttcttatcgaccatgtacgtaagcgcttacgtttttggtggacccttgaggaaactggtagctgttgtgggcctgtggtctcaagatggatcattaatttccaccttcacctacgatggggggcatcgcaccggtgagtaatattgtacggctaagagcgaatttggcctgtaggatccctgaaagcgacgttggatgttaacatctacaaattgccttttcttatcgaccatgtacgtaagcgcttacgtttttggtggacccttgaggaaactggtagctgttgtgggcctgtggtctcaagatggatcattaatttccaccttcacctacgatggggggcatcgcaccggtgagtaatattgtacggctaagagcgaatttggcctgtaggatccctgaaagcgacgttggatgttaacatctacaaattgccttttcttatcgaccatgtacgtaagcgcttacgtttttggtggacccttgaggaaactggtagctgttgtgggcctgtggtctcaagatggatcattaatttccaccttcacctacgatggggggcatcgcaccggtgagtaatattgtacggctaagagcgaatttggcctgtaggatccgcgagctggtcaatcccattgcttttgaagcagctcaacattgatctctttctcgatcgagggagatttttcaaatcagtgcgcaagacgtgacgtaagtatccgagtcagtttttatttttctactaatttggtcgtttatttcggcgtgtaggacatggcaaccgggcctgaatttcgcgggtattctgtttctattccaactttttcttgatccgcagccattaacgacttttgaatagatacgctgacacgccaagcctcgctagtcaaaagtgtaccaaacaacgctttacagcaagaacggaatgcgcgtgacgctcgcggtgacgccatttcgccttttcagaaatggataaatagccttgcttcctattatatcttcccaaattaccaatacattacactagcatctgaatttcataaccaatctcgatacaccaaatcgaagatctcccaaacgcataaacttatcttcatagttgccactccaatttgctccttgaatctcctccacccaatacataatccactcctccatcacccacttcactactaaatcaaacttaactctgtttttctctctcctcctttcatttcttattcttccaatcatcgtactccgccatgaccaccgctgtcaccgccgctgtttctttcccctctaccaaaaccacctctctctccgcccgaagctcctccgtcatttcccctgacaaaatcagctacaaaaaggtgattcccaatttcactgtgttttttattaataatttgttattttgatgatgagatgattaatttgggtgctgcaggttcctttgtactacaggaatgtatctgcaactgggaaaatgggacccatcagggcccagatcgcctcttgctcttccatggcaatgattaattaacgaagagcaagagctcgaatttccccgatcgttcaaacatttggcaataaagtttcttaagattgaatcctgttgccggtcttgcgatgattatcatataatttctgttgaattacgttaagcatgtaataattaacatgtaatgcatgacgttatttatgagatgggtttttatgattagagtcccgcaattatacatttaatacgcgatagaaaacaaaatatagcgcgcaaactaggataaattatcgcgcgcggtgtcatctatgttactagatcgggaattggcatgcaagcttggcactggccgtcgttttacaacgtcgtgactgggaaaaccctggcgttacccaacttaatcgccttgcagcacatccccctttcgccagctggcgtaatagcgaagaggcccgcaccgatcgcccttcccaacagttgcgcagcctgaatggcgaatgctagagcagcttgagcttggatcagattgtcgtttcccgccttcagtttaaactatcagtgtttgacaggatatattggcgggtaaacctaagagaaaagagcgtttattagaataatcggatatttaaaagggcgtgaaaaggtttatccgttcgtccatttgtatgtgcatgccaaccacagggttcccctcgggatcaaagtactttgatccaacccctccgctgctatagtgcagtcggcttctgacgttcagtgcagccgtcttctgaaaacgacatgtcgcacaagtcctaagttacgcgacaggctgccgccctgcccttttcctggcgttttcttgtcgcgtgttttagtcgcataaagtagaatacttgcgactagaaccggagacattacgccatgaacaagagcgccgccgctggcctgctgggctatgcccgcgtcagcaccgacgaccaggacttgaccaaccaacgggccgaactgcacgcggccggctgcaccaagctgttttccgagaagatcaccggcaccaggcgcgaccgcccggagctggccaggatgcttgaccacctacgccctggcgacgttgtgacagtgaccaggctagaccgcctggcccgcagcacccgcgacctactggacattgccgagcgcatccaggaggccggcgcgggcctgcgtagcctggcagagccgtgggccgacaccaccacgccggccggccgcatggtgttgaccgtgttcgccggcattgccgagttcgagcgttccctaatcatcgaccgcacccggagcgggcgcgaggccgccaaggcccgaggcgtgaagtttggcccccgccctaccctcaccccggcacagatcgcgcacgcccgcgagctgatcgaccaggaaggccgcaccgtgaaagaggcggctgcactgcttggcgtgcatcgctcgaccctgtaccgcgcacttgagcgcagcgaggaagtgacgcccaccgaggccaggcggcgcggtgccttccgtgaggacgcattgaccgaggccgacgccctggcggccgccgagaatgaacgccaagaggaacaagcatgaaaccgcaccaggacggccaggacgaaccgtttttcattaccgaagagatcgaggcggagatgatcgcggccgggtacgtgttcgagccgcccgcgcacgtctcaaccgtgcggctgcatgaaatcctggccggtttgtctgatgccaagctggcggcctggccggccagcttggccgctgaagaaaccgagcgccgccgtctaaaaaggtgatgtgtatttgagtaaaacagcttgcgtcatgcggtcgctgcgtatatgatgcgatgagtaaataaacaaatacgcaaggggaacgcatgaaggttatcgctgtacttaaccagaaaggcgggtcaggcaagacgaccatcgcaacccatctagcccgcgccctgcaactcgccggggccgatgttctgttagtcgattccgatccccagggcagtgcccgcgattgggcggccgtgcgggaagatcaaccgctaaccgttgtcggcatcgaccgcccgacgattgaccgcgacgtgaaggccatcggccggcgcgacttcgtagtgatcgacggagcgccccaggcggcggacttggctgtgtccgcgatcaaggcagccgacttcgtgctgattccggtgcagccaagcccttacgacatatgggccaccgccgacctggtggagctggttaagcagcgcattgaggtcacggatggaaggctacaagcggcctttgtcgtgtcgcgggcgatcaaaggcacgcgcatcggcggtgaggttgccgaggcgctggccgggtacgagctgcccattcttgagtcccgtatcacgcagcgcgtgagctacccaggcactgccgccgccggcacaaccgttcttgaatcagaacccgagggcgacgctgcccgcgaggtccaggcgctggccgctgaaattaaatcaaaactcatttgagttaatgaggtaaagagaaaatgagcaaaagcacaaacacgctaagtgccggccgtccgagcgcacgcagcagcaaggctgcaacgttggccagcctggcagacacgccagccatgaagcgggtcaactttcagttgccggcggaggatcacaccaagctgaagatgtacgcggtacgccaaggcaagaccattaccgagctgctatctgaatacatcgcgcagctaccagagtaaatgagcaaatgaataaatgagtagatgaattttagcggctaaaggaggcggcatggaaaatcaagaacaaccaggcaccgacgccgtggaatgccccatgtgtggaggaacgggcggttggccaggcgtaagcggctgggttgcctgccggccctgcaatggcactggaacccccaagcccgaggaatcggcgtgagcggtcgcaaaccatccggcccggtacaaatcggcgcggcgctgggtgatgacctggtggagaagttgaaggccgcgcaggccgcccagcggcaacgcatcgaggcagaagcacgccccggtgaatcgtggcaagcggccgctgatcgaatccgcaaagaatcccggcaaccgccggcagccggtgcgccgtcgattaggaagccgcccaagggcgacgagcaaccagattttttcgttccgatgctctatgacgtgggcacccgcgatagtcgcagcatcatggacgtggccgttttccgtctgtcgaagcgtgaccgacgagctggcgaggtgatccgctacgagcttccagacgggcacgtagaggtttccgcagggccggccggcatggccagtgtgtgggattacgacctggtactgatggcggtttcccatctaaccgaatccatgaaccgataccgggaagggaagggagacaagcccggccgcgtgttccgtccacacgttgcggacgtactcaagttctgccggcgagccgatggcggaaagcagaaagacgacctggtagaaacctgcattcggttaaacaccacgcacgttgccatgcagcgtacgaagaaggccaagaacggccgcctggtgacggtatccgagggtgaagccttgattagccgctacaagatcgtaaagagcgaaaccgggcggccggagtacatcgagatcgagctagctgattggatgtaccgcgagatcacagaaggcaagaacccggacgtgctgacggttcaccccgattactttttgatcgatcccggcatcggccgttttctctaccgcctggcacgccgcgccgcaggcaaggcagaagccagatggttgttcaagacgatctacgaacgcagtggcagcgccggagagttcaagaagttctgtttcaccgtgcgcaagctgatcgggtcaaatgacctgccggagtacgatttgaaggaggaggcggggcaggctggcccgatcctagtcatgcgctaccgcaacctgatcgagggcgaagcatccgccggttcctaatgtacggagcagatgctagggcaaattgccctagcaggggaaaaaggtcgaaaaggtctctttcctgtggatagcacgtacattgggaacccaaagccgtacattgggaaccggaacccgtacattgggaacccaaagccgtacattgggaaccggtcacacatgtaagtgactgatataaaagagaaaaaaggcgatttttccgcctaaaactctttaaaacttattaaaactcttaaaacccgcctggcctgtgcataactgtctggccagcgcacagccgaagagctgcaaaaagcgcctacccttcggtcgctgcgctccctacgccccgccgcttcgcgtcggcctatcgcggccgctggccgctcaaaaatggctggcctacggccaggcaatctaccagggcgcggacaagccgcgccgtcgccactcgaccgccggcgcccacatcaaggcaccctgcctcgcgcgtttcggtgatgacggtgaaaacctctgacacatgcagctcccggagacggtcacagcttgtctgtaagcggatgccgggagcagacaagcccgtcagggcgcgtcagcgggtgttggcgggtgtcggggcgcagccatgacccagtcacgtagcgatagcggagtgtatactggcttaactatgcggcatcagagcagattgtactgagagtgcaccatatgcggtgtgaaataccgcacagatgcgtaaggagaaaataccgcatcaggcgctcttccgcttcctcgctcactgactcgctgcgctcggtcgttcggctgcggcgagcggtatcagctcactcaaaggcggtaatacggttatccacagaatcaggggataacgcaggaaagaacatgtgagcaaaaggccagcaaaaggccaggaaccgtaaaaaggccgcgttgctggcgtttttccataggctccgcccccctgacgagcatcacaaaaatcgacgctcaagtcagaggtggcgaaacccgacaggactataaagataccaggcgtttccccctggaagctccctcgtgcgctctcctgttccgaccctgccgcttaccggatacctgtccgcctttctcccttcgggaagcgtggcgctttctcatagctcacgctgtaggtatctcagttcggtgtaggtcgttcgctccaagctgggctgtgtgcacgaaccccccgttcagcccgaccgctgcgccttatccggtaactatcgtcttgagtccaacccggtaagacacgacttatcgccactggcagcagccactggtaacaggattagcagagcgaggtatgtaggcggtgctacagagttcttgaagtggtggcctaactacggctacactagaaggacagtatttggtatctgcgctctgctgaagccagttaccttcggaaaaagagttggtagctcttgatccggcaaacaaaccaccgctggtagcggtggtttttttgtttgcaagcagcagattacgcgcagaaaaaaaggatctcaagaagatcctttgatcttttctacggggtctgacgctcagtggaacgaaaactcacgttaagggattttggtcatgcattctaggtactaaaacaattcatccagtaaaatataatattttattttctcccaatcaggcttgatccccagtaagtcaaaaaatagctcgacatactgttcttccccgatatcctccctgatcgaccggacgcagaaggcaatgtcataccacttgtccgccctgccgcttctcccaagatcaataaagccacttactttgccatctttcacaaagatgttgctgtctcccaggtcgccgtgggaaaagacaagttcctcttcgggcttttccgtctttaaaaaatcatacagctcgcgcggatctttaaatggagtgtcttcttcccagttttcgcaatccacatcggccagatcgttattcagtaagtaatccaattcggctaagcggctgtctaagctattcgtatagggacaatccgatatgtcgatggagtgaaagagcctgatgcactccgcatacagctcgataatcttttcagggctttgttcatcttcatactcttccgagcaaaggacgccatcggcctcactcatgagcagattgctccagccatcatgccgttcaaagtgcaggacctttggaacaggcagctttccttccagccatagcatcatgtccttttcccgttccacatcataggtggtccctttataccggctgtccgtcatttttaaatataggttttcattttctcccaccagcttatataccttagcaggagacattccttccgtatcttttacgcagcggtatttttcgatcagttttttcaattccggtgatattctcattttagccatttattatttccttcctcttttctacagtatttaaagataccccaagaagctaattataacaagacgaactccaattcactgttccttgcattctaaaaccttaaataccagaaaacagctttttcaaagttgttttcaaagttggcgtataacatagtatcgacggagccgattttgaaaccgcggtgatcacaggcagcaacgctctgtcatcgttacaatcaacatgctaccctccgcgagatcatccgtgtttcaaacccggcagcttagttgccgttcttccgaatagcatcggtaacatgagcaaagtctgccgccttacaacggctctcccgctgacgccgtcccggactgatgggctgcctgtatcgagtggtgattttgtgccgagctgccggtcggggagctgttggctggctggtggcaggatatattgtggtgtaaacaaattgacgcttagacaacttaataacacattgcggacgtttttaatgtactgaattaacgccgaattaa

SEQ ID NO: 6 - protein, 62 aa, Artificial Sequence
  Synthetic Construct
MTTAVTAAVSFPSTKTTSLSARSSSVISPDKISYKKVPLYYRNVSATGKMGPIRAQIASCSS

SEQ ID NO: 7 - DNA, 9043 bp, Artificial Sequence
  plasmid VC-MME489-1QCZ
agctttgggcggatcctctagaggacaatcagtaaattgaacggagaatattattcataaaaatacgatagtaacgggtgatatattcattagaatgaaccgaaaccggcggtaaggatctgagctacacatgctcaggttttttacaacgtgcacaacagaattgaaagcaaatatcatgcgatcataggcgtctcgcatatctcattaaagcagggcatgccggtcgagtcaaatctcggtgacgggcaggaccggacggggcggtaccggcaggctgaagtccagctgccagaaacccacgtcatgccagttcccgtgcttgaagccggccgcccgcagcatgccgcggggggcatatccgagcgcctcgtgcatgcgcacgctcgggtcgttgggcagcccgatgacagcgaccacgctcttgaagccctgtgcctccagggacttcagcaggtgggtgtagagcgtggagcccagtcccgtccgctggtggcggggggagacgtacacggtcgactcggccgtccagtcgtaggcgttgcgtgccttccaggggcccgcgtaggcgatgccggcgacctcgccgtccacctcggcgacgagccagggatagcgctcccgcagacggacgaggtcgtccgtccactcctgcggttcctgcggctcggtacggaagttgaccgtgcttgtctcgatgtagtggttgacgatggtgcagaccgccggcatgtccgcctcggtggcacggcggatgtcggccgggcgtcgttctgggctcatggtagactcgacggatccacgtgtggaagatatgaatttttttgagaaactagataagattaatgaatatcggtgttttggttttttcttgtggccgtctttgtttatattgagatttttcaaatcagtgcgcaagacgtgacgtaagtatccgagtcagtttttatttttctactaatttggtcgaatctagattcgacggtatcgataagctcgcggatccctgaaagcgacgttggatgttaacatctacaaattgccttttcttatcgaccatgtacgtaagcgcttacgtttttggtggacccttgaggaaactggtagctgttgtgggcctgtggtctcaagatggatcattaatttccaccttcacctacgatggggggcatcgcaccggtgagtaatattgtacggctaagagcgaatttggcctgtaggatccctgaaagcgacgttggatgttaacatctacaaattgccttttcttatcgaccatgtacgtaagcgcttacgtttttggtggacccttgaggaaactggtagctgttgtgggcctgtggtctcaagatggatcattaatttccaccttcacctacgatggggggcatcgcaccggtgagtaatattgtacggctaagagcgaatttggcctgtaggatccctgaaagcgacgttggatgttaacatctacaaattgccttttcttatcgaccatgtacgtaagcgcttacgtttttggtggacccttgaggaaactggtagctgttgtgggcctgtggtctcaagatggatcattaatttccaccttcacctacgatggggggcatcgcaccggtgagtaatattgtacggctaagagcgaatttggcctgtaggatccgcgagctggtcaatcccattgcttttgaagcagctcaacattgatctctttctcgatcgagggagatttttcaaatcagtgcgcaagacgtgacgtaagtatccgagtcagtttttatttttctactaatttggtcgtttatttcggcgtgtaggacatggcaaccgggcctgaatttcgcgggtattctgtttctattccaactttttcttgatccgcagccattaacgacttttgaatagatacgctgacacgccaagcctcgctagtcaaaagtgtaccaaacaacgctttacagcaagaacggaatgcgcgtgacgctcgcggtgacgccatttcgccttttcagaaatggataaatagccttgcttcctattatatcttcccaaattaccaatacattacactagcatctgaatttcataaccaatctcgatacaccaaatcgaagatctccctggaattccagctgaccaccatggcaattcccggggatcagctcgaatttccccgatcgttcaaacatttggcaataaagtttcttaagattgaatcctgttgccggtcttgcgatgattatcatataatttctgttgaattacgttaagcatgtaataattaacatgtaatgcatgacgttatttatgagatgggtttttatgattagagtcccgcaattatacatttaatacgcgatagaaaacaaaatatagcgcgcaaactaggataaattatcgcgcgcggtgtcatctatgttactagatcgggaattggcatgcaagcttggcactggccgtcgttttacaacgtcgtgactgggaaaaccctggcgttacccaacttaatcgccttgcagcacatccccctttcgccagctggcgtaatagcgaagaggcccgcaccgatcgcccttcccaacagttgcgcagcctgaatggcgaatgctagagcagcttgagcttggatcagattgtcgtttcccgccttcagtttaaactatcagtgtttgacaggatatattggcgggtaaacctaagagaaaagagcgtttattagaataatcggatatttaaaagggcgtgaaaaggtttatccgttcgtccatttgtatgtgcatgccaaccacagggttcccctcgggatcaaagtactttgatccaacccctccgctgctatagtgcagtcggcttctgacgttcagtgcagccgtcttctgaaaacgacatgtcgcacaagtcctaagttacgcgacaggctgccgccctgcccttttcctggcgttttcttgtcgcgtgttttagtcgcataaagtagaatacttgcgactagaaccggagacattacgccatgaacaagagcgccgccgctggcctgctgggctatgcccgcgtcagcaccgacgaccaggacttgaccaaccaacgggccgaactgcacgcggccggctgcaccaagctgttttccgagaagatcaccggcaccaggcgcgaccgcccggagctggccaggatgcttgaccacctacgccctggcgacgttgtgacagtgaccaggctagaccgcctggcccgcagcacccgcgacctactggacattgccgagcgcatccaggaggccggcgcgggcctgcgtagcctggcagagccgtgggccgacaccaccacgccggccggccgcatggtgttgaccgtgttcgccggcattgccgagttcgagcgttccctaatcatcgaccgcacccggagcgggcgcgaggccgccaaggcccgaggcgtgaagtttggcccccgccctaccctcaccccggcacagatcgcgcacgcccgcgagctgatcgaccaggaaggccgcaccgtgaaagaggcggctgcactgcttggcgtgcatcgctcgaccctgtaccgcgcacttgagcgcagcgaggaagtgacgcccaccgaggccaggcggcgcggtgccttccgtgaggacgcattgaccgaggccgacgccctggcggccgccgagaatgaacgccaagaggaacaagcatgaaaccgcaccaggacggccaggacgaaccgtttttcattaccgaagagatcgaggcggagatgatcgcggccgggtacgtgttcgagccgcccgcgcacgtctcaaccgtgcggctgcatgaaatcctggccggtttgtctgatgccaagctggcggcctggccggccagcttggccgctgaagaaaccgagcgccgccgtctaaaaaggtgatgtgtatttgagtaaaacagcttgcgtcatgcggtcgctgcgtatatgatgcgatgagtaaataaacaaatacgcaaggggaacgcatgaaggttatcgctgtacttaaccagaaaggcgggtcaggcaagacgaccatcgcaacccatctagcccgcgccctgcaactcgccggggccgatgttctgttagtcgattccgatccccagggcagtgcccgcgattgggcggccgtgcgggaagatcaaccgctaaccgttgtcggcatcgaccgcccgacgattgaccgcgacgtgaaggccatcggccggcgcgacttcgtagtgatcgacggagcgccccaggcggcggacttggctgtgtccgcgatcaaggcagccgacttcgtgctgattccggtgcagccaagcccttacgacatatgggccaccgccgacctggtggagctggttaagcagcgcattgaggtcacggatggaaggctacaagcggcctttgtcgtgtcgcgggcgatcaaaggcacgcgcatcggcggtgaggttgccgaggcgctggccgggtacgagctgcccattcttgagtcccgtatcacgcagcgcgtgagctacccaggcactgccgccgccggcacaaccgttcttgaatcagaacccgagggcgacgctgcccgcgaggtccaggcgctggccgctgaaattaaatcaaaactcatttgagttaatgaggtaaagagaaaatgagcaaaagcacaaacacgctaagtgccggccgtccgagcgcacgcagcagcaaggctgcaacgttggccagcctggcagacacgccagccatgaagcgggtcaactttcagttgccggcggaggatcacaccaagctgaagatgtacgcggtacgccaaggcaagaccattaccgagctgctatctgaatacatcgcgcagctaccagagtaaatgagcaaatgaataaatgagtagatgaattttagcggctaaaggaggcggcatggaaaatcaagaacaaccaggcaccgacgccgtggaatgccccatgtgtggaggaacgggcggttggccaggcgtaagcggctgggttgtctgccggccctgcaatggcactggaacccccaagcccgaggaatcggcgtgacggtcgcaaaccatccggcccggtacaaatcggcgcggcgctgggtgatgacctggtggagaagttgaaggccgcgcaggccgcccagcggcaacgcatcgaggcagaagcacgccccggtgaatcgtggcaagcggccgctgatcgaatccgcaaagaatcccggcaaccgccggcagccggtgcgccgtcgattaggaagccgcccaagggcgacgagcaaccagattttttcgttccgatgctctatgacgtgggcacccgcgatagtcgcagcatcatggacgtggccgttttccgtctgtcgaagcgtgaccgacgagctggcgaggtgatccgctacgagcttccagacgggcacgtagaggtttccgcagggccggccggcatggccagtgtgtgggattacgacctggtactgatggcggtttcccatctaaccgaatccatgaaccgataccgggaagggaagggagacaagcccggccgcgtgttccgtccacacgttgcggacgtactcaagttctgccggcgagccgatggcggaaagcagaaagacgacctggtagaaacctgcattcggttaaacaccacgcacgttgccatgcagcgtacgaagaaggccaagaacggccgcctggtgacggtatccgagggtgaagccttgattagccgctacaagatcgtaaagagcgaaaccgggcggccggagtacatcgagatcgagctagctgattggatgtaccgcgagatcacagaaggcaagaacccggacgtgctgacggttcaccccgattactttttgatcgatcccggcatcggccgttttctctaccgcctggcacgccgcgccgcaggcaaggcagaagccagatggttgttcaagacgatctacgaacgcagtggcagcgccggagagttcaagaagttctgtttcaccgtgcgcaagctgatcgggtcaaatgacctgccggagtacgatttgaaggaggaggcggggcaggctggcccgatcctagtcatgcgctaccgcaacctgatcgagggcgaagcatccgccggttcctaatgtacggagcagatgctagggcaaattgccctagcaggggaaaaaggtcgaaaaggtctctttcctgtggatagcacgtacattgggaacccaaagccgtacattgggaaccggaacccgtacattgggaacccaaagccgtacattgggaaccggtcacacatgtaagtgactgatataaaagagaaaaaaggcgatttttccgcctaaaactctttaaaacttattaaaactcttaaaacccgcctggcctgtgcataactgtctggccagcgcacagccgaagagctgcaaaaagcgcctacccttcggtcgctgcgctccctacgccccgccgcttcgcgtcggcctatcgcggccgctggccgctcaaaaatggctggcctacggccaggcaatctaccagggcgcggacaagccgcgccgtcgccactcgaccgccggcgcccacatcaaggcaccctgcctcgcgcgtttcggtgatgacggtgaaaacctctgacacatgcagctcccggagacggtcacagcttgtctgtaagcggatgccgggagcagacaagcccgtcagggcgcgtcagcgggtgttggcgggtgtcggggcgcagccatgacccagtcacgtagcgatagcggagtgtatactggcttaactatgcggcatcagagcagattgtactgagagtgcaccatatgcggtgtgaaataccgcacagatgcgtaaggagaaaataccgcatcaggcgctcttccgcttcctcgctcactgactcgctgcgctcggtcgttcggctgcggcgagcggtatcagctcactcaaaggcggtaatacggttatccacagaatcaggggataacgcaggaaagaacatgtgagcaaaaggccagcaaaaggccaggaaccgtaaaaaggccgcgttgctggcgtttttccataggctccgcccccctgacgagcatcacaaaaatcgacgctcaagtcagaggtggcgaaacccgacaggactataaagataccaggcgtttccccctggaagctccctcgtgcgctctcctgttccgaccctgccgcttaccggatacctgtccgcctttctcccttcgggaagcgtggcgctttctcatagctcacgctgtaggtatctcagttcggtgtaggtcgttcgctccaagctgggctgtgtgcacgaaccccccgttcagcccgaccgctgcgccttatccggtaactatcgtcttgagtccaacccggtaagacacgacttatcgccactggcagcagccactggtaacaggattagcagagcgaggtatgtaggcggtgctacagagttcttgaagtggtggcctaactacggctacactagaaggacagtatttggtatctgcgctctgctgaagccagttaccttcggaaaaagagttggtagctcttgatccggcaaacaaaccaccgctggtagcggtggtttttttgtttgcaagcagcagattacgcgcagaaaaaaaggatctcaagaagatcctttgatcttttctacggggtctgacgctcagtggaacgaaaactcacgttaagggattttggtcatgcattctaggtactaaaacaattcatccagtaaaatataatattttattttctcccaatcaggcttgatccccagtaagtcaaaaaatagctcgacatactgttcttccccgatatcctccctgatcgaccggacgcagaaggcaatgtcataccacttgtccgccctgccgcttctcccaagatcaataaagccacttactttgccatctttcacaaagatgttgctgtctcccaggtcgccgtgggaaaagacaagttcctcttcgggcttttccgtctttaaaaaatcatacagctcgcgcggatctttaaatggagtgtcttcttcccagttttcgcaatccacatcggccagatcgttattcagtaagtaatccaattcggctaagcggctgtctaagctattcgtatagggacaatccgatatgtcgatggagtgaaagagcctgatgcactccgcatacagctcgataatcttttcagggctttgttcatcttcatactcttccgagcaaaggacgccatcggcctcactcatgagcagattgctccagccatcatgccgttcaaagtgcaggacctttggaacaggcagctttccttccagccatagcatcatgtccttttcccgttccacatcataggtggtccctttataccggctgtccgtcatttttaaatataggttttcattttctcccaccagcttatataccttagcaggagacattccttccgtatcttttacgcagcggtatttttcgatcagttttttcaattccggtgatattctcattttagccatttattatttccttcctcttttctacagtatttaaagataccccaagaagctaattataacaagacgaactccaattcactgttccttgcattctaaaaccttaaataccagaaaacagctttttcaaagttgttttcaaagttggcgtataacatagtatcgacggagccgattttgaaaccgcggtgatcacaggcagcaacgctctgtcatcgttacaatcaacatgctaccctccgcgagatcatccgtgtttcaaacccggcagcttagttgccgttcttccgaatagcatcggtaacatgagcaaagtctgccgccttacaacggctctcccgctgacgccgtcccggactgatgggctgcctgtatcgagtggtgattttgtgccgagctgccggtcggggagctgttggctggctggtggcaggatatattgtggtgtaaacaaattgacgcttagacaacttaataacacattgcggacgtttttaatgtactgaattaacgccgaatta

SEQ ID NO: 8 - DNA, 768 bp, Artificial Sequence
  Big35S promoter
ctagagcagcttgccaacatggtggagcacgacactctcgtctactccaagaatatcaaagatacagtctcagaagaccaaagggctattgagacttttcaacaaagggtaatatcgggaaacctcctcggattccattgcccagctatctgtcacttcatcaaaaggacagtagaaaaggaaggtggcacctacaaatgccatcattgcgataaaggaaaggctatcgttcaagatgcctctgccgacagtggtcccaaagatggacccccacccacgaggagcatcgtggaaaaagaagacgttccaaccacgtcttcaaagcaagtggattgatgtgaacatggtggagcacgacactctcgtctactccaagaatatcaaagatacagtctcagaagaccaaagggctattgagacttttcaacaaagggtaatatcgggaaacctcctcggattccattgcccagctatctgtcacttcatcaaaaggacagtagaaaaggaaggtggcacctacaaatgccatcattgcgataaaggaaaggctatcgttcaagatgcctctgccgacagtggtcccaaagatggacccccacccacgaggagcatcgtggaaaaagaagacgttccaaccacgtcttcaaagcaagtggattgatgtgatatctccactgacgtaagggatgacgcacaatcccactatccttcgcaagacccttcctctatataaggaagttcatttcatttggagaggacagggtaccc

SEQ ID NO: 9 - DNA, 1112 bp, Artificial Sequence
  super promoter
ggatccctgaaagcgacgttggatgttaacatctacaaattgccttttcttatcgaccatgtacgtaagcgcttacgtttttggtggacccttgaggaaactggtagctgttgtgggcctgtggtctcaagatggatcattaatttccaccttcacctacgatggggggcatcgcaccggtgagtaatattgtacggctaagagcgaatttggcctgtaggatccctgaaagcgacgttggatgttaacatctacaaattgccttttcttatcgaccatgtacgtaagcgcttacgtttttggtggacccttgaggaaactggtagctgttgtgggcctgtggtctcaagatggatcattaatttccaccttcacctacgatggggggcatcgcaccggtgagtaatattgtacggctaagagcgaatttggcctgtaggatccctgaaagcgacgttggatgttaacatctacaaattgccttttcttatcgaccatgtacgtaagcgcttacgtttttggtggacccttgaggaaactggtagctgttgtgggcctgtggtctcaagatggatcattaatttccaccttcacctacgatggggggcatcgcaccggtgagtaatattgtacggctaagagcgaatttggcctgtaggatccgcgagctggtcaatcccattgcttttgaagcagctcaacattgatctctttctcgatcgagggagatttttcaaatcagtgcgcaagacgtgacgtaagtatccgagtcagtttttatttttctactaatttggtcgtttatttcggcgtgtaggacatggcaaccgggcctgaatttcgcgggtattctgtttctattccaactttttcttgatccgcagccattaacgacttttgaatagatacgctgacacgccaagcctcgctagtcaaaagtgtaccaaacaacgctttacagcaagaacggaatgcgcgtgacgctcgcggtgacgccatttcgccttttcagaaatggataaatagccttgcttcctattatatcttcccaaattaccaatacattacactagcatctgaatttcataaccaatctcgatacaccaaatcga

SEQ ID NO: 10 - DNA, 19 bp, Artificial Sequence
  adapter sequence added to gene specific primers for cloning purposes
ggaattccagctgaccacc

SEQ ID NO: 11 - DNA, 20 bp, Artificial Sequence
  adapter sequence added to gene specific primers for cloning purposes
gatccccgggaattgccatg

SEQ ID NO: 12 - DNA, 10 bp, Artificial Sequence
  adapter sequence added to gene specific primers for cloning purposes
ttgctcttcc

SEQ ID NO: 13 - DNA, 10 bp, Artificial Sequence
  adapter sequence added to gene specific primers for cloning purposes
ttgctcttcg

SEQ ID NO: 14 - DNA, 34 bp, Artificial Sequence
  amplification of the targeting sequence of the gene FNR from Spinacia oleracea to generate targeting vectors
atagaattcgcataaacttatcttcatagttgcc

SEQ ID NO: 15 - DNA, 27 bp, Artificial Sequence
  amplification of the targeting sequence of the gene FNR from Spinacia oleracea to generate targeting vectors
atagaattcagaggcgatctgggccct

SEQ ID NO: 16 - DNA, 36 bp, Artificial Sequence
  amplification of the targeting sequence of the gene FNR from Spinacia oleracea to generate targeting vectors
atagtttaaacgcataaacttatcttcatagttgcc

SEQ ID NO: 17 - DNA, 34 bp, Artificial Sequence
  amplification of the targeting sequence of the gene FNR from Spinacia oleracea to generate targeting vectors
ataccatggaagagcaagaggcgatctgggccct

SEQ ID NO: 18 - DNA, 419 bp, Spinacia oleracea
gcataaacttatcttcatagttgccactccaatttgctccttgaatctcctccacccaatacataatccactcctccatcacccacttcactactaaatcaaacttaactctgtttttctctctcctcctttcatttcttattcttccaatcatcgtactccgccatgaccaccgctgtcaccgccgctgtttctttcccctctaccaaaaccacctctctctccgcccgaagctcctccgtcatttcccctgacaaaatcagctacaaaaaggtgattcccaatttcactgtgttttttattaataatttgttattttgatgatgagatgattaatttgggtgctgcaggttcctttgtactacaggaatgtatctgcaactgggaaaatgggacccatcagggcccagatcgcctct

SEQ ID NO: 19 - protein, 62 aa, Acetabularia mediterranea
MASIMMNKSVVLSKECAKPLATPKVTLNKRGFATTIATKNREMMVWQPFNNKMFETFSFLPP

SEQ ID NO: 20 - protein, 90 aa, Arabidopsis thaliana
MAASLQSTATFLQSAKIATAPSRGSSHLRSTQAVGKSFGLETSSARLTCSFQSDFKDFTGKCSDAVKIAGFALATSALVVSGASAEGAPK

SEQ ID NO: 21 - protein, 96 aa, Arabidopsis thaliana
MAQVSRICNGVQNPSLICNLSKSSQRKSPLSVSLKTQQHPRAYPISSSWGLKKSGMTLIGSELRPLKVMSSVSTAEKASEIVLQPIREISGLIKLP

SEQ ID NO: 22 - protein, 100 aa, Arabidopsis thaliana
MAAATTTTTTSSSISFSTKPSPSSSKSPLPISRFSLPFSLNPNKSSSSSRRRGIKSSSPSSISAVLNTTTNVTTTPSPTKPTKPETFISRFAPDQPRKGA

SEQ ID NO: 23 - protein, 46 aa, Arabidopsis thaliana
MITSSLTCSLQALKLSSPFAHGSTPLSSLSKPNSFPNHRMPALVPV

SEQ ID NO: 24 - protein, 93 aa, Arabidopsis thaliana
MASLLGTSSSAIWASPSLSSPSSKPSSSPICFRPGKLFGSKLNAGIQIRPKKNRSRYHVSVMNVATEINSTEQVVGKFDSKKSARPVYPFAAI

SEQ ID NO: 25 - protein, 52 aa, Arabidopsis thaliana
MASTALSSAIVGTSFIRRSPAPISLRSLPSANTQSLFGLKSGTARGGRVVAM

SEQ ID NO: 26 - protein, 39 aa, Arabidopsis thaliana
MAASTMALSSPAFAGKAVNLSPAASEVLGSGRVTNRKTV

SEQ ID NO: 27 - protein, 92 aa, Arabidopsis thaliana
MAAITSATVTIPSFTGLKLAVSSKPKTLSTISRSSSATRAPPKLALKSSLKDFGVIAVATAASIVLAGNAMAMEVLLGSDDGSLAFVPSEFT

SEQ ID NO: 28 - protein, 85 aa, Arabidopsis thaliana
MAAAVSTVGAINRAPLSLNGSGSGAVSAPASTFLGKKVVTVSRFAQSNKKSNGSFKVLAVKEDKQTDGDRWRGLAYDTSDDQIDI

SEQ ID NO: 29 - protein, 54 aa, Arabidopsis thaliana
MKSSMLSSTAWTSPAQATMVAPFTGLKSSASFPVTRKANNDITSITSNGGRVSC

SEQ ID NO: 30 - protein, 91 aa, Arabidopsis thaliana
MAASGTSATFRASVSSAPSSSSQLTHLKSPFKAVKYTPLPSSRSKSSSFSVSCTIAKDPPVLMAAGSDPALWQRPDSFGRFGKFGGKYVPE

SEQ ID NO: 31 - protein, 80 aa, Brassica campestris
MSTTFCSSVCMQATSLAATTRISFQKPALVSTTNLSFNLRRSIPTRFSISCAAKPETVEKVSKIVKKQLSLKDDQKVVAE

SEQ ID NO: 32 - protein, 51 aa, Brassica napus
MATTFSASVSMQATSLATTTRISFQKPVLVSNHGRTNLSFNLSRTRLSISC

SEQ ID NO: 33 - protein, 44 aa, Chlamydomonas reinhardtii
MQALSSRVNIAAKPQRAQRLVVRAEEVKAAPKKEVGPKRGSLVK

SEQ ID NO: 34 - protein, 51 aa, Cucurbita moschata
MAELIQDKESAQSAATAAAASSGYERRNEPAHSRKFLEVRSEEELLSCIKK

SEQ ID NO: 35 - protein, 62 aa, Spinacea oleracea
MSTINGCLTSISPSRTQLKNTSTLRPTFIANSRVNPSSSVPPSLIRNQPVFAAPAPIITPTL

SEQ ID NO: 36 - protein, 75 aa, Spinacea oleracea
MTTAVTAAVSFPSTKTTSLSARCSSVISPDKISYKKVPLYYRNVSATGKMGPIRAQIASDVEAPPPAPAKVEKMS

SEQ ID NO: 37 - protein, 55 aa, Spinacea oleracea
MTTAVTAAVSFPSTKTTSLSARSSSVISPDKISYKKVPLYYRNVSATGKMGPIRA

SEQ ID NO: 38 - DNA, 2391 bp, Escherichia coli
  CDS (1)..(2391): transl_table=11
atggcaattaacaatacaggctcgcgacgattactcgtcacgctaacagccctttttgcagcgctttgcgggctgtatctactcattggcggaggctggctggtcgcgattggcggctcctggtactaccctatcgctggccttgtgatgctcggcgtcgcctggatgctgtggcgcagtaaacgcgccgcgctttggctatacgcagccctgctgctcggcaccatgatttggggcgtctgggaagttggtttcgacttctgggcgctgactccgcgcagcgacattctggtcttcttcggcatctggctgatcctgccgtttgtctggcgtcgcctggtcattcctgccagcggcgcagttgccgcactggtggtcgcactgctgattagcggtggtatcctgacctgggccggatttaacgatccgcaggagatcaacggcaccttaagcgccgatgccacacctgctgaagctatctcccccgtagccgatcaggactggcctgcctatggtcgtaatcaggaaggtcaacgcttttcgccgctgaaacaaattaacgccgataacgtccataatctgaaagaagcctgggtgttccgtactggcgatgtgaagcagccgaacgatccgggtgaaatcaccaatgaagtgacgccgattaaagtgggcgacaccctttacctgtgtaccgctcaccagcgcctgtttgcgcttgatgccgccagcggcaaagagaaatggcattacgatcctgagctgaaaaccaacgagtctttccagcacgtaacctgccgtggtgtctcttatcatgaagccaaagcagaaaccgcttcgccggaagtgatggcggattgcccgcgtcgtatcattcttccggtcaatgatggtcgactgattgcgattaacgctgaaaacggcaaactgtgcgaaaccttcgccaataaaggcgtgctcaatctgcaaagcaatatgccagacaccaaaccgggtctgtatgaaccgacttcgccaccgattatcaccgataaaaccatcgtgatggccggttcagttaccgataacttctcaacccgcgaaacgtctggcgtgatccgtggttttgatgtcaacaccggggagctgctgtgggcttttgatcccggcgcgaaagatccgaacgcaatcccgtctgacgaacacacctttacctttaactcgccaaactcctgggcaccagcggcctatgacgcgaagctggatctggtctatctgccgatgggcgtgaccacgccggatatctggggcggtaaccgcacaccggaacaggaacgttatgccagctcgattctggcgctgaatgccactaccgggaaactggcgtggagctaccagaccgttcaccacgacctgtgggacatggatcttccggcacagccgacgctggcggacatcaccgttaatggtcagaaagtgccagttatttacgctccggcgaaaaccggcaacatttttgtgctcgatcgtcgtaatggcgaactggtggttccggcaccggaaaaaccggttccccaaggtgcagcgaaaggcgattacgtaaccccaactcaaccgttttctgaactgagcttccgtccgacgaaagatttgagcggtgcggatatgtggggagccaccatgtttgaccaactggtgtgccgcgtgatgttccaccagatgcgctatgaaggcattttcaccccgccatctgaacagggtacgctggtcttcccgggtaacctggggatgttcgaatggggcgggatttccgttgatccaaatcgtgaagtggcgattgccaacccaatggcactgccgtttgtttcgaaactgatcccgcgtggtcctggcaacccgatggagcagccgaaagatgccaaaggcacgggtacggaatccggcattcagccacagtacggtgtaccgtatggtgtcacgctcaacccgttcctctcaccatttggtctgccatgtaaacagccagcatggggttatatctcggcgctggatctgaaaactaatgaagtggtgtggaagaaacgtattggtacgccgcaggacagtatgccgttcccgatgccggttccggtgccgttcaatatgggtatgccgatgctgggcgggccaatctccacggcgggtaacgtgctgtttatcgccgctacggcagataactacctgcgcgcttacaacatgagcaacggtgaaaaactgtggcagggtcgtttaccagcgggtggtcaggctacgccaatgacctatgaagtgaatggtaagcagtatgtggtgatctccgcaggcggtcacggttcatttggtacgaagatgggcgactatattgtggcttatgcgctgccggatgatgtgaagtaa

SEQ ID NO: 39 - protein, 796 aa, Escherichia coli
MAINNTGSRRLLVTLTALFAALCGLYLLIGGGWLVAIGGSWYYPIAGLVMLGVAWMLWRSKRAALWLYAALLLGTMIWGVWEVGFDFWALTPRSDILVFFGIWLILPFVWRRLVIPASGAVAALVVALLISGGILTWAGFNDPQEINGTLSADATPAEAISPVADQDWPAYGRNQEGQRFSPLKQINADNVHNLKEAWVFRTGDVKQPNDPGEITNEVTPIKVGDTLYLCTAHQRLFALDAASGKEKWHYDPELKTNESFQHVTCRGVSYHEAKAETASPEVMADCPRRIILPVNDGRLIAINAENGKLCETFANKGVLNLQSNMPDTKPGLYEPTSPPIITDKTIVMAGSVTDNFSTRETSGVIRGFDVNTGELLWAFDPGAKDPNAIPSDEHTFTFNSPNSWAPAAYDAKLDLVYLPMGVTTPDIWGGNRTPEQERYASSILALNATTGKLAWSYQTVHHDLWDMDLPAQPTLADITVNGQKVPVIYAPAKTGNIFVLDRRNGELVVPAPEKPVPQGAAKGDYVTPTQPFSELSFRPTKDLSGADMWGATMFDQLVCRVMFHQMRYEGIFTPPSEQGTLVFPGNLGMFEWGGISVDPNREVAIANPMALPFVSKLIPRGPGNPMEQPKDAKGTGTESGIQPQYGVPYGVTLNPFLSPFGLPCKQPAWGYISALDLKTNEVVWKKRIGTPQDSMPFPMPVPVPFNMGMPMLGGPISTAGNVLFIAATADNYLRAYNMSNGEKLWQGRLPAGGQATPMTYEVNGKQYVVISAGGHGSFGTKMGDYIVAYALPDDVK

SEQ ID NO: 40 - DNA, 2400 bp, Bradyrhizobium sp. ORS278
  CDS (1)..(2400): transl_table=11
atggccgcagcccgccatctgcagcgcgcgccgctgctgaccttcacggccgtcatcgtcggactgatgggcgtcgcactgctcgccggcggcttctggctcgccgcgatcggcggctcgctgtactacgtgattgccggtgcggcactgctcggcacggcgtggctgctgtggcagcggcgcgcttccgcgctatggctctacgcggcactgctgctgggcacgatgatctgggcggtctgggaggtcgggctggacttctggtcgctggcgccacgcggcgacgtgctggcaccgctcggcgtctggctgctgctgccgttcatcaccgcgcatctggccggtgacatgcgctcggcgcgctggggccttctcgccgtgctcgccgtcgcggtggtcgtgctcggcgcctccctgcgcggcgaccgcttcggcgtcaacggcgcgctgccgcaggccgcggctgccaccgccggcaccgatcccgggcccgcggaagcgcaggccgactggaccgcgtatggcgccagcaatttcggcacgcgcttctcgagcctgaagcagatcaccgccaataatgtgaagaacctgcaactcgcctgggaattccagaccggcgaccgcaaggggcccgacgatcccgacgagttcaccaatgaggtgacgccgctgaagatcggcgatctgctctacacctgctcgccgcaccagatcgtgttcgcgctcgatgcggccacgggcaagcagcgctggacgttcgatccgaagatcgagcaccacaagaatttccagcacatgacctgccgcggcgtcgcgtatcacgagaccaagcccggcgcagtcgacgtgtcgggcgccgcggctccgggcgaatgcgccaggcgcatcttcctgccgaccgacgacggacggctgttcgcgctcgacgccgacagcggcaagccgtgcgacggctttggcgatcacggccagatcgatctgaaggccggcaacgagatcaccacggtcggcttctacgaggggacctcgccgcccgttgtcaccgacaaggtgctgatcatggccggcgccgtgatcgacaactactccaacaaggtgccgtcgggcgcgatccgcggcttcgacgtctactcgggcaagctgttatgggcgttcgatcccggcaatcccgatccgaacgagatgccgtcggcgacgcatcatttcacgccgggctcgccgaacggctggagcgtcggcgcggccgacgaggcgctcggcctggtctacatcccgcttggctcgagctcgccggacatctgggccggcaaccgctcggccgacaacgagcgctatgattccgcgctggtcgcgctcgacatcgccaccggcaaattgcgctggtcgttccagaacgtgcatcacgatctctgggacatggacatgccgtcgcagccgagtctggtcgacatgccaggccaagacggcgtggtgccggcgatctatgtgccggccaagaccggcaacatcttcgtgctcgaccgccgcgacgggcacctgctggtccccgcgcccgaaaagcctgtgccgcaaggtgcggcgcccggcgatcatctgtcaccgactcagccattctccgagctgagcttccgtccgcgcaaccagctgacaggcgcgcagatgtggggcgcgacgatgttcgatcagctcgcctgccgtatcaagttcaagcggctgcgctacgagggcccgttcacgccgccctccgagcagggcacgctggtctatcccggcgatttcggcatgttcgaatggggcggcatcgcgatcgatcccgtcaggaagatcgcgatcgccaatccgcaatcgatcccgttcgtgtcgcggctggtgccgcgcggcaaggacaatccggcggcgccgaactccgcgcatccgccgggcaccgagctcggcgtgcagccgatgtacggcacgccctatggcgtcgatctcggcatcttcctgtcaccgctcggaatcccctgcatggccccgccctggggcagcctcgccgccatcgatctcaagaccaaccagatcgtctggcagcaccgcgtcggcaccattcgcgaccaggcccccgtgccactgccgttcaagctgggcgtgccgatgctcggcggcccgatggtgaccgcgggcggcgtcgccttcctcaccggcacgatggacgactacatccgcgccttcgacgtcaaggatggccggctgctctggcaggaccgcctgccggccggcggccagtcgacgccgatgacgtacgaagccggcggcaggcagtatgtcgtcaccgtcgatggcggccacggttcgttcggcaccaagctcggtgactatgtccgcgcctacgcattgcccggcaacgtcgcgagcagatag

SEQ ID NO: 41 - protein, 799 aa, Bradyrhizobium sp. ORS278
MAAARHLQRAPLLTFTAVIVGLMGVALLAGGFWLAAIGGSLYYVIAGAALLGTAWLLWQRRASALWLYAALLLGTMIWAVWEVGLDFWSLAPRGDVLAPLGVWLLLPFITAHLAGDMRSARWGLLAVLAVAVVVLGASLRGDRFGVNGALPQAAAATAGTDPGPAEAQADWTAYGASNFGTRFSSLKQITANNVKNLQLAWEFQTGDRKGPDDPDEFTNEVTPLKIGDLLYTCSPHQIVFALDAATGKQRWTFDPKIEHHKNFQHMTCRGVAYHETKPGAVDVSGAAAPGECARRIFLPTDDGRLFALDADSGKPCDGFGDHGQIDLKAGNEITTVGFYEGTSPPVVTDKVLIMAGAVIDNYSNKVPSGAIRGFDVYSGKLLWAFDPGNPDPNEMPSATHHFTPGSPNGWSVGAADEALGLVYIPLGSSSPDIWAGNRSADNERYDSALVALDIATGKLRWSFQNVHHDLWDMDMPSQPSLVDMPGQDGVVPAIYVPAKTGNIFVLDRRDGHLLVPAPEKPVPQGAAPGDHLSPTQPFSELSFRPRNQLTGAQMWGATMFDQLACRIKFKRLRYEGPFTPPSEQGTLVYPGDFGMFEWGGIAIDPVRKIAIANPQSIPFVSRLVPRGKDNPAAPNSAHPPGTELGVQPMYGTPYGVDLGIFLSPLGIPCMAPPWGSLAAIDLKTNQIVWQHRVGTIRDQAPVPLPFKLGVPMLGGPMVTAGGVAFLTGTMDDYIRAFDVKDGRLLWQDRLPAGGQSTPMTYEAGGRQYVVTVDGGHGSFGTKLGDYVRAYALPGNVASR

SEQ ID NO: 42 - DNA, 2358 bp, Mesorhizobium loti MAFF303099
  CDS (1)..(2358): transl_table=11
atggccgcgcgagcgcgcaacagtcgaaggagtatcatcttggctgtcaccatcacctccttcgttctctttctcctcggtctggcgcttggtggcggtggcatctggctggcttcgctggggggcagttggtactacatcgtcgtcggcctcgccttcctgatcgccgcctggctgctctaccggcgccgttccacggcgctctggctctatgcggcgattgtgctcggcacgctggcctgggcggtctgggaaatcggcttcgactggtgggagctcggcccgcgcggcggcatcatcgtgctggtcgggctgtggctgctgacgccgtgggcaaggcggggccttgccgggcctgacgggcgcgcgccgctgatcctggccgtgctggcatcgctggcggtggccggctattcgatgaccgccgacccgaaaggcattgacggcgcgctcgacaccgacaaggtgattcccaaagccaatctgggtaatgatgtgccggctggcgagtggcactattacggacgcacgcagtttggccaacgctattcgccgctcgaccagatcacgccggacaatgtcgccaatctgcagccggcatggacctatcgcaccggcgatgtgaaggggcccgacgacatcggcgagaccacctatcaggtgacgccgctgaagatcggcgacacgctctacatctgcacgccgcataatttcgccatcgcggtggacgccgcgaccggaaaggaaaaatggcgctacgatcccaagatcaagctcgacaaggaccgccagcaccagacctgccgcggcgtgtcctactatgccgataccgccatcgccgccggccagccctgcgcgacccgcatctacctgccgacctcggatgcgcggctgatcgcgctcgacgccgccagcggtcaggtctgtccggccttcgccgagggcggcacgctgaaccttctgaccaacatgccctatccgaaatcgggctactactattcgacctcggcgccgctgatatcaggcagcaagatcatcgtcggcggcgcggtcaacgacaactattcgacgcaggagccgtcgggggtcatccgcgcctatgatgtcggcaccggcgccctggtgtggaagtgggattccggcaacccggaccagacgacgccgctggcggcgggccagacctataccgccaactcgcccaacatgtggtcgacgccgagcgccgacgagaagcttgggctgctctatgtgccactcggcaaccagacgccggaccagctcggcgccgggcgtagcgccaatgtcgagaaattctcctcctcgatcgccgcgctcgacctcaacaccgggcagttgcgctgggtgcggcagaccgtgcaccatgacctctgggacatggacgtgccggcgcagccgagcctgattgacatcaccaaggccgacggcacagtggtgccggcgctggtcgggccgaccaagcagggcgacctctatgtgcttgaccggcgcaccggcgaaccgcttgttgcagtcaaggaagtgccggcgcccggcggcgccgtcgagggcgatcacacgtcgccgacgcaaccggtgtcggatctctccttcagcccgaagccgctgacggatgccgacatgtggggcatcaccatgttcgaccagatggcctgcaggattgccttccacaagctgcgctacgaaggccgttacacgccgccgtcggtgcagggatcgctgatctaccccggcaatttcggagtcttcaactggggcggggtggcagtcgatccggtgcggcaggtgatgttcggcatgccgacctatctggcgtttacgtcgagactcgtgccccgcgcggacgtaccgccgccgggcgatgacaccaagggcagcgagcaggggctgaaccgcaacgagggcgcgccctacgcagtggtgatggggccgttcctgtcgcctctcggcattccctgccaggcgccaccctggggttatgtcgcgggcgcggatctgcggaccggcaccatcgcctacaagcatcgcaacggtaccgtctacgatatgacgccgctgccgctgccgctgaaggtcggcgtgccgggcattggcgggccgatcatcactgccggcggcgtcgccttcctgggtgccgcggtcgacaactatctgcgcgcctatgacctgacgtcgggccggcaactctggcaggccaggctgcccgccggcggccagtcgacgccgatgacctatacggtcgccgacgggcgccagttcgtggtcatcgtcgccggcggccacggctcggtcggcaccaagccgggggattatgtgatggcttacgcgctgccgaaatag

SEQ ID NO: 43 - protein, 785 aa, Mesorhizobium loti MAFF303099
MAARARNSRRSIILAVTITSFVLFLLGLALGGGGIWLASLGGSWYYIVVGLAFLIAAWLLYRRRSTALWLYAAIVLGTLAWAVWEIGFDWWELGPRGGIIVLVGLWLLTPWARRGLAGPDGRAPLILAVLASLAVAGYSMTADPKGIDGALDTDKVIPKANLGNDVPAGEWHYYGRTQFGQRYSPLDQITPDNVANLQPAWTYRTGDVKGPDDIGETTYQVTPLKIGDTLYICTPHNFAIAVDAATGKEKWRYDPKIKLDKDRQHQTCRGVSYYADTAIAAGQPCATRIYLPTSDARLIALDAASGQVCPAFAEGGTLNLLTNMPYPKSGYYYSTSAPLISGSKIIVGGAVNDNYSTQEPSGVIRAYDVGTGALVWKWDSGNPDQTTPLAAGQTYTANSPNMWSTPSADEKLGLLYVPLGNQTPDQLGAGRSANVEKFSSSIAALDLNTGQLRWVRQTVHHDLWDMDVPAQPSLIDITKADGTVVPALVGPTKQGDLYVLDRRTGEPLVAVKEVPAPGGAVEGDHTSPTQPVSDLSFSPKPLTDADMWGITMFDQMACRIAFHKLRYEGRYTPPSVQGSLIYPGNFGVFNWGGVAVDPVRQVMFGMPTYLAFTSRLVPRADVPPPGDDTKGSEQGLNRNEGAPYAVVMGPFLSPLGIPCQAPPWGYVAGADLRTGTIAYKHRNGTVYDMTPLPLPLKVGVPGIGGPIITAGGVAFLGAAVDNYLRAYDLTSGRQLWQARLPAGGQSTPMTYTVADGRQFVVIVAGGHGSVGTKPGDYVMAYALPK

SEQ ID NO: 44 - DNA, 2412 bp, Pseudomonas aeruginosa PAO1
  CDS (1)..(2412): transl_table=11
atgagcgaaggtaaccgcagtcgatcgcgcctgctgccgagcctgctcggcctgttgatcctgctgtccggcctggcgctgctggccggcggcatcaagctggcgagcctgggcggctcgctgtactacctgctggccggcatcggcctggccctgagcggactgttgctgctgctgggcaagcgtgcggcgctaggcctgtacgctctggtgctgttcgccagcaccgtctgggcgctgtgggaagtcggcctggactggtggcaactggtgccgcgcctggctctgtggttcgtcttcggcctgctgctctggctaccctggttccgccgcccgctgctggccgacggtccggcgccgctgggcaccgcggcgctgggcgtggcggtggtcctggccggcgccgccgcggtgggcagccagttcaccaatccggggcagatcgtcggtcgcatcgaccgcgacagcggcatgaccagcaccgccccggcgatgccggacggcgactggcaggcctacgggcgcaccgagttcggcgaccgctactcgccgttgaagcagatcaccccggccaacgtcggccagctcgaggaagcctggcgcatccgtaccggcgacctgccgaccgccgacgatccgctcgaactgaccaacgagaacaccccgctgaaggtcaacggcatgctctacgcctgcaccgcgcacagcaaggtgctggccctcgacccggacaccggcgcggaaatctggcgcttcgatccgcagatccagagcccggtaggcttcaagggcttcgcccacatgacttgccgtggcgtctcctactacgacgaagagcagtacgccaggagcgacgtcggcgcgccgccggccgcgctctccgaggccggcaaggcggtcgccgccagttgtccgcggcgcctgttcctgcccaccgccgacgcccgcctgatcgcgatcaacgccgacaacggcaaggtctgcgaggacttcggggtcaagggcgcggtcgacctgacggccggcatcggtccgttcaccccgggcggctactactccacctcgccggcggcggtcacccgcaatctggtgatcatcggcggccacgtcaccgacaacgagtcgaccaacgagccgtccggggtgatccgcgccttcgacgtgcacgacggcaagctggtgtggaactgggacagcggcaacccggacgagaccgagcccctggcgcccggcaagttctatacccgcaactcgccgaacatgtggtcgctggccagcgtcgacgagaagctcggccaggtctacctgccgctgggcaaccagatgcccgaccagtggggcggcaaccgcacccctggcgccgagaagttcagcgccggcctggtggccctcgacctgaacaccggcaagctgcgctggaactaccagttcacccaccacgacctgtgggacatggacgtcggcagccagccgaccctgctcgacctgaagaccgccgatggcgtcaagccggcgctgatcgcgccgaccaagcagggcagcctgtacgtgctggaccgccgcgacggcacgccgatcgtgccgatccgcgaagtgccggcgccgcagggcgcggtggagggcgaccataccgcgccgacccaggcgcgttccgacctcaacctgctgcgcccgccgctgaccgagcgcgacatgtggggcagcagcccgttcgaccagatgctctgccgcatccagttccgctcgctgcgctacgagggccagtacaccccgccgtcggagcagggcagcctgatctatccgggcaacgtcggagtgttcaactggggcggggtgtcggtcgacccggtgcgccagatcctcttcaccagccccaactacatggccttcgtctcgcagatggtgccgcgcgacaaggtgcccagcggaagcaagcgcgagggcgagaccagcggcgtgcagccgaacaccggcgcgccctacgcggtgatcatgcatccgttcatgtcgcccatcggcctgccgtgccaggcgccgtcctggggtgacgtggcgggtatcgacctgaccaccgccaaggtcgtctggcagcacaagaacggcaccagccgcgacaacaccccggtgccgatcggcctcaccgtcggcgtaccgagcatgggcggctcgatcaccaccgccggcggcgtggccttcctcagcggcacgctcgaccagtacctgcgcgcctacgacgtgaaggacggcaagcagctctggcaggcgcgcctgccggccggcggccaggccacgccgatgagctacaccggcaaggacggtcgccagtacgtgctgatcgtcgctggcggacacggctccttcggtacccgcatgggcgactacatcatcgcctacgccctgcccaggcaatga

SEQ ID NO: 45 - protein, 803 aa, Pseudomonas aeruginosa PAO1
MSEGNRSRSRLLPSLLGLLILLSGLALLAGGIKLASLGGSLYYLLAGIGLALSGLLLLLGKRAALGLYALVLFASTVWALWEVGLDWWQLVPRLALWFVFGLLLWLPWFRRPLLADGPAPLGTAALGVAVVLAGAAAVGSQFTNPGQIVGRIDRDSGMTSTAPAMPDGDWQAYGRTEFGDRYSPLKQITPANVGQLEEAWRIRTGDLPTADDPLELTNENTPLKVNGMLYACTAHSKVLALDPDTGAEIWRFDPQIQSPVGFKGFAHMTCRGVSYYDEEQYARSDVGAPPAALSEAGKAVAASCPRRLFLPTADARLIAINADNGKVCEDFGVKGAVDLTAGIGPFTPGGYYSTSPAAVTRNLVIIGGHVTDNESTNEPSGVIRAFDVHDGKLVWNWDSGNPDETEPLAPGKFYTRNSPNMWSLASVDEKLGQVYLPLGNQMPDQWGGNRTPGAEKFSAGLVALDLNTGKLRWNYQFTHHDLWDMDVGSQPTLLDLKTADGVKPALIAPTKQGSLYVLDRRDGTPIVPIREVPAPQGAVEGDHTAPTQARSDLNLLRPPLTERDMWGSSPFDQMLCRIQFRSLRYEGQYTPPSEQGSLIYPGNVGVFNWGGVSVDPVRQILFTSPNYMAFVSQMVPRDKVPSGSKREGETSGVQPNTGAPYAVIMHPFMSPIGLPCQAPSWGDVAGIDLTTAKVVWQHKNGTSRDNTPVPIGLTVGVPSMGGSITTAGGVAFLSGTLDQYLRAYDVKDGKQLWQARLPAGGQATPMSYTGKDGRQYVLIVAGGHGSFGTRMGDYIIAYALPRQ

SEQ ID NO: 46 - DNA, 2391 bp, Escherichia coli O157:H7 EDL933
  CDS (1)..(2391): transl_table=11
atggcaattaacaatacaggctcgcgacgattactcgtcacgctaacagccctttttgcagcgctttgcgggctgtatctactcattggcggaggctggctggtcgcgattggcggctcctggtactaccctatcgctggccttgtgatgctcggcgtcgcctggatgctgtggcgcagtaaacgtgccgcgctttggctatacgccgccctgctgctcggcaccatgatttggggcgtctgggaagttggtttcgacttctgggcgctgactccgcgcagcgatattctggtcttcttcggcatctggctgatcctgccgtttgtctggcgtcgcctggtcattcctgccagcggcgcagttgccgcactggtggtggcactgctgattagcggtagtatcctgacctgggccggatttaacgatccgcaggaaatcaacggcaccttaagcgccgatgccacacctgcggaagctatctcacccgttgccgatcaggactggcctgcctatggtcgcaatcaggaaggtcaacgcttttcacctctgaaacaaattaacgccgataacgtccataatctgaaagaagcctgggtgttccgtactggcgatgtgaagcagccgaacgatccgggcgaaatcaccaatgaagtgacgccgattaaagtgggcgacaccctttacctgtgtaccgctcaccagcgcctgtttgcgctcgatgccgccagcggcaaagagaaatggcattacgatcctgagctgaaaactaacgagtctttccagcacgtaacctgccgtggcgtctcttatcatgaagccaaagcagaaacggcttcgccggaagtgatggcggattgcccgcgtcgtatcattcttccggtcaatgatggtcgcctgattgcgattaacgctgaaaacggcaagctgtgcgaaaccttcgccaataaaggcgtgctcaatctgcaaagcaatatgccagacaccaaaccgggtctgtatgaaccgacttcgccaccgattatcaccgataaaaccatcgtgatggcaggttcagttaccgataacttctcaacccgcgaaacgtctggcgtgatccgtggttttgatgtcaacaccggggagctgctgtgggcttttgatccgggcgcgaaagatccgaacgcaatcccgtctgacgaacacacctttacctttaactcgccaaactcgtgggcaccagcggcctatgacgcgaagctggatctggtgtatctgccgatgggcgtgaccacgccggatatctggggcggtaaccgcacaccggaacaggaacgttatgccagctcgattctggcgctgaatgccacaaccgggaaattggcgtggagctaccagaccgttcaccacgacctgtgggatatggatcttccggcacagccgacgctggcggacatcaccgttaatggtcagaaagtgccagttatttacgctccggcgaaaaccggcaacatttttgtgctcgatcgtcgtaatggcgaactggtggttccggcaccggaaaaaccggttccccaaggtgctgccaaaggcgattacgttacccctactcaaccattctcggaactgagcttccgtccgacgaaagatttgagcggtgcggatatgtggggagccaccatgtttgaccaactggtgtgccgcgtgatgttccaccagatgcgctatgaaggcattttcacgccgccatctgaacagggcacgctggtcttcccgggtaacctgggaatgtttgaatggggcgggatttccgttgatccaaatcgtgaagtggcaattgccaacccaatggcactgccgtttgtttcgaaactgatcccacgcggtccgggtaacccgatggagcagccgaaagatgccaaaggcacgggtacggaatccggcattcagccacagtacggtgtaccgtatggtgtcacgctcaacccgttcctctcaccatttggtctgccatgtaaacagccagcatggggttatatctcggcgctggatctgaaaactaatgaagtggtgtggaagaaacgtattggtacgccgcaggacagtatgccgttcccgatgcctgtaccggtgccgttcaatatgggtatgccgatgctgggcgggccaatctccacggcgggtaacgtgctgtttatcgccgctacggcagataactacctgcgcgcttacaacatgagcaacggtgaaaaactgtggcagggtcgtttaccagcgggtggtcaggcgacgccaatgacctatgaagtgaatggtaagcagtatgtggtgatctccgcaggcggtcacggttcatttggtacgaagatgggtgactatattgtggcttatgcgctgccggatgatgtgaagtaa

SEQ ID NO: 47 - protein, 796 aa, Escherichia coli O157:H7 EDL933
MAINNTGSRRLLVTLTALFAALCGLYLLIGGGWLVAIGGSWYYPIAGLVMLGVAWMLWRSKRAALWLYAALLLGTMIWGVWEVGFDFWALTPRSDILVFFGIWLILPFVWRRLVIPASGAVAALVVALLISGSILTWAGFNDPQEINGTLSADATPAEAISPVADQDWPAYGRNQEGQRFSPLKQINADNVHNLKEAWVFRTGDVKQPNDPGEITNEVTPIKVGDTLYLCTAHQRLFALDAASGKEKWHYDPELKTNESFQHVTCRGVSYHEAKAETASPEVMADCPRRIILPVNDGRLIAINAENGKLCETFANKGVLNLQSNMPDTKPGLYEPTSPPIITDKTIVMAGSVTDNFSTRETSGVIRGFDVNTGELLWAFDPGAKDPNAIPSDEHTFTFNSPNSWAPAAYDAKLDLVYLPMGVTTPDIWGGNRTPEQERYASSILALNATTGKLAWSYQTVHHDLWDMDLPAQPTLADITVNGQKVPVIYAPAKTGNIFVLDRRNGELVVPAPEKPVPQGAAKGDYVTPTQPFSELSFRPTKDLSGADMWGATMFDQLVCRVMFHQMRYEGIFTPPSEQGTLVFPGNLGMFEWGGISVDPNREVAIANPMALPFVSKLIPRGPGNPMEQPKDAKGTGTESGIQPQYGVPYGVTLNPFLSPFGLPCKQPAWGYISALDLKTNEVVWKKRIGTPQDSMPFPMPVPVPFNMGMPMLGGPISTAGNVLFIAATADNYLRAYNMSNGEKLWQGRLPAGGQATPMTYEVNGKQYVVISAGGHGSFGTKMGDYIVAYALPDDVK

SEQ ID NO: 48 - DNA, 2337 bp, Agrobacterium tumefaciens str. C58
  CDS (1)..(2337): transl_table=11
atggcagtcaccgtcactgcggtcattcttacgctgatcggccttgcgctgttcggcttcggctctcagctcgtcatgttgggcgggagcttttattatcttctttccggactggcctttctgttgacggccgttctgctgttcaagcgcaatcgcgccgcccttcacgtttatgccgttttcattgtcgcgacgcttgcctgggcagtctgggaagtcggatttgactggtggcagcttggaccgcggggcggcgtcattattctcattggtctttggctgctggtgccgtgggtcaggaaaccgcttggcttttcaagcccgaccggtctgagttacagccctaacgcttggccgctggtgctttccgttctcgcctcctttgcagttgccggctactccatggcgcaggacccgcatgatcaggcgggttcgttaccgcaggagatcgcatctgcggcacctgtctatggcggcgaagtgcctgacggtgactggcatcaatatggccgcacaccctatggccagcgttattcgccgctgacgcaggtgaatgtggacaatgtctcgcagttgaaggaagcctggcgttatcagacgggggacgtgaagctgcctgatgatgtgggtgagaccacctatcaggtcacgccactcaagatcggcaatacgctttatatctgcacgccgcataattgggcgatcgccatcgatgccgccaccggcaaggaaaaatggaaatacgaccccaatgtcggtctcaatcctgatcgccagcaccagacgtgccgtggcgtttcctattatgccgaaccgaacgccgctgccggcacggcctgcgcccagcgcgtctacctgccgacctcggacgcgcggctgatcgcgctcgatgcggccaccggccaggtctgcacctcctttgccgatcagggtgtgctgcatcttgaacagggcatgaagtacaatcccgccggttattattattcgacctcgccgccggtcatcgcggctggcaaaatcatcatcggcggcgcggtgaacgacaattattcgacgcaggagcagtccggcgtcatccgcgctttcgatgtgaatagcggtgctctcatctggaactgggattccggcaacccgcagaagaccgagccgatcgcggcgggtgagacctatacgaccaactcacccaacagctggtcggtgctgagttatgacgaaggcctcggcctcgtctacgtgccgcttggcaaccaggtgccggaccagcttggcatgggccgcagcgagaatgtcgagaaatattcctcctcgattgtcgcgctcgatatcaatacgggcaaggaccgctgggtgcgccagacggtacatcacgatctctgggacatggatgtgccggcccagccggtgctgctcgacatcaccaaggatggccagacggttccggccctcgtgggtcccaccaagcagggcgacatctacgtgctcgacaggcgcaccggtgagccgcttctgccgattaccgaggaaccggcgccgaccggagccatccctgaagacttcacatccccgacgcagccaacctcggcgctgtcgttcaagccggaaccgctgcaggaaaagaacatgtggggcgtctccatgttcgaccagctcgcctgccgcatccgcttccatcagctgaattacaagggccgctatacaccgccttcgctcaacggctcgatcatctatcccggcaatttcggcacgttcaactggggcagcgtggcggtcgatcccgagcgtcaggtgatgttcgggatgccaacctatctcgccttcacctcgcagctcgtgccgcgcgccgacattccgccgaagggacaggatgaaaagggcagcgaacagggcctcaaccgcaatgacggtgcgccctatggcgtctttatggggccattcctcggtccgctaaaaatcccctgccaggccccgccatggggttatgtcgcgggtgccgatctgcggaccggcgatgtcgcctacaagcataagaacggcacggtctatgacatgacgccgctgccgctacccttcaaggtgggggtgccgggcattggcggaccgatgatcaccaagggcggcgtcgccttcctcggtgcggccgtcgacaactatctgcgcgcctatgatctcaccacgggcaaagagctctgggaagcgcgtctgccagccggcggtcaggcaacgcccatgacctactcgctcgaaaacggaaaacaatatgtagtgatggtcgcgggcggccacggttcggttggtaccaagcccggtgattacgtcatcgcgtatacgctgccctga

SEQ ID NO: 49 - protein, 778 aa, Agrobacterium tumefaciens str. C58
MAVTVTAVILTLIGLALFGFGSQLVMLGGSFYYLLSGLAFLLTAVLLFKRNRAALHVYAVFIVATLAWAVWEVGFDWWQLGPRGGVIILIGLWLLVPWVRKPLGFSSPTGLSYSPNAWPLVLSVLASFAVAGYSMAQDPHDQAGSLPQEIASAAPVYGGEVPDGDWHQYGRTPYGQRYSPLTQVNVDNVSQLKEAWRYQTGDVKLPDDVGETTYQVTPLKIGNTLYICTPHNWAIAIDAATGKEKWKYDPNVGLNPDRQHQTCRGVSYYAEPNAAAGTACAQRVYLPTSDARLIALDAATGQVCTSFADQGVLHLEQGMKYNPAGYYYSTSPPVIAAGKIIIGGAVNDNYSTQEQSGVIRAFDVNSGALIWNWDSGNPQKTEPIAAGETYTTNSPNSWSVLSYDEGLGLVYVPLGNQVPDQLGMGRSENVEKYSSSIVALDINTGKDRWVRQTVHHDLWDMDVPAQPVLLDITKDGQTVPALVGPTKQGDIYVLDRRTGEPLLPITEEPAPTGAIPEDFTSPTQPTSALSFKPEPLQEKNMWGVSMFDQLACRIRFHQLNYKGRYTPPSLNGSIIYPGNFGTFNWGSVAVDPERQVMFGMPTYLAFTSQLVPRADIPPKGQDEKGSEQGLNRNDGAPYGVFMGPFLGPLKIPCQAPPWGYVAGADLRTGDVAYKHKNGTVYDMTPLPLPFKVGVPGIGGPMITKGGVAFLGAAVDNYLRAYDLTTGKELWEARLPAGGQATPMTYSLENGKQYVVMVAGGHGSVGTKPGDYVIAYTLP

SEQ ID NO: 50 - DNA, 2430 bp, Agrobacterium tumefaciens str. C58
  CDS (1)..(2430): transl_table=11
atgggtaatccagcaacttcattgtcgctcccggccagattatggctgttggcgctcggcgcggtcatcatcgctgcgggcctgttctttgccattggcggctggcagctcgtcgccctcggtggcagcccctatttcatcatcgcaggtctttcgctcatcgtttcgggcctgctgatcctgctgcgcaagccggcaggcgcgcttcttttcggtcttgttttcatcctcaccggcgtctgggctgtatgggaagcgggccttcatttctggccgctgatttcccgtctgctggccatcggggttggcgcaaccgtcgttgccctgtcatacccgctgctgcgccgtgcagccggcaaaacgccggcatatggctcttctttcgcggtagccgctgttctcgccatcgcttccggggccggttttgccggcatgttcgtggcgcatccgaccgttgccttcaatggcgagccggcggcgctgacgccggtcaagccggaaacggagcagaagaactgggaacattacggcaatacgtccggcggcagccgtttcgtggcgcttgatgaaattacccgagacaacatcaagaacctcgaagtcgcctggacctaccacaccggcgataccccgatcagccccggcgccaacggtgcggaagaccagcagacgccgctgcaggtaggtgacaccgtgttcctgtgcacgccgcacaacaatgtcatcgctctcgatgccgataccggaaccgagaagtggaaggcggaaatcaattcgaaatcctccgtctggatgcgttgccgcggccttgcctatttcgatgccaaggcgccgctgaagcaaccgactgcgccgggctccacgcccgtcacggccgcggttgtggccgaaggcgcactttgccagcgccgtattctgatgaacaccatcaatgcggaactcatcgcgcttgatgcggacacgggcgcgttttgccctgacttcggcacaaatggccgcgtcgatctgaagatcggtatgggagatgcaccggacccgcaatatgtcctgacctcggcacccacgctggccggcacgaccgtcgttgtcggcggccgtatcgccgataacgtgcaggtggacatgcccggcggtgtgatgcgcggtttcgacgtggtcacgggcgagcttcgctgggcttttgaccccggcaatcccgatatcaccaagctgccgcctccgggccagacttacacacgttccacgccgaacgtctgggcatccatgtcctacgatccggacctgaacacggtcttcatgcccgtcggcagcccttcggtcgatctttatggcgcgacacgcacgccgctcgaccataaatatggtgcctccatgctggcgctcgatgccacgaccggccgcgaaaagtgggtataccagacggttcataacgacctctgggacttcgacgtgccgatgcagccgagcttcgtcgatttcccgaaggctgacggaaccagcgttccggcgctggtcttcggcaccaaggcggggcagctctacgtgctcgaccgcgcgacgggacagccgctgaccaaggtggaagaggtttccgtcaaggctgccaatattcccaatgagccctacgcccccacgcagccgcgttccgtcggcatgccgcagatcggtgcgcagacgctgacggaagccgatatgtggggtgcgaccccgttcgaccagcttttgtgccgcatcgccttcaagggcatgcgttatgaggggctgtatacggcgcccggcacggacctctcgctcgccttcccgggttcgctcggcggcatgaactggggcggtctgtcgaccgatccgaccaccaacactatcttcgtcaacgatatgcgcctcggtctctggatcgagatgaaggaagccgcccccaccaaggccgttgccagcggtggcgaaagcgtcaataccggcatgggcgtcgttccgatgaagggcacgccctatgcggtgaacaagaaccgcttcctgtcggctctcggcatcccatgccaggctccgccctatggcaccatgaccgcgatcgacatgaagacgcagcagatcaagtggcaggtgccggtcggcaccgtcgaggatacgggtccgctcggtatcaagatgggtctgccgatcccgatcggcatgccgacgctcggcggcacgctcgccacccagggcggcctcgtcttcatcgccggtacgcaggattattatctgcgcgccttcgatacggcgaccggcaaggaagtctggaaggcccgccttccggtcggcagccagggcggaccgatgagctacaagtctccgaagacgggcaagcaatatgtcgtcatctcggccggcggtgcccgccagtctcccgatcgcggcgactacgtcatcgcttatgcattgcccaactga

SEQ ID NO: 51 - protein, 809 aa, Agrobacterium tumefaciens str. C58
MGNPATSLSLPARLWLLALGAVIIAAGLFFAIGGWQLVALGGSPYFIIAGLSLIVSGLLILLRKPAGALLFGLVFILTGVWAVWEAGLHFWPLISRLLAIGVGATVVALSYPLLRRAAGKTPAYGSSFAVAAVLAIASGAGFAGMFVAHPTVAFNGEPAALTPVKPETEQKNWEHYGNTSGGSRFVALDEITRDNIKNLEVAWTYHTGDTPISPGANGAEDQQTPLQVGDTVFLCTPHNNVIALDADTGTEKWKAEINSKSSVWMRCRGLAYFDAKAPLKQPTAPGSTPVTAAVVAEGALCQRRILMNTINAELIALDADTGAFCPDFGTNGRVDLKIGMGDAPDPQYVLTSAPTLAGTTVVVGGRIADNVQVDMPGGVMRGFDVVTGELRWAFDPGNPDITKLPPPGQTYTRSTPNVWASMSYDPDLNTVFMPVGSPSVDLYGATRTPLDHKYGASMLALDATTGREKWVYQTVHNDLWDFDVPMQPSFVDFPKADGTSVPALVFGTKAGQLYVLDRATGQPLTKVEEVSVKAANIPNEPYAPTQPRSVGMPQIGAQTLTEADMWGATPFDQLLCRIAFKGMRYEGLYTAPGTDLSLAFPGSLGGMNWGGLSTDPTTNTIFVNDMRLGLWIEMKEAAPTKAVASGGESVNTGMGVVPMKGTPYAVNKNRFLSALGIPCQAPPYGTMTAIDMKTQQIKWQVPVGTVEDTGPLGIKMGLPIPIGMPTLGGTLATQGGLVFIAGTQDYYLRAFDTATGKEVWKARLPVGSQGGPMSYKSPKTGKQYVVISAGGARQSPDRGDYVIAYALPN

SEQ ID NO: 52 - DNA, 2334 bp, Sinorhizobium meliloti 1021
  CDS (1)..(2334): transl_table=11
atggtcatcgtcctgaccgccgtcgtcttcgccgtgatcggcctcgccctctgtgggggcggcacgcggctcctgctgctcggcggcagcccgtattatctcatcgccggcttgggctttctgctcaccgcgtttttgctctttcgccgccgcgccgccgcgctttgggtctatgcgctggtcgttctcgggtcgctcgcatgggcgatctgggaggtgggcttcgattggtggcaactcgggcctcggggcggcgtgatcatcctgctcgggctgtggctgctaaccccatggatccggcgacccctcggcttcgtcagccccaccggcgagcaatatggggcaagcgcctggccgcttgcactggtgagcctcctctcggtcggtgtcgccctctattcgatgacgcaggacccccatgacattcgcggcgatctgcccggcgaagtcgcggcgaacgcgaacctcgggggcaacgtaccgccgggcgaatggcaccaatatggtcgcacgcccttcggtcaacgttactccccgctcgaccagatccgtccggaaaacgtcgccaacctgcaggtggcgtggcaataccagaccggagacgtgaagctgcccgaagacgtcagcgaaaccacttatcaggtgacgccgctgaaggtgaaggacacgctctatgtctgcacgccgcacaactgggcgatcgcgctcgacgcagccaccggtcaggagaagtggaaatacgattccaattccggcatgaacccggatcgccagcatcagacctgccgcggcgtcacctattgggccgatccggccgcagcgcccggcagcccctgcgccgagcgcgtctatctgccgacatcggacgcccgcctgatcgcgctcgacgcgacgaatggcgaggtctgcaccagcttcgccgacaacggcgtcctgcatctcgaacagggcatgaagcacaaccccgccggctactactattcgacctcgccgcccgtcgccgtcggcgacaggctcatcatcggcggggcggtcaacgacaactattccaccacggaacagtccggcgtgatccgcgctttcaacatcaacaccggcgcactcatctggaattgggacagcgggaatccggacgtaacggcgcccctccctccgggtcaaacctacaccaccaattcgccaaacagctggtccgtcttcagctatgacgaagggctcggcctcgtctacatccccatgggcaaccaggtgcccgaccagctcggcatgggccgcagcgagcatgtggagaaatactcctcctccatcgtcgccctggacatcaatacgggcgcggtacgctgggtacggcagacggtgcatcacgatctctgggatatggacgtacccgcccaacctgcccttctcgacatcacgagagaggacggaaccgtcgtgccggcactcgtcgggcctaccaagcagggcgacatctatgtgctcgaccggcgaagcggggagccgatcatcccgatcgaggaagtacccgctcccggcggtgcgatccccgaggatttcacggcccccacccagcccgtctcaggtctcaccttcatgcccccgccgctcatggagcgcgacatgtgggggatcagcatgttcgaccagcttgcatgccgcatcgaattcagaacgctgaaatacgagggacgctacacgccgccttccctcgaggggacgatcgtctatcccggcaatttcgggactttcaactggggctccgtcgccgtggatccggagcgccaggtgatgttcgggatgccgacctatctcgccttcacctcgcggctcgttccgcgcgaccagatcgccccgaagggcgaaggcgaaaagggtagcgaacagggcctcaaccgcaatgaaggcgcaccttacggggtctttatgggtccgttcctcggcccgctcgggattccctgccaggcaccgccatggggttatgtcgcaggcgccgatctcagaacgggcaagatcgcctacaagcacaagaacggcacggtctacgacatgacgccgctgccgctgcccttcaagctgggcgttccgggcatcggcggacccatgataaccaagggcgggctcgctttcctgggtgccgcggtcgacgattacttccgggcttacgacctgaccacgggcgaacagctctgggaagcgcggcttccggccggcggccagtcgacgccgatgacctatacggtcggcgagaagcagtatgtcctgatcgtcgcgggcggacacggttcggtcggcaccaagccgggcgactatgtcatcgcctatacgctgccctga

SEQ ID NO: 53 - protein, 777 aa, Sinorhizobium meliloti 1021
MVIVLTAVVFAVIGLALCGGGTRLLLLGGSPYYLIAGLGFLLTAFLLFRRRAAALWVYALVVLGSLAWAIWEVGFDWWQLGPRGGVIILLGLWLLTPWIRRPLGFVSPTGEQYGASAWPLALVSLLSVGVALYSMTQDPHDIRGDLPGEVAANANLGGNVPPGEWHQYGRTPFGQRYSPLDQIRPENVANLQVAWQYQTGDVKLPEDVSETTYQVTPLKVKDTLYVCTPHNWAIALDAATGQEKWKYDSNSGMNPDRQHQTCRGVTYWADPAAAPGSPCAERVYLPTSDARLIALDATNGEVCTSFADNGVLHLEQGMKHNPAGYYYSTSPPVAVGDRLIIGGAVNDNYSTTEQSGVIRAFNINTGALIWNWDSGNPDVTAPLPPGQTYTTNSPNSWSVFSYDEGLGLVYIPMGNQVPDQLGMGRSEHVEKYSSSIVALDINTGAVRWVRQTVHHDLWDMDVPAQPALLDITREDGTVVPALVGPTKQGDIYVLDRRSGEPIIPIEEVPAPGGAIPEDFTAPTQPVSGLTFMPPPLMERDMWGISMFDQLACRIEFRTLKYEGRYTPPSLEGTIVYPGNFGTFNWGSVAVDPERQVMFGMPTYLAFTSRLVPRDQIAPKGEGEKGSEQGLNRNEGAPYGVFMGPFLGPLGIPCQAPPWGYVAGADLRTGKIAYKHKNGTVYDMTPLPLPFKLGVPGIGGPMITKGGLAFLGAAVDDYFRAYDLTTGEQLWEARLPAGGQSTPMTYTVGEKQYVLIVAGGHGSVGTKPGDYVIAYTLP

SEQ ID NO: 54 - DNA, 2391 bp, Salmonella typhimurium LT2
  CDS (1)..(2391): transl_table=11
atggcagaaaataacgcacgatcgccacgattactcgtgacgctgacggccctctttgcagcactttgtgggctgtatcttcttatcggaggtgtctggctggttgctattggcggttcctggtactaccccatcgcgggcctcgtgatgctggttgtggccggattgctatggcgcagtaaacgtgccgcactgtggctgtatgccgccctgctgctggcgacaatgatttggggcgtgtgggaagtcgggttcgacttctgggcgctcacgccgcgtagcgatatcctggtgtttttcggcatctggctaatattaccgtttgtctggcatcggctggtggttccttccagtggcgcagtggcggcgctggtcgtggcgttgctgattagcggcggcattctgacctgggccggcttcaacgacccgcaggagatcaacggtacgcttcgcgccgacgccacgcccgccgcaacaagttcgtcgatcgccgacgaagactggccggcctatgggcgcaatcaggaaggccaacgctattcgccgctgaaacagatcactgcggataacgttcaccaactgaaagaagcgtgggtcttccgcaccggcgatctgaaacagcccaacgatccgggtgaaatcaccaacgaagtgaccccgataaaagtcggcgatacgctttatctgtgtacagctcaccagcgtctgttcgcgctggacgccgccagcggtaaagagaagtggcattttgatcctcagttgaagaccgattcgtctttccagcatgtgacctgccgcggcgtctcttatcatgaggccaaagcggataccgcctcgccggaggtcatcgccgactgtccgcgccgtattatcctcccggtcaacgacggtcgccttttcgcggtgaatgccgaaaccggcaagctgtgtgaaaccttcgccaacaaaggcgtcctgaatctgcaaaccaatatgccggataccacaccgggactgtatgaaccgacgtcgccgccgattatcaccgataaaacaattgtcattgccggttcggtcacggataacttctctacccgcgaaacgtccggcgttatccgaggttttgatgttaatagcggtaaactcatgtgggccttcgatccgggggcgaaagatccgaacgcgattccagccgatgagcacgcttttacctttaactcgccgaactcctgggcgcctgccgcctatgatgcgaaactggatctggtctatctgccgatgggcgtgaccacgccggatatctggggcggtaaccgcacgccggagcaggagcgttatgccagctccatcctggcgctgaatgccaccaccgggaaactggcctggagttatcagaccgtccatcacgatctgtgggatatggacctgccggcacagccgacgctggcggatattaccgttgacggtactaccgttccggttatctatgcgccagcgaaaaccggtaatatctttgtgctggacagacgtaatggcgagctggtcgtgcccgccccggaaaaaccggtcccgcagggcgcggcaaaaggcgattacgtcgccaaaactcagccgttctctgatttaaccttccgcccgaaaaaagatctctccggcgcggatatgtggggcgcgaccatgttcgaccaactggtgtgccgcgtcatgttccaccagttgcgctatgaaggtatcttcaccccgccgtccgagcaggggacattggtattccctggcaacctggggatgtttgaatggggcggtatttccgtcgatccagaccgtcaggtcgctatcgctaacccgatggcgctgccgtttgtctcgaagctgatcccacgcggcccgggtaatccaatggagccgccgaaagacgcgaaaggtaccggtacagaagcgggtattcagccacagtacggcgtaccattcggcgtcacgctgaatccgttcctttcgccgtttggcctgccgtgtaaacaaccggcctggggctatatttccgcgttggatctgaagaccaatgaaatcgtgtggaagaaacgtatagggacgccgcgcgacagtatgccgttcccgatgccggttccggtgccgttcaacatggggatgcccatgctgggcgggccaatctcaaccgccggtaatgtgctgttcattgccgcgaccgccgacaactacctgcgcgcttataacatgagcaacggggaaaaactgtggcagggacgtttacccgccggaggccaggcaacgcctatgacctatgaggtaaacggtaagcagtacgtggtcgtttctgccggaggccacggttcgtttggtacgaagatgggcgactatatcgtggcctatgctttgcctgacgacgcgaaataa

SEQ ID NO: 55 - protein, 796 aa, Salmonella typhimurium LT2
MAENNARSPRLLVTLTALFAALCGLYLLIGGVWLVAIGGSWYYPIAGLVMLVVAGLLWRSKRAALWLYAALLLATMIWGVWEVGFDFWALTPRSDILVFFGIWLILPFVWHRLVVPSSGAVAALVVALLISGGILTWAGFNDPQEINGTLRADATPAATSSSIADEDWPAYGRNQEGQRYSPLKQITADNVHQLKEAWVFRTGDLKQPNDPGEITNEVTPIKVGDTLYLCTAHQRLFALDAASGKEKWHFDPQLKTDSSFQHVTCRGVSYHEAKADTASPEVIADCPRRIILPVNDGRLFAVNAETGKLCETFANKGVLNLQTNMPDTTPGLYEPTSPPIITDKTIVIAGSVTDNFSTRETSGVIRGFDVNSGKLMWAFDPGAKDPNAIPADEHAFTFNSPNSWAPAAYDAKLDLVYLPMGVTTPDIWGGNRTPEQERYASSILALNATTGKLAWSYQTVHHDLWDMDLPAQPTLADITVDGTTVPVIYAPAKTGNIFVLDRRNGELVVPAPEKPVPQGAAKGDYVAKTQPFSDLTFRPKKDLSGADMWGATMFDQLVCRVMFHQLRYEGIFTPPSEQGTLVFPGNLGMFEWGGISVDPDRQVAIANPMALPFVSKLIPRGPGNPMEPPKDAKGTGTEAGIQPQYGVPFGVTLNPFLSPFGLPCKQPAWGYISALDLKTNEIVWKKRIGTPRDSMPFPMPVPVPFNMGMPMLGGPISTAGNVLFIAATADNYLRAYNMSNGEKLWQGRLPAGGQATPMTYEVNGKQYVVVSAGGHGSFGTKMGDYIVAYALPDDAK

SEQ ID NO: 56 - DNA, 2472 bp, Xanthomonas campestris pv. campestris str. ATCC 33913
  CDS (1)..(2472): transl_table=11
atgtcgacattgcttcgtccctcccgtcgcggccattgggccctggcgattctgggaggcgtgattgtgctgctggggctggtgctgctggcaggtggtgcgtggctcgccacgctgggcggatcctggtattacgcaccggcaggcctggcgatgctgatcgctggcgtgttgctgttccgcggccgcaatgccggcgcgtggtggtttgccgccgtcgtggccgccacgctgctgtggacgtggtgggaatcgggcagtgattactggcgctgggtgccgcggctcgggttgatcgtgggcctggcgtttgtgctggcgctgctgttgcccaagctcgagcgcccggtgtcgcgcgccgtctcgcgcagcgtggctggcggactggcagtggtgtttgtggtggcctttgcgttggccttcgtgccgttcggaatcaccgaggccgagggtgcattgacgcaggtggcaggcatcgccgcaggtgtggtcaatcgccccgccgatggcgcacagccggcacagcccgccaatgcgccggtcgatgacgactgggccgcatatggacgcagccaggctgggcagcgctattcgccactcacccaaatcaatcgcgacaatgtcagccagctgcagcaggcgtgggtgttccataccggcgatgtgccgaccaagcgctggggcgccgaaaccacaccgttgaaggtcggcgacagcctgtatctgtgtagcgcgcgcaatcaggtgatcgcgctggacgcctccaccggcaagcagcgctggcgctacgaccccaaggtcaaggacgaggccattccatacaccgcggcctgccgcggggtgtcgtattacgaagtgccgacggcggcgccggccgcaaatgacgcagccgcttcgcaggcggcgacggcgcctgcgctgtgccgtacgcgcgtgatcgaaggcacgctggatgggcgcctgattgcattggatgcgcgcaccgggacaccatgcgcggacttcggcactcacggtcaggtcgacatcaccgtcggcatgggcgagacgccaccgggctacatctcgatcaactcgccgccggccatcgtgcgcggcgtggtggtcatcgggcatcaggtccttgacgggcaaaagcgttatgagccctcgggcgtgatccagggctttgacgcggtcaccggccagttgcgctgggcctgggacatgacccatcccgaatggaatggtgcaccgccgcctggccagacctggacgcgcggcacccccaacatgtggaccaccgcagcggccgacgagcagctgggttacgtgtatctgccgatgggcaattccaccgcggactactggagcagctcgcgcacgccgccggaaaaccgctatgccacctcgctggtggcgttggatgtgaccaccggcaagccggtgtggaatttccagaccacgcatatcgacgcatgggattacgacctcggctcgcagcccagcctgatcgatttccccaaggatggcgtcaacgtgccggccgtgttgctgccgagcaagcagggcgagttgtacgtgctggaccgtcgcaccggcgagccgctggttggcgtggaagagcgcgccgtgcccggcggtggtgtggagccgcagatgcgctccaagacccagccgttctcgctgtatcacacgctgcgcaagccggatctgaccgagcgcgacatgtggggcatgaccccgatcgatcagctggtgtgccgtatccagttccgcaaggcgagctacaagggcatctacacgccgcccgaagccgaccggcattccatcgaataccccggctataacggcggctcggactggggcagcgtggcggtggatccgcaccgtggcgtgatcgtggccaactacaacgacatgcccaactacaacatcctggtgccgcgcgccaaggcggacaaactgggctgggctccgcgcgatcaggtgcgtggcgatgccggtggtgccgaaggcgccggcgacccgcaggccggcacgccctacgcggtaaacgtcaacgccggctggcgtttgccgttcaccaagctgctgtgcaagcagccaccctatggcggcattcgcgccatcgatctgaagagcggcaagaccctgtgggaccgtccctttggcagtgcgcgcggcaacgggccgttcgggattcgctccggcctgccgatcgaaatcggcacgccgaacaacggtggctcggtggtcactgcgggtggtctgatcttcattgccgccgcaaccgatgacctgatccgtgcgatcgacctggccaccggcaaggagctgtggcacgccaagctgccggccggtggccaggccaatccgatggtctacgcgtacggcggccgcgagtatctggtgatcatggcggccggtcaccacttcatggaaacaccggcaggcgatgccctggtggcctacgcgttgccgcagcggtaa

SEQ ID NO: 57 - protein, 823 aa, Xanthomonas campestris pv. campestris str. ATCC 33913
MSTLLRPSRRGHWALAILGGVIVLLGLVLLAGGAWLATLGGSWYYAPAGLAMLIAGVLLFRGRNAGAWWFAAVVAATLLWTWWESGSDYWRWVPRLGLIVGLAFVLALLLPKLERPVSRAVSRSVAGGLAVVFVVAFALAFVPFGITEAEGALTQVAGIAAGVVNRPADGAQPAQPANAPVDDDWAAYGRSQAGQRYSPLTQINRDNVSQLQQAWVFHTGDVPTKRWGAETTPLKVGDSLYLCSARNQVIALDASTGKQRWRYDPKVKDEAIPYTAACRGVSYYEVPTAAPAANDAAASQAATAPALCRTRVIEGTLDGRLIALDARTGTPCADFGTHGQVDITVGMGETPPGYISINSPPAIVRGVVVIGHQVLDGQKRYEPSGVIQGFDAVTGQLRWAWDMTHPEWNGAPPPGQTWTRGTPNMWTTAAADEQLGYVYLPMGNSTADYWSSSRTPPENRYATSLVALDVTTGKPVWNFQTTHIDAWDYDLGSQPSLIDFPKDGVNVPAVLLPSKQGELYVLDRRTGEPLVGVEERAVPGGGVEPQMRSKTQPFSLYHTLRKPDLTERDMWGMTPIDQLVCRIQFRKASYKGIYTPPEADRHSIEYPGYNGGSDWGSVAVDPHRGVIVANYNDMPNYNILVPRAKADKLGWAPRDQVRGDAGGAEGAGDPQAGTPYAVNVNAGWRLPFTKLLCKQPPYGGIRAIDLKSGKTLWDRPFGSARGNGPFGIRSGLPIEIGTPNNGGSVVTAGGLIFIAAATDDLIRAIDLATGKELWHAKLPAGGQANPMVYAYGGREYLVIMAAGHHFMETPAGDALVAYALPQR

SEQ ID NO: 58 - DNA, 2475 bp, Xanthomonas campestris pv. campestris str. ATCC 33913
  CDS (1)..(2475): transl_table=11
atgactgatcaatcctctaaacgcgggctcggcacttggctgttggtagcctatgccgtggtgctcgccgtgcttggtgcggcgctcgcctatgaaggcgggcgcctggtggccgttggcggctcctggtattacgtgctggccggtatcgccgtgctggtggccggtgtgctgctggcactgggcaaacgcgctggcctgtggctgtttggcgctacgttggcggccaccatcgtgtgggcgctgtgggaagtgggcctggatggctggggcctgatcccacgtctggcctggatctcggtgctcggcctggtgctgttgccgttctggggcgtggcgcggcggcgcatgcagccgttgtccgggctcggctatgtcgtggtcaccggcgtgctgccggtgctgggtgcggcgctgatcctgtggccgctgctggtgccgcgcaatgtggaactggccgatgcatccaagcagccggccgatgcggcaacgccgttcagccgtggcagcgtgcccagcccggacgggaacgtggcggccaaccacgatgccagtaactggaccgcctacgccggttccaacctgtccaaccattacacccccggcgcgcagatcacgccggagaacgtcaagggcctcaaggtggcctgggaattccataccggcgatctcaagccgaaggattccaagctgggctatgcgttccagaacaccccgctcaaggtcggcgacctgctctacatctgcaccccgacccagaaggtgattgcggtggaggcggccaacggcaaggagcgctggcgcttcgacccgcagaccaatccgaaggcgatggccggcgtggccgccaccacatgccgcggcgtgtcgtactaccaggcgccggaaggcactgccgagtgcccgacgcggatcttctggccgatggtcgatggccgcctgggtgcgctggatgcgcagaccggcaagctctgcgccagcttcggtaacaacggctatgtggacctcaatgccggcaccggcaacaccaagccgggcttcgtcggcccgacctcgccgccggtggtcatgcgcggtgtggtgatccagcccaccgggcaggtgcgcgacggtcaggaacgcgatgcgccgtccggcgtggtgcgcggcttcgacgcgctcaccggccagctgcgctgggcctgggatctgggcaacccggccatcaccgccgaaccgccggccggccagacctatacccgctccaccccgaacgtgtggtcgctgatggccgccgatgacgagctggggctggtgtatctgcccaccggcaacgctgccggcgacttcttcggcaagggccgcaccccgcaggaagaggaatacaccgcctcgctggtggccgtggatgcggcaaccggcaaggagcgctggcacttccgtaccgtcaatcacgatctgtgggactacgacatcggcccgcagccgaacctggttgattggccggttgccggcggtggcacccgccccgccgtgatccaggccaccaagtccggccaggtgttcgtgctcgaccgcgccaccggccagccgatcatgcctgtcaagcagatcgccgtgccgcagggcaccgaccatggcgactggaccgcatccacccagccggtgtcgccgggcatgcccaacaccgtgggtgcgcccagccgtgactacgagaccatcgttgaatctgacgcgtggggcatgaccccgttcgaccagctcgcttgccgcatcgagttcaagaagctgcggtacgaaggcatgttcaccccgccaagcctgcagggctcgctgtcgttcaccggcaaccatggcggcatcaactggggcggcgtgtcggtcgatctgcagcgcggcatcatggtgatgaacagcaatcgcctgccctataccgagcacgtctacccgcgcacggtgatgaacgagctgggcgtggtgtcggtgttcaacggcagcagcaagaccaagggctacatggcgcaggaaggcctggcctatggcgcgcgcaaggagccgtggatgtcgccgctcaacacgccgtgcgtggcaccgccgtggggctatatctccggcgtggatctgcgcacgcagcaggtgatctggcgccgtccgctgggcaccggttacgaccagggcccaatgggcatcccgtccaagaccaagttcgagatcggcaccccgaacaacagcggctcgctggccactgccggcggcgtcaccttcatcggtgccagcctggacaacttcatccgcggctttgacacccgcaccggcaagcaggtctgggagacccgcgtgcctgcgggcccgcaggccgcgccgctgagctacaccatcgatggcaagcagtacatcgttgccgcggtgggtggccatgaccgcatggaaaccaagtccggcgacagcgtcattgcctgggcactgcccgacgacgcggccgccagcgccaaataa

SEQ ID NO: 59 - protein, 824 aa, Xanthomonas campestris pv. campestris str. ATCC 33913
MTDQSSKRGLGTWLLVAYAVVLAVLGAALAYEGGRLVAVGGSWYYVLAGIAVLVAGVLLALGKRAGLWLFGATLAATIVWALWEVGLDGWGLIPRLAWISVLGLVLLPFWGVARRRMQPLSGLGYVVVTGVLPVLGAALILWPLLVPRNVELADASKQPADAATPFSRGSVPSPDGNVAANHDASNWTAYAGSNLSNHYTPGAQITPENVKGLKVAWEFHTGDLKPKDSKLGYAFQNTPLKVGDLLYICTPTQKVIAVEAANGKERWRFDPQTNPKAMAGVAATTCRGVSYYQAPEGTAECPTRIFWPMVDGRLGALDAQTGKLCASFGNNGYVDLNAGTGNTKPGFVGPTSPPVVMRGVVIQPTGQVRDGQERDAPSGVVRGFDALTGQLRWAWDLGNPAITAEPPAGQTYTRSTPNVWSLMAADDELGLVYLPTGNAAGDFFGKGRTPQEEEYTASLVAVDAATGKERWHFRTVNHDLWDYDIGPQPNLVDWPVAGGGTRPAVIQATKSGQVFVLDRATGQPIMPVKQIAVPQGTDHGDWTASTQPVSPGMPNTVGAPSRDYETIVESDAWGMTPFDQLACRIEFKKLRYEGMFTPPSLQGSLSFTGNHGGINWGGVSVDLQRGIMVMNSNRLPYTEHVYPRTVMNELGVVSVFNGSSKTKGYMAQEGLAYGARKEPWMSPLNTPCVAPPWGYISGVDLRTQQVIWRRPLGTGYDQGPMGIPSKTKFEIGTPNNSGSLATAGGVTFIGASLDNFIRGFDTRTGKQVWETRVPAGPQAAPLSYTIDGKQYIVAAVGGHDRMETKSGDSVIAWALPDDAAASAK

SEQ ID NO: 60 - DNA, 2478 bp, Xanthomonas axonopodis pv. citri str. 306
  CDS (1)..(2478): transl_table=11
atgactgatcaatcctcaaaacgtgggctaggcacctggttgctggtggcctatgccgtggtgatcgccgtgcttggcgcggtgctcgcctaccagggcggccgcctggtggccgtgggcggctcctggtattacctgatcgcgggtattgccctgttcctggcgggcgtcctgctcgcgctgggcaagcgcgccgggctgtggctgtttggcgccacgctggccggtaccatcgcctgggcgctgtgggaagtgggcctggatggctggggcttggtgccgcgcctggccatgatgtcggtgctggggctggtgctgctgccgttctggggggtggcgcgtcgtcgcatgcagccgttgtccggcctgagctatgcgctggtgaccggcgtgctgccaatcctgggcgccgcgctgatcctgtggccgctgctgatgccgcgcaatgtcgagctggccgatgcctccaagttgccggccgacagcgccacggccttcagccgcggcaccgtgcccagccccgacggcaacgtcgcggccaatcatgacgccagcaactggacctcctatgcgggttccaacctgtccaaccactacacgcccggcgcgcagatcacgccggacaacgtgaagaatctcaaggtggcctgggaattccacaccggcgacctcaagcccaaggactccaagctgggctacgccttccagaacaccccgctcaaggtcggcgacctgctctacatctgtacccccacccagaaagtgatcgcggtggaagcggccaacggcaaggagcgctggcgcttcgatccgcagaccaacccaaaggcgatggcgggcgtggctgccaccacctgccgtggcgtgtcgtactaccaggcgcccgaaggcaccgccgagtgcccgacccggatcttctggccgatggtcgatggccgcctcggcgcgctggatgcgcagaccggcaagctgtgcaccagcttcggcaacaacggctatgtcgatctgaatgcgggcaccggcaacaccaagccgggcttcgtcggccccacctcgccgccggtggtgatgcgtggtgtggtgatccagccgaccggccaggtccgcgatggtcaggaaggcgatgcgccgtccggcgtggtgcgtggcttcgatgcgctcaccggccagctgcgctgggcctgggacctgggcaacccggcgatcaccgccgagccgccggccggccagacctacacgcgctcaaccccgaacgtatggtcgctgatggccgccgacgacgagctgggcctggtctatctgcccaccggcaatgcatccggcgacttcttcggcaagggccgcaccccgcaggacgaggaatacaccgcctcgctggttgcggtggatgccgccaccggcaaggaacgctggcacttccgtaccgtcaaccacgacctgtgggactacgacatcggcccgcagccgaacctggtcgattggccggtcgctggcggcggcacgcgtactgcggtgatccaggccaccaagtccggccaggtgttcgtgctggaccgcgccaccggcgagccgatcatgccggtcaagcagattccggtaccgcagggaaccgaccacggcgactggaccgccgccacgcaaccgatctcgccgggcatgcccaacaccgtgggcgcgccgagccgtgagttcgaaaaaatcatcgaatccgatgcctggggcatgactccgttcgaccagttggtctgccgtatccagttcaagcagctgcgctacgaaggcatgttcaccccgcccaccctgcaggggtcgctggccttcaccggcaaccacggcggcatcaactggggcggcgtttcggtggacctgcagcgcggcatcatggtgatgaacagcaatcgcctgccctacaccttgcaggtgtatacccgccagaagatggacgagctgggcgtggtgtcggtgttcgacggcaagagcaagacccccggctacatggcgcagaagggcctggcctacggcgcccgcaaggagccgtggatgtcgccgctcaacaccccgtgcgtggcaccgccgtggggctacatcgccggtgtggacctgcgcacgcagcaggtgatctggcgtcgtccgctgggcaccggttacgaccagggtccgatggccatcccgtccaagaccaagttcgagatcggcacgcccaacaacagcggctcgctggccaccgctggcggggtgaccttcatcggcgcgaccctggacgacttcatgcgcggcttcgacacccttaccggcaagcaggtctgggaaacccgcgtccccgccgggccgcaggcagcgccgatgagctacaccatcaacggcaagcaatacatcgtggccgccgtcggtggacacgaccgcatggaaaccaagtcgggcgacagcgtcattgcctgggccctgcccgacgatgcgcaggccgcgcctgccaagtaa

SEQ ID NO: 61 - protein, 825 aa, Xanthomonas axonopodis pv. citri str. 306
MTDQSSKRGLGTWLLVAYAVVIAVLGAVLAYQGGRLVAVGGSWYYLIAGIALFLAGVLLALGKRAGLWLFGATLAGTIAWALWEVGLDGWGLVPRLAMMSVLGLVLLPFWGVARRRMQPLSGLSYALVTGVLPILGAALILWPLLMPRNVELADASKLPADSATAFSRGTVPSPDGNVAANHDASNWTSYAGSNLSNHYTPGAQITPDNVKNLKVAWEFHTGDLKPKDSKLGYAFQNTPLKVGDLLYICTPTQKVIAVEAANGKERWRFDPQTNPKAMAGVAATTCRGVSYYQAPEGTAECPTRIFWPMVDGRLGALDAQTGKLCTSFGNNGYVDLNAGTGNTKPGFVGPTSPPVVMRGVVIQPTGQVRDGQEGDAPSGVVRGFDALTGQLRWAWDLGNPAITAEPPAGQTYTRSTPNVWSLMAADDELGLVYLPTGNASGDFFGKGRTPQDEEYTASLVAVDAATGKERWHFRTVNHDLWDYDIGPQPNLVDWPVAGGGTRTAVIQATKSGQVFVLDRATGEPIMPVKQIPVPQGTDHGDWTAATQPISPGMPNTVGAPSREFEKIIESDAWGMTPFDQLVCRIQFKQLRYEGMFTPPTLQGSLAFTGNHGGINWGGVSVDLQRGIMVMNSNRLPYTLQVYTRQKMDELGVVSVFDGKSKTPGYMAQKGLAYGARKEPWMSPLNTPCVAPPWGYIAGVDLRTQQVIWRRPLGTGYDQGPMAIPSKTKFEIGTPNNSGSLATAGGVTFIGATLDDFMRGFDTLTGKQVWETRVPAGPQAAPMSYTINGKQYIVAAVGGHDRMETKSGDSVIAWALPDDAQAAPAK

SEQ ID NO: 62 - DNA, 2331 bp, Shigella flexneri 2a str. 301
  CDS (1)..(2331): transl_table=11
ttgcagcgctggctgtatctactcattggcggaggctggctggtcgcgattggcggctcctggtactaccctatcgctggccttgtgatgctcggcgtcgcctggatgctgtggcgcagtaaacgcgccgcgctttggctatacgcagccctgctgctcggcaccatgatttggggcgtctgggaagttggtttcgacttctgggcgctgactccgcgcagcgatattctggtcttcttcggcatctggctgatcctgccgtttgtctggcgtcgcctggtcattcctgccagcggcgcagttgccgcactggtggtcgcactgctgattagcggtggtatcctgacctgggccggatttaacgatccgcaggagatcaacggcaccttaagcgccgatgccacacctgccgaagctatctcccccgttgccgatcaggactggcctgcgtatggccgcaatcaggaaggtcaacgcttttcaccactgaagcaaattcacgccgataacgtccacaagctgaaagaagcctgggtgttccgtactggcgatgtgaagcagccgaacgatccgggtgaaatcaccaatgaagtgacgccgattaaagtgggcgataccctttacctgtgtaccgctcaccagcgcctgtttgcgcttgatgccgccagcggcaaagagaaatggcattacgatcctgagctgaaaaccaacgagtctttccagcacgtaacctgccgtggcgtctcttatcatgaagccaaagcagaaacggcttcgccggaagtgatggcggattgcccgcgtcgtatcattcttccagtgaatgatggtcgcctgattgcgattaacgctgaaaacggcaaactgtgcgaaaccttcgccaataaaggcgtgctcaatctgcaaagcaatatgccagacaccaaaccgggtctgtatgagccgacttctccgccaattatcaccgataaaaccatcgtgatggccggttcagtcaccgataacttctcaacccgcgaaacgtctggcgtgatccgtggttttgatgtcaacaccggggagctgctgtgggcttttgatccgggcgcgaaagatccgaacgcaatcccgtcagacgaacacacctttacctttaactcaccaaactcgtgggcaccagcggcctatgacgcgaagctggatctggtctatctgccgatgggcgtgaccacgccggatatctggggcggtaaccgcacaccggaacaggaacgttatgccagctcgattctggcgctgaatgccactaccgggaaactggcgtggagctaccagaccgttcaccacgacctgtgggacatggatcttccggcacagccgacgctggcggacatcaccgttaatggtcagaaagtgccgattatttacgctccggcgaaaaccggtaacatttttgtgctcgatcgtcgtaatggcgaactggtggttccggccccggaaaaaccggttccccaaggtgctgccaaaggcgattacgttacccctactcaaccattctcggaactgagcttccgtccgacgaaagatttgagcggtgcggatatgtggggagccaccatgtttgaccaactggtgtgccgcgtaatgttccaccagatgcgctatgaaggcattttcacgccgccatctgaacagggtacgctggtcttcccgggtaacctggggatgttcgaatggggcgggatttccgttgatccaaatcgtgaagtggcaattgccaacccaatggcactgccgtttgtttcgaaactgctcccgcgtggtcctggcaacccgatggagcagccgaaagatgccaaaggcacgggtacggaatccggcattcagccacagtacggtgtaccgtatggtgtcacgctcaacccgttcctctcaccatttggtctgccatgtaaacagccagcatggggttatatctcggcgctggatctgaaaactaatgaagtggtgtggaagaaacgtattggtacgccgcaggacagtatgccgttcccgatgccggttccggtgccgttcaatatgggtatgccgatgctgggcgggccaatctccacggcgggtaacgtgctgtttatcgccgctacggcagataactacctgcgcgcttacaacatgagcaacggtgaaaaactgtggcagggtcgtttaccggcgggtggtcaggcaacaccgatgacctatgaagtgaatggcaagcagtacgtggtgatctccgcaggcggtcacggttcatttggtacgaagatgggcgactatattgtggcttatgccctgccggatgatgtgaaataa

SEQ ID NO: 63 - protein, 776 aa, Shigella flexneri 2a str. 301
MQRWLYLLIGGGWLVAIGGSWYYPIAGLVMLGVAWMLWRSKRAALWLYAALLLGTMIWGVWEVGFDFWALTPRSDILVFFGIWLILPFVWRRLVIPASGAVAALVVALLISGGILTWAGFNDPQEINGTLSADATPAEAISPVADQDWPAYGRNQEGQRFSPLKQIHADNVHKLKEAWVFRTGDVKQPNDPGEITNEVTPIKVGDTLYLCTAHQRLFALDAASGKEKWHYDPELKTNESFQHVTCRGVSYHEAKAETASPEVMADCPRRIILPVNDGRLIAINAENGKLCETFANKGVLNLQSNMPDTKPGLYEPTSPPIITDKTIVMAGSVTDNFSTRETSGVIRGFDVNTGELLWAFDPGAKDPNAIPSDEHTFTFNSPNSWAPAAYDAKLDLVYLPMGVTTPDIWGGNRTPEQERYASSILALNATTGKLAWSYQTVHHDLWDMDLPAQPTLADITVNGQKVPIIYAPAKTGNIFVLDRRNGELVVPAPEKPVPQGAAKGDYVTPTQPFSELSFRPTKDLSGADMWGATMFDQLVCRVMFHQMRYEGIFTPPSEQGTLVFPGNLGMFEWGGISVDPNREVAIANPMALPFVSKLLPRGPGNPMEQPKDAKGTGTESGIQPQYGVPYGVTLNPFLSPFGLPCKQPAWGYISALDLKTNEVVWKKRIGTPQDSMPFPMPVPVPFNMGMPMLGGPISTAGNVLFIAATADNYLRAYNMSNGEKLWQGRLPAGGQATPMTYEVNGKQYVVISAGGHGSFGTKMGDYIVAYALPDDVK

SEQ ID NO: 64 - DNA, 2412 bp, Pseudomonas putida KT2440
  CDS (1)..(2412): transl_table=11
atgagcactgaaggtgcgaaccaaggaagccgctggctaccgcgcctgattggcgcgctgctgttgctgatgggcctggccctgctggccggcggtatcaagctgagccagctgggcggatcgctgtactacctgatcgccggtattggctttgccctttcgggcgtcctgctgctggcccaacgccagatcgccctgggcctgtatggcctggtgctgctgggcagcaccgtgtgggccctgttcgaagtaggcctggactggtggcaactggtgccacggctggctatctggttcgccatcggcgtggtgttgctgctgccgtgggcacgtcgcccgctgatcggcccagccagcaaagccaacactgcactgctcggcgtggcagtggtcgcttcgggcgcttgcgcgctggccagccagttcacccatcccggtgaagtgttcggcgaactgggccgcgacagcagcgaaatggccagcgccgccccggccatgcccgacggcgaatggcaggcctacggccgtaccgagcatggcgaccgctactcgccgctgcgccagatcaccccgcagaacgcctaccgtctggaagaagcctggcgcattcgcaccggtgatctgccaaccgaaaacgacccggtggagctgaccaaccagaacaccccgctgaaggtcaacggcatgctttacgcctgcaccgcgcacagtcgcctgctggcgctggacccggacactggcgcagaaatctggcgctacgacccgcaggtcaagagcccgaccggcaccttcaagggctttgcccacatgacctgccgtggcgtctcgtactatgacgaaaaccgctacgtcagccgcgacggcagcccggcgccgaaaattaccgatgcaggccaggccgtggcccaagcctgcccgcgtcgcctctatctgcctaccgcggatgcccgcctgatcgccatcaacgccgacaacggcaaggtctgcgaaggcttcgccaaccagggcgtgatcgacctcaccaccggcattggcccattcaccgccggcggctattactccacctcgcctgctgcgattacccgtgacctggtgatcatcggtggccacgtcaccgacaacgagtcgaccaatgagccgtccggggtgatccgcgcctacgacgtgcacgacggccacctggtgtggaactgggacagtaacaacccggacgacaccaagccattggctgccggcaaaatgtacagccgcaactcggccaacatgtggtcgatcgccagcgtcgacgaagaccttggcatgatctacctgccgctgggcaaccagaccccggaccagtggggcgccgaccgcaccccgggcgccgagaagtacagcgccggcgtggtcgcccttgacctggccaccggcaaggcacgctggaactatcagttcacccaccacgacctgtgggacatggacgtcggcagccagccgaccctggtacacctgaaaaccgacgatggtgtgaaaccggcgatcatcgtaccgaccaagcaaggcagcctgtacgtgctcgaccgccgcgacggtacgccaatcgtgccgatccgcgagatccccaccccacaaggcgcagtggaaggcgaccacacctcgcccacccaggcccgctccgacctcaacctgctcggcccagagctgaccgaacaggccatgtggggcgccacgcctttcgaccagatgctgtgccgcatccagttccgcgaactgcgctacgaaggccagtacaccccgccatccgaacaaggttcgttggtctaccccggcaacgtcggtgtattcaactggggcagcgtgtcggtcgacccggtgcgccagctgctgttcacttcgcccaactacatggcgttcgtgtcgaagatggtcccgcgtgagcaggttgccgaaggcagcaagcgcgaaagcgagaccagcggcgtgcagccgaacaccggcgcaccgtatgcagtgatcatgcacccgttcatgtcgccgctcggtgtaccgtgccaggcacccgcctggggctacgtcgccgccatcgacctgttcaccaacaaggtggtgtggaaacacaagaacggcaccacccgcgacagcaccccgctaccgatcggcctgccggttggcgtgccgagcatgggtggctcgatcgtcaccgccggtggcgtcggcttcctcagcggcacgctcgaccagtacctgcgcgcctatgacgtgaacaacggcaaggagttgtggaaagcacgcctgccagcgggtggccaggctacgccgatgagctacaccggcaaggacggcaagcagtacgtgctggtgactgccggcggccatggctcgctgggcaccaagatgggcgattacatcattgcttacaaattagccgagtaa

SEQ ID NO: 65 - protein, 803 aa, Pseudomonas putida KT2440
MSTEGANQGSRWLPRLIGALLLLMGLALLAGGIKLSQLGGSLYYLIAGIGFALSGVLLLAQRQIALGLYGLVLLGSTVWALFEVGLDWWQLVPRLAIWFAIGVVLLLPWARRPLIGPASKANTALLGVAVVASGACALASQFTHPGEVFGELGRDSSEMASAAPAMPDGEWQAYGRTEHGDRYSPLRQITPQNAYRLEEAWRIRTGDLPTENDPVELTNQNTPLKVNGMLYACTAHSRLLALDPDTGAEIWRYDPQVKSPTGTFKGFAHMTCRGVSYYDENRYVSRDGSPAPKITDAGQAVAQACPRRLYLPTADARLIAINADNGKVCEGFANQGVIDLTTGIGPFTAGGYYSTSPAAITRDLVIIGGHVTDNESTNEPSGVIRAYDVHDGHLVWNWDSNNPDDTKPLAAGKMYSRNSANMWSIASVDEDLGMIYLPLGNQTPDQWGADRTPGAEKYSAGVVALDLATGKARWNYQFTHHDLWDMDVGSQPTLVHLKTDDGVKPAIIVPTKQGSLYVLDRRDGTPIVPIREIPTPQGAVEGDHTSPTQARSDLNLLGPELTEQAMWGATPFDQMLCRIQFRELRYEGQYTPPSEQGSLVYPGNVGVFNWGSVSVDPVRQLLFTSPNYMAFVSKMVPREQVAEGSKRESETSGVQPNTGAPYAVIMHPFMSPLGVPCQAPAWGYVAAIDLFTNKVVWKHKNGTTRDSTPLPIGLPVGVPSMGGSIVTAGGVGFLSGTLDQYLRAYDVNNGKELWKARLPAGGQATPMSYTGKDGKQYVLVTAGGHGSLGTKMGDYIIAYKLAE

SEQ ID NO: 66 - DNA, 2418 bp, Pseudomonas putida KT2440
  CDS (1)..(2418): transl_table=11
atgaaagaaacaccgcgcgcctctggcgccacaaacttcatcctggtcggcctgggcgtgatcatcgccctgctcggcctcctcctcgctgccggcggcgtcaagctcgccggtctgggcggttcctggtacttcctgatcggcggcttggccatggccatcgccggtgtcctcattgctcgccgcaagaaggcgggcgcctggctgtatgccgtgttcctggtcggtactgccatctgggcactgatcgatgcgggcctggtgttctggccgctgttctcgcgcctgttcatgttcggcgcaatcggcatggtcgtggcgctggtctacccgctgctggcgcgtgccaacggcgccagcgccggccgcggtgcctacggcgtcgccggggtaatggccgtggtactggtggtcgcggtcggcaacatgttcgttgctcacccaagcgtcgcgcccaccggcaaaggcccgggcatgaccccggtcgaaaccggcaaggaacagaaagactgggcccactacggcaacaccgaaggtggcagccgcttcgccgcgcttgaccagatcaaccgggacaacgtcaacaagctgaaagtggcctggacctaccaaaccggcgacgttgcaatcagtgacggcaacggtgccgaagaccagctcaccccgctgcagatcggcagcaaggtgttcatctgcaccccgcacaacaacctgatcgcactcgatgccgacaccggcaaagagttgtggaagaacgaaatcaacgcccagtccaaggtctggcagcgttgccgtggcatggcctacttcgacgccactgccgccatcgcccagccaacccagccgaacagctcgccgatcaccggcgttagcgtagcggccggtgccaactgccagcgtcgcctgctgaccaacaccatcgacggccgcctgattgccgtcgacgccgacaccggcgagttctgccagggcttcggcaacaacggccaggtcgacctcaaggcaggcctgggtgatgtcccggactcctactaccagctgtcctcggcaccgctgatggccggcactaccgtagtggtcggcggccgtgttgccgacaacgtccagaccgacatgccaggcggcgtgatccgtggttttgacgtgatcaccggtgaaatgcgctgggccttcgacccgggcaacccggaagaccgccaggctccgcagggcgacaagacctacgtgcgcagcaccccgaacagctgggcaccgatgtcctacgacccggcaatgaacaccgtgttcctgccgatgggctcgtcctccaccgacatctacggcgttgagcgcagcaaactggaccacacttacggcgcttcggtgctggctttggacgccaccaccggcaaccagaaatgggtgttccagaccgtgcacaacgacctctgggacttcgacctgcccatgcagccaagcctgatcgacttcaccaaggacgacggccagtcggtgcctgcggtggtgatcggcaccaaggccgggcagatctacgtgctcgaccgcgccactggcaagccgctgacccaggtcgacgaagtaccggtcaagccaagcaacatcccgaacgagccgtactccccaacccagcccaagtcggtgggcatgccacagatcggcgcgcagaccctgaccgaatcggacatgtggggcgccaccccgtatgaccagctgctatgccgcatcgacttcaagaagatgcgctacgacggcctgtacaccgcgccgggtaccgacctgtcgctgagcttcccgggttcgctgggtggcatgaactggggcagcatttctaccgacccggtacatggcttcatcttcgtcaacgacatgcgtctgggcctgtggatccagatgatcccgtcgcagaacaaaggtggcgcggcttccggtggcgaagcactgaacactggcatgggcgcggtaccgctcaagggcaccccgtatgccgtgaacaagaaccgcttcctgtcggtcgccggcattccatgccaggcaccgccgtttggcaccctgaccgccatcgacatgaagacccgccaggtggcctggcaggtgccggtaggcaccgttgaagacaccggcccgctcggcatccgcatgcacctgccgatcaagatcggcctgccaacccttggcggcaccctgtcgacccaaggcggcctggtgttcatcgcaggtacccaggacttctacctgcgcgcctacgacagcagcaacggtaacgaaatctggaaggctcgcctgcccgtgggcagccagggcggcccgatgacctacgtctcgccgaagaccggcaagcagtacgtggtgatcactgctggcggcgcccgccagtcgactgaccgtggcgactatgtgatttcttacgctctgccgtaa

SEQ ID NO: 67 - protein, 805 aa, Pseudomonas putida KT2440
MKETPRASGATNFILVGLGVIIALLGLLLAAGGVKLAGLGGSWYFLIGGLAMAIAGVLIARRKKAGAWLYAVFLVGTAIWALIDAGLVFWPLFSRLFMFGAIGMVVALVYPLLARANGASAGRGAYGVAGVMAVVLVVAVGNMFVAHPSVAPTGKGPGMTPVETGKEQKDWAHYGNTEGGSRFAALDQINRDNVNKLKVAWTYQTGDVAISDGNGAEDQLTPLQIGSKVFICTPHNNLIALDADTGKELWKNEINAQSKVWQRCRGMAYFDATAAIAQPTQPNSSPITGVSVAAGANCQRRLLTNTIDGRLIAVDADTGEFCQGFGNNGQVDLKAGLGDVPDSYYQLSSAPLMAGTTVVVGGRVADNVQTDMPGGVIRGFDVITGEMRWAFDPGNPEDRQAPQGDKTYVRSTPNSWAPMSYDPAMNTVFLPMGSSSTDIYGVERSKLDHTYGASVLALDATTGNQKWVFQTVHNDLWDFDLPMQPSLIDFTKDDGQSVPAVVIGTKAGQIYVLDRATGKPLTQVDEVPVKPSNIPNEPYSPTQPKSVGMPQIGAQTLTESDMWGATPYDQLLCRIDFKKMRYDGLYTAPGTDLSLSFPGSLGGMNWGSISTDPVHGFIFVNDMRLGLWIQMIPSQNKGGAASGGEALNTGMGAVPLKGTPYAVNKNRFLSVAGIPCQAPPFGTLTAIDMKTRQVAWQVPVGTVEDTGPLGIRMHLPIKIGLPTLGGTLSTQGGLVFIAGTQDFYLRAYDSSNGNEIWKARLPVGSQGGPMTYVSPKTGKQYVVITAGGARQSTDRGDYVISYALP

SEQ ID NO: 68 - DNA, 2409 bp, Escherichia coli CFT073
  CDS (1)..(2409): transl_table=11
ttgaaatggtgtctctttatggcaattaacaataccggctcgcggcgattactcgtcacgctaacagccctttttgcagcgctttgcgggctgtatctactcattggcggaggctggctggtcgcgattggcggctcctggtactaccctatcgctggccttgtgatgctcggcgtcgcctggatgctgtggcgcagtaaacgcgccgcgctttggctgtacgcagccctgctgctcggcactatgatttggggcgtctgggaagttggtttcgacttctgggcgctgactccgcgcagcgacattctggtcttcttcggcatctggctgatcctgccgtttgtctggcgtcgcctggtcattcctgccagcggcgcagttgccgcactggtggtcgcactgctgattagcggtggtatcctgacctgggccggatttaacgatccgcaggaaatcagcggcaccttaagcgccgataccacgccagcagaagccatctcccccgttgccgatcaggactggcctgcctatggtcgcaatcaggaaggtcaacgcttttcaccactgaagcaaattaacgctgataacgtccacaagctgaaagaagcctgggtgttccgtactggcgatgtgaagcagccgaacgatccgggcgaaatcaccaatgaagtgacgccaattaaagtgggcgacaccctttacctgtgtaccgcgcatcaacgtctgtttgcgctggatgccgccagcggtaaagagaaatggcattacgatcctgagctgaaaaccaacgagtccttccagcatgtaacctgccgtggcgtctcttatcatgaagccaaagcagaaactgcttcgccggaagtgatggcggattgcccgcgtcgtatcattcttccggtcaatgatggtcgtctgattgcaattaacgctgaaaacggcaagctgtgcgaaaccttcgccaataaaggcgtgctcaatctgcaaagcaatatgccggacaccaaaccgggtctgtatgaaccgacttcgccgccgattatcaccgataaaaccatcgtgatggccggttcagtcaccgacaacttctcaacccgcgaaacgtctggcgtgatccgtggttttgatgtcaacaccggggagctgctgtgggcttttgatccgggcgcgaaagatccgaatgcgatcccgtctgacgaacacacctttacctttaactcaccaaactcgtgggcaccagcggcctatgacgcgaagctggatctggtctatctgccgatgggcgtcaccacgccagatatctggggtggtaaccgcacaccggaacaggaacgttatgccagctcgattctggcgctgaatgccactaccgggaaactggcgtggagctatcagaccgttcaccacgacctgtgggatatggatcttccggcacagccgacgctggcggacatcaccgttaatggtcagaaagtgccggttatttacgctccggcgaaaaccggcaacatttttgtgctcgatcgtcgtaatggtgaactggtggttcctgccccggaaaaaccggttccccaaggtgctgctaaaggcgattacgtgacccctactcaacccttctcggaactgagcttccgtccgacgaaagatttgagcggtgcggatatgtggggagccaccatgtttgaccagttggtgtgccgcgtgatgttccaccagatgcgctatgaaggcattttcacgccgccatctgaacagggtacgctggtcttcccgggtaacctggggatgttcgaatggggcgggatttccgttgatccgaatcgtgaagtggcgattgccaacccaatggcactgccgtttgtttcgaaactgatcccacgcggtcctggtaacccgatggaacagccgaaagatgccaaaggcacgggtacggaatccggcatccagccgcagtacggtgtaccgtatggcgtcacgctcaacccgttcctctcaccgtttggtctgccatgtaaacagccagcatggggctatatctcggcattggatctgaaaaccaatgaagtggtgtggaagaaacgtattggtacgccgcaggacagtatgccattcccgatgcctgtaccggtgccgttcaatatgggtatgccgatgcttggcgggccaatctccacggcgggtaacgtgctgtttatcgccgctacggcagataactacctgcgcgcttacaacatgagcaacggtgaaaaactgtggcagggtcgtttaccagcgggtggtcaggctacgccaatgacctatgaagtgaatggcaagcagtatgtggtgatctccgcaggcggtcacggttcatttggtacgaagatgggcgactatattgtggcttatgcgctgccggatgatgtgaagtaa

SEQ ID NO: 69 - protein, 802 aa, Escherichia coli CFT073
MKWCLFMAINNTGSRRLLVTLTALFAALCGLYLLIGGGWLVAIGGSWYYPIAGLVMLGVAWMLWRSKRAALWLYAALLLGTMIWGVWEVGFDFWALTPRSDILVFFGIWLILPFVWRRLVIPASGAVAALVVALLISGGILTWAGFNDPQEISGTLSADTTPAEAISPVADQDWPAYGRNQEGQRFSPLKQINADNVHKLKEAWVFRTGDVKQPNDPGEITNEVTPIKVGDTLYLCTAHQRLFALDAASGKEKWHYDPELKTNESFQHVTCRGVSYHEAKAETASPEVMADCPRRIILPVNDGRLIAINAENGKLCETFANKGVLNLQSNMPDTKPGLYEPTSPPIITDKTIVMAGSVTDNFSTRETSGVIRGFDVNTGELLWAFDPGAKDPNAIPSDEHTFTFNSPNSWAPAAYDAKLDLVYLPMGVTTPDIWGGNRTPEQERYASSILALNATTGKLAWSYQTVHHDLWDMDLPAQPTLADITVNGQKVPVIYAPAKTGNIFVLDRRNGELVVPAPEKPVPQGAAKGDYVTPTQPFSELSFRPTKDLSGADMWGATMFDQLVCRVMFHQMRYEGIFTPPSEQGTLVFPGNLGMFEWGGISVDPNREVAIANPMALPFVSKLIPRGPGNPMEQPKDAKGTGTESGIQPQYGVPYGVTLNPFLSPFGLPCKQPAWGYISALDLKTNEVVWKKRIGTPQDSMPFPMPVPVPFNMGMPMLGGPISTAGNVLFIAATADNYLRAYNMSNGEKLWQGRLPAGGQATPMTYEVNGKQYVVISAGGHGSFGTKMGDYIVAYALPDDVK

SEQ ID NO: 70 - DNA, 2367 bp, Pseudomonas syringae pv. tomato str. DC3000
  CDS (1)..(2367): transl_table=11
atgacaaacaagcaagacacaggagctggcagcaggttgctgttgctcgggttgggcgtgctgatcgctctgatcgggctcggtctggcaggtggcggcggctacctggtgacattgggcgggagttggttcttcctgctgatggggctggcgatgctggtcagcggtgcgctgatcgcagcccgcaaacccaagggcgcagtgctgtatggcatcgccttgatattgactgcgctctgggcggtctgggatgcaggcctgcattactggccgctggtgtcccgcgtattgacctttgccgtgatcggcctggtggttgcgctgatttacccgacgctgattcgcgcttcgggtgcgcaggcaggtcgtggcgcttatggcctggccggcgtgctggccatcggtgttgtcgcgaccatgggttacatgttcgtcccaagccatgtggttagcgccagcagcgtgccggccgtcgttccggtggcacccggcgccgagcagaaggactgggcacactggggcaacaccccggcaggcaaccggttcgcggcgctggatcagatcaacaagggcaacgtcgaaaagttgcaggtcgcctggaccttccacaccggcgacatcccgcagagcaccggcgcaggtgcggaagaccagaacacgccactgcagatcggtgacaccgtctacacctgcaccgcctacggcaaagtcttcgcactggatgccgacaccggcacccagcgctggaagttcgacccgcagggcagcggacccaactggcaacgctgccgaggcctgggctacttcgccacgccaggtgccgacgtatctgctcagccggcggctgctgtttgcgccacacgtgtgtttctaccgacaggcgatgctcgcctgatcgcactggatgccaaaaccggcgagacctgcaaggactttggcaatcaaggcgtcgtcgatctgaaaaccgacatgggcgaagtcaaggaaggctactaccagcaaacctcgacgccgctggtggcgggcaatgtcgttgtagtgggcggtagagtcgccgacaacttctctaccggcgagccaccgggcgtcgttcgcgcctttgacgtgcacagtggtgagctggtctgggcctgggatccgggcaacccgaacaccagcaagcgtccgccagccggggagacctacacgcgcggcacgccgaacgtctggtcggcaatgtcctacgacgaaaaacttggcctgatctacctgccgaccggcaacgccacgcctgacttcttcggcgggacgcgtaccgagctggatgacaaatggtcctcgtcagtggtcgccgtagacgtcaagaccggccaggtacgctggaacttccagatgacccaccacgacctgtgggacttcgacattccggcgcagccgttgctgtatgacattccggacggcaagggcggtacgcagcctgcgctggcacaagtcaccaagcagggcgaaattttcctcctcaaccgtgaaaccggtgtgccgatctcgcgtgtcgaagagcgtgccgtgccacaaggtaatgtgccgggcgagcgctattcgccgactcagccgttctcggtggacatgccgtcgattggcaaccagaccctgaaagagtccgacatgtggggcgccaccgcattcgatcaactgatgtgccgcatcgcctttaaaggcctgcgccacgagggcgtttatacgccaccaggcctggaccctgcgttgcagttccctggctcgctgggcggcatgaactggggcagtgtctcggtcgacccgaccaacagctacatgttcgtcaacgacatgcgcctgggcctggccaactacatgatcccgcgcgataagatcgccgctggtgccagcggcatcgaaatgggcgtcgtaccgcagaccggcacgccattcggcgcaatgcgtcagcgtttcctgtcagctgtcggaatcccgtgccaggcaccgccgttcggcaccatgtcggcgattgacctgaagaccaaaaagctcatgtggcaggtcccggtcggcaccgtaaaagacaccggcccgatgggtatccgcatgggcctgccgattccgatcggcatgccgacgctgggcgcatcgttgtccacacagtcgggcttgctgttcttcgcaggcacccaggacttctacctgcgcgccttcgacagcggcaacggcaacgaaatctggaaggcccgcctgcccgtaggcagccagtccggcccgatgacctacgtgtcgcccaagaccggcaagcagtacatcctgctcaccgccggcggcgcccgccaatcgcctgaccgtggtgactacgtgattgcgtacgcgttacccaagtaa

SEQ ID NO: 71 - protein, 788 aa, Pseudomonas syringae pv. tomato str. DC3000
MTNKQDTGAGSRLLLLGLGVLIALIGLGLAGGGGYLVTLGGSWFFLLMGLAMLVSGALIAARKPKGAVLYGIALILTALWAVWDAGLHYWPLVSRVLTFAVIGLVVALIYPTLIRASGAQAGRGAYGLAGVLAIGVVATMGYMFVPSHVVSASSVPAVVPVAPGAEQKDWAHWGNTPAGNRFAALDQINKGNVEKLQVAWTFHTGDIPQSTGAGAEDQNTPLQIGDTVYTCTAYGKVFALDADTGTQRWKFDPQGSGPNWQRCRGLGYFATPGADVSAQPAAAVCATRVFLPTGDARLIALDAKTGETCKDFGNQGVVDLKTDMGEVKEGYYQQTSTPLVAGNVVVVGGRVADNFSTGEPPGVVRAFDVHSGELVWAWDPGNPNTSKRPPAGETYTRGTPNVWSAMSYDEKLGLIYLPTGNATPDFFGGTRTELDDKWSSSVVAVDVKTGQVRWNFQMTHHDLWDFDIPAQPLLYDIPDGKGGTQPALAQVTKQGEIFLLNRETGVPISRVEERAVPQGNVPGERYSPTQPFSVDMPSIGNQTLKESDMWGATAFDQLMCRIAFKGLRHEGVYTPPGLDPALQFPGSLGGMNWGSVSVDPTNSYMFVNDMRLGLANYMIPRDKIAAGASGIEMGVVPQTGTPFGAMRQRFLSAVGIPCQAPPFGTMSAIDLKTKKLMWQVPVGTVKDTGPMGIRMGLPIPIGMPTLGASLSTQSGLLFFAGTQDFYLRAFDSGNGNEIWKARLPVGSQSGPMTYVSPKTGKQYILLTAGGARQSPDRGDYVIAYALPK

SEQ ID NO: 72 - DNA, 2244 bp, Pseudomonas syringae pv. tomato str. DC3000
  CDS (1)..(2244): transl_table=11
atgaccgggcgtgcggctgccctgggtctgtacgcgctgctgctgttcgcaagcacggtatggtcgttgtgggaagtcggcctggactggtggcaactggtgccgcgtctggcgctatggtttgcactgggcatcgtattgctgctgccgtggttccgtcggccgctgctgctcaacggcccggcgcgcatgggcactggcgcactgagcatcgctgtggtgctggccggtctggccgcgctggccagccagttcaccaaccctggccgtatcgaaggtcaactggaccgcgaaacggctggcaccaccaacaccgcgccggctatgcctgacggcgactggcagtcctatggacgtaccgctttcggcgatcgctattcgccactggcgcaaatcacgccgcaaaacgtcaacacgctgcagccggcctggacctatcgcacgggcgatattccagggccgaacgatccgggcgaaaccactgccgagaacaccccgctcaaggtcaacggcatgctttacgtgtgcacaccgcacagccaggtgatcgcgcttgatccggattcaggcaaggaaatctggcgctttgaccctaagctcagcactcagaatgcggccaacttcaagggttgggcgcatatgacctgccgtggcgtgacttaccacgacgacgccgcctatgccgccagcgctccggcgcaaagcccggcagcaccggccgcagtcagcgccacgtcaagtgtctgcccacgcagaatctttctgccgactgccgatacccgtctgatcgccctgaacgccgacaccggcaagatgtgcgaagactttggcaacaagggctcggttgacctgacggccaacatgggcacgttcgcaccgggcggctactactccacttcgccacccgcagtgaccaaggacctggtgatcatcggcggccacgtgaccgataacgtttcgatggacgaaccgtccggcgtgatccgtgcgtacgacgtgcacaccggtcgtctggtctggaactgggacagcggcaacccggaagaaacggctccgatagccgacggcaagatctacacgcgcaattcgccgaacatgtggtccatgttcagcgtcgatgaaaagctgggcatgatctacctgccgatgggcaatcagacgccggaccaatggggcggcaaccgtaccaaggagtccgagaagtacagcgcgggtctggttgcactggacatcgcgaccggccgtgtacgctgggacttccagttcactcaccatgacctgtgggacatggacgtgggcggtcaaccgacgctgctggacatgaaaaccgctgatggcgtgaagcctgcggtattggcctcgaccaagcagggcagcatctacgtgctggatcgcagcaccggcaagcctatcgtgccggtcaacgaagtgccggttccgcagggcgctgtcgcaggtgactggacttcgccgactcagcccaagtccgacctgaacttcatgccgccgccgcttaaagagcgcgacatgtggggcgtgacaccgtttgaccagatgatgtgccggatcgacttcaagtcgctgcgttacgacggcccgtttacgccgccatcgttgcagggttcgattgtgtatccgggtaacttcggtgtgttcgactggggcggcatctctgtcgatccggttcgccagatcgccttcgtcaatccgaactacatggcgttccgctccaggctggtgccttctgccgaagttgaaggcggcccgggccgcaagagcgaaaccgaaggcgtgcagccgaacaagggcgcaccgtatggcgtgattctggaaccactgctgtcaccgatgggcctgccgtgtcaggcaccggcatggggttatgtggcggcggtcgatctgaccaaccagaagaccatctggatgcacaaaaacggcaccgtgcgtgacagctcgccgatccccattccgctgaccatgggtgttccaagcctggggggtacattcaccaccgccagcggcctggcgttcatgagcgccacgcttgaccagtacctgcgtgcttatgacgtgcgtaacggcaagcaactgtgggaagcccgcctgccagcaggcgcgcaaaccacaccgatgacctacacgggcaaggacggtcagcaatacgtgctggtcgtggccggcggtcacggctcactgggcaccaaacagggtgactacgtgatggcgttcaaactgcccaagtaa

SEQ ID NO: 73 - protein, 747 aa, Pseudomonas syringae pv. tomato str. DC3000
MTGRAAALGLYALLLFASTVWSLWEVGLDWWQLVPRLALWFALGIVLLLPWFRRPLLLNGPARMGTGALSIAVVLAGLAALASQFTNPGRIEGQLDRETAGTTNTAPAMPDGDWQSYGRTAFGDRYSPLAQITPQNVNTLQPAWTYRTGDIPGPNDPGETTAENTPLKVNGMLYVCTPHSQVIALDPDSGKEIWRFDPKLSTQNAANFKGWAHMTCRGVTYHDDAAYAASAPAQSPAAPAAVSATSSVCPRRIFLPTADTRLIALNADTGKMCEDFGNKGSVDLTANMGTFAPGGYYSTSPPAVTKDLVIIGGHVTDNVSMDEPSGVIRAYDVHTGRLVWNWDSGNPEETAPIADGKIYTRNSPNMWSMFSVDEKLGMIYLPMGNQTPDQWGGNRTKESEKYSAGLVALDIATGRVRWDFQFTHHDLWDMDVGGQPTLLDMKTADGVKPAVLASTKQGSIYVLDRSTGKPIVPVNEVPVPQGAVAGDWTSPTQPKSDLNFMPPPLKERDMWGVTPFDQMMCRIDFKSLRYDGPFTPPSLQGSIVYPGNFGVFDWGGISVDPVRQIAFVNPNYMAFRSRLVPSAEVEGGPGRKSETEGVQPNKGAPYGVILEPLLSPMGLPCQAPAWGYVAAVDLTNQKTIWMHKNGTVRDSSPIPIPLTMGVPSLGGTFTTASGLAFMSATLDQYLRAYDVRNGKQLWEARLPAGAQTTPMTYTGKDGQQYVLVVAGGHGSLGTKQGDYVMAFKLPK

SEQ ID NO: 74 - DNA, 2391 bp, Salmonella enterica subsp. enterica serovar Typhi Ty2
  CDS (1)..(2391): transl_table=11
atggcagaaaataacgcacgatcgccacgattactcgtgacgctgacggccctctttgcagcactttgcgggctgtatcttcttatcggaggtgtctggctggttgctattggcggttcctggtactaccccatcgcgggcctcgtgatgctggttgtggccggattgctatggcgcagtaaacgtgccgcactgtggctgtatgccgccctgctgctggcgacaatgatttggggcgtgtgggaagtcgggttcgacttctgggcactcacgccgcgtagcgatatcctggtgtttttcggcatctggctaatattgccgtttgtctggcatcggctggtggttccttccagcggcgcagtggcggcgctggtcgtggcgctgctgattagcggcggcattctgacctgggctggcttcaacgacccgcaggagatcaacggtacgcttcgcgccgacgccacgcccgccgcaacaagttcgtcgatcgccgacgaagactggccggcctatggacgtaatcaggaaggccaacgctattcgccgctgaaacagatcactgcggataacgttcaccaactgaaagaagcgtgggtcttccgcaccggcgatctgaaacaacccaacgatccgggtgaaatcaccaacgaagtgaccccgataaaagtcggtgatacgctttatctgtgtacagctcaccagcgtctgttcgcgctggacgccgccagcggtaaagagaagtggcattttgatcctcagttgaagaccgattcgtctttccagcatgtgacctgccgcggcgtctcttatcatgaggccaaagcggataccgcctcgccggaggtcatcgccgactgtccgagccgcattatcctcccggtcaacgacggtcgccttttcgcggtgaatgccgaaaccggcaagctgtgtgaaaccttcgccaacaaaggcgtcctgaatctgcaaaccaatatgccggataccacgccgggactgtatgaaccgacgtcgccgccgattatcaccgataaaacaattgtcattgccggttcggtcacggataacttctctactcgcgaaacgtccggcgttatccgtggttttgatgttaatagcggtaaactactgtgggccttcgatcctggggcgaaagatccgaacacgattccagccgatgagcacgcttttacctttaactcgccgaactcctgggcccctgccgcctatgatgcgaaactggatctggtctatctgccgatgggcgtgaccacgccggatatctggggcggtaaccgcacgccggagcaggaacgttatgccagctccatcctggcgctgaatgccaccaccgggaaactggcctggagttatcagaccgtccatcacgatctgtgggatatggacctgccggcacagccgacgctggcggatattaccgttgacggtactaccgttccggttatctatgcaccagcgaaaaccggtaatatctttgtgctggacagacgtaatggcgagctggtcgtgcccgctccggaaaaaccggtcccgcagggcgcggcaaaaggcgattatgtcgccaaaactcagccgttctctgatttaaccttccgcccgaaaaaagatctctccggcgcggatatgtggggcgcgaccatgttcgaccaactggtgtgccgcgttatgttccaccagttgcgctatgaaggtatcttcaccccgccatccgagcaggggacattggtattccctggcaacctggggatgtttgaatggggcggtatttccgtcgatccagaccgtcaggtcgctatcgctaacccgatggcgctgccgtttgtctcgaagctgatcccacgcggcccgggtaatccaatggaaccgccgaaagacgcgaaaggtaccggtacagaagcgggtattcagccgcagtacggcgtaccgttcggcgtcacgctgaatccgttcctttcgccgtttggtttgccgtgtaaacaaccggcctggggctacatttccgcgttggatctgaagaccaatgaaatcgtgtggaagaaacgtatagggacgccgcgcgacagtatgccgttcccgatgccggttccggtgccgttcaacatggggatgcccatgctgggcgggccaatctcaaccgccggtaacgtgctgttcattgccgcgaccgccgacaactacctgcgcgcttataacatgagcaacggggaaaaactgtggcagggacgtttacccgccggaggccaggcaacgccgatgacctatgaggtaaacggtaagcagtacgtggtcatttctgccggaggccacggttcgtttggtacgaagatgggcgactatatcgtggcctatgctttgcctgacgacgcgaaataa

SEQ ID NO: 75 - protein, 796 aa, Salmonella enterica subsp. enterica serovar Typhi Ty2
MAENNARSPRLLVTLTALFAALCGLYLLIGGVWLVAIGGSWYYPIAGLVMLVVAGLLWRSKRAALWLYAALLLATMIWGVWEVGFDFWALTPRSDILVFFGIWLILPFVWHRLVVPSSGAVAALVVALLISGGILTWAGFNDPQEINGTLRADATPAATSSSIADEDWPAYGRNQEGQRYSPLKQITADNVHQLKEAWVFRTGDLKQPNDPGEITNEVTPIKVGDTLYLCTAHQRLFALDAASGKEKWHFDPQLKTDSSFQHVTCRGVSYHEAKADTASPEVIADCPSRIILPVNDGRLFAVNAETGKLCETFANKGVLNLQTNMPDTTPGLYEPTSPPIITDKTIVIAGSVTDNFSTRETSGVIRGFDVNSGKLLWAFDPGAKDPNTIPADEHAFTFNSPNSWAPAAYDAKLDLVYLPMGVTTPDIWGGNRTPEQERYASSILALNATTGKLAWSYQTVHHDLWDMDLPAQPTLADITVDGTTVPVIYAPAKTGNIFVLDRRNGELVVPAPEKPVPQGAAKGDYVAKTQPFSDLTFRPKKDLSGADMWGATMFDQLVCRVMFHQLRYEGIFTPPSEQGTLVFPGNLGMFEWGGISVDPDRQVAIANPMALPFVSKLIPRGPGNPMEPPKDAKGTGTEAGIQPQYGVPFGVTLNPFLSPFGLPCKQPAWGYISALDLKTNEIVWKKRIGTPRDSMPFPMPVPVPFNMGMPMLGGPISTAGNVLFIAATADNYLRAYNMSNGEKLWQGRLPAGGQATPMTYEVNGKQYVVISAGGHGSFGTKMGDYIVAYALPDDAK

SEQ ID NO: 76 - DNA, 2391 bp, Shigella flexneri 2a str. 2457T
  CDS (1)..(2391): transl_table=11
atggcaattaacaatacagcctcgcgacgattactcgtcacgctaacagccctttttgcagcgctttgcgggctgtatctactcattggcggaggctggctggtcgcgattggcggctcctggtactaccctatcgctggccttgtgatgctcggcgtcgcctggatgctgtggcgcagtaaacgcgccgcgctttggctatacgcagccctgctgctcggcaccatgatttggggcgtctgggaagttggtttcgacttctgggcgctgactccgcgcagcgatattctggtcttcttcggcatctggctgatcctgccgtttgtctggcgtcgcctggtcattcctgccagcggcgcagttgccgcactggtggtcgcactgctgattagcggtggtatcctgacctgggccggatttaacgatccgcaggagatcaacggcaccttaagcgccgatgccacacctgccgaagctatctcccccgttgccgatcaggactggcctgcgtatggccgcaatcaggaaggtcaacgcttttcaccactgaagcaaattcacgccgataacgtccacaagctgaaagaagcctgggtgttccgtactggcgatgtgaagcagccgaacgatccgggtgaaatcaccaatgaagtgacgccgattaaagtgggcgataccctttacctgtgtaccgctcaccagcgcctgtttgcgcttgatgccgccagcggcaaagagaaatggcattacgatcctgagctgaaaaccaacgagtctttccagcacgtaacctgccgtggcgtctcttatcatgaagccaaagcagaaacggcttcgccggaagtgatggcggattgcccgcgtcgtatcattcttccagtgaatgatggtcgcctgattgcgattaacgctgaaaacggcaaactgtgcgaaaccttcgccaataaaggcgtgctcaatctgcaaagcaatatgccagacaccaaaccgggtctgtatgagccgacttctccgccaattatcaccgataaaaccatcgtgatggccggttcagtcaccgataacttctcaacccgcgaaacgtctggcgtgatccgtggttttgatgtcaacaccggggagctgctgtgggcttttgatccgggcgcgaaagatccgaacgcaatcccgtcagacgaacacacctttacctttaactcaccaaactcgtgggcaccagcggcctatgacgcgaagctggatctggtctatctgccgatgggcgtgaccacgccggatatctggggcggtaaccgcacaccggaacaggaacgttatgccagctcgattctggcgctgaatgccactaccgggaaactggcgtggagctaccagaccgttcaccacgacctgtgggacatggatcttccggcacagccgacgctggcggacatcaccgttaatggtcagaaagtgccgattatttacgctccggcgaaaaccggtaacatttttgtgctcgatcgtcgtaatggcgaactggtggttccggccccggaaaaaccggttccccaaggtgctgccaaaggcgattacgttacccctactcaaccattctcggaactgagcttccgtccgacgaaagatttgagcggtgcggatatgtggggagccaccatgtttgaccaactggtgtgccgcgtgatgttccaccagatgcgctatgaaggcattttcacgccgccatctgaacagggtacgctggtcttcccgggtaacctggggatgttcgaatggggcgggatttccgttgatccaaatcgtgaagtggcaattgccaacccaatggcactgccgtttgtttcgaaactgctcccgcgtggtcctggcaacccgatggagcagccgaaagatgccaaaggcacgggtacggaatccggcattcagccacagtacggtgtaccgtatggtgtcacgctcaacccgttcctctcaccatttggtctgccatgtaaacagccagcatggggttatatctcggcgctggatctgaaaactaatgaagtggtgtggaagaaacgtattggtacgccgcaggacagtatgccgttcccgatgccggttccggtgccgttcaatatgggtatgccgatgctgggcgggccaatctccacggcgggtaacgtgctgtttatcgccgctacggcagataactacctgcgcgcttacaacatgagcaacggtgaaaaactgtggcagggtcgtttaccggcgggtggtcaggcaacaccgatgacctatgaagtgaatggcaagcagtacgtggtgatctccgcaggcggtcacggttcatttggtacgaagatgggcgactatattgtggcttatgccctgccggatgatgtgaaataa

SEQ ID NO: 77 - protein, 796 aa, Shigella flexneri 2a str. 2457T
MAINNTASRRLLVTLTALFAALCGLYLLIGGGWLVAIGGSWYYPIAGLVMLGVAWMLWRSKRAALWLYAALLLGTMIWGVWEVGFDFWALTPRSDILVFFGIWLILPFVWRRLVIPASGAVAALVVALLISGGILTWAGFNDPQEINGTLSADATPAEAISPVADQDWPAYGRNQEGQRFSPLKQIHADNVHKLKEAWVFRTGDVKQPNDPGEITNEVTPIKVGDTLYLCTAHQRLFALDAASGKEKWHYDPELKTNESFQHVTCRGVSYHEAKAETASPEVMADCPRRIILPVNDGRLIAINAENGKLCETFANKGVLNLQSNMPDTKPGLYEPTSPPIITDKTIVMAGSVTDNFSTRETSGVIRGFDVNTGELLWAFDPGAKDPNAIPSDEHTFTFNSPNSWAPAAYDAKLDLVYLPMGVTTPDIWGGNRTPEQERYASSILALNATTGKLAWSYQTVHHDLWDMDLPAQPTLADITVNGQKVPIIYAPAKTGNIFVLDRRNGELVVPAPEKPVPQGAAKGDYVTPTQPFSELSFRPTKDLSGADMWGATMFDQLVCRVMFHQMRYEGIFTPPSEQGTLVFPGNLGMFEWGGISVDPNREVAIANPMALPFVSKLLPRGPGNPMEQPKDAKGTGTESGIQPQYGVPYGVTLNPFLSPFGLPCKQPAWGYISALDLKTNEVVWKKRIGTPQDSMPFPMPVPVPFNMGMPMLGGPISTAGNVLFIAATADNYLRAYNMSNGEKLWQGRLPAGGQATPMTYEVNGKQYVVISAGGHGSFGTKMGDYIVAYALPDDVK

SEQ ID NO: 78 - DNA, 2397 bp, Acinetobacter sp. ADP1
  CDS (1)..(2397): transl_table=11
ttgaaagtatggtgttttatacttgggctggcgttacttattactggtgcattttatgttatcggtggtggaaaactgattagcttgggtggttcatggtacttcctgattgctggtttaatgattactacctcagctttttttatgttcaagaaaaaagcaaccggggtctggttatatgctttggccttcattggtactgttatttgggcgttaattgatgctggtttcgaattttggccattgcattcacgtttgatgttcccagcaggtttatttgctgcggtcatgttaaccttgccatctattcgtaaataccaatatcaaaccccaatgagcgctccagcatatgtcattggtggtttgaccgttttaggaatgctcggtggtctgtatggaatgtttattccacatgaaactgtgaaagcatctggcgaagaactaccacttgttccagttgaccctgccaaaaaacaggtaaattgggatcattatggtaatgatgctggcggcagtcgttttgtagcgcttgatcagattaaccgtaacaacgtatctaaattaaaagaagcttggcgtttccgtacaggtgattttacgactggtacaggtaacggtgcagaagatcaaatgacaccattgcaagttggcaataaagtattcttgtgtacaccacataataatatatttgcaattgatgcagactctggaaagcagctttggaaagcagaagttaactctactgcggatgcatgggaacgttgtcgtggcgtcgcttattttgattcgacacaaccattggtacaacctacattggctggtgcaacacctgtagctgctttagcagcaaatactgagtgtccgcgacgtgtatataccaatactgtagatggccgtttgattgcagtaaatgcagatacaggcgctcgttgtaaagactttggtgttaatggtacagtgaatttacatgaaggacttggtgaaaatactaaggcacctcgctttgaagtcacttcggcacctaccattgcaggtacaacgattgtcgtgggaagccgtattgcagataacgtggcagccgatatgcctggtggagtcattcgtgcctatgatgtgattacaggtaaattacgttgggcatttgatccacgtaatccagatccaaactacgttttaaaaccaggtgagatttacaaacgcagttctacgaactcatgggcagccatgtcttatgacccgcaaatgaataccgtgttcttgccaatgggaagttcatctgtagacgtttggggtggtaatcgtactgcagccgaccataaatataatacctctgtacttgcacttgatgcgacgacaggtaaagaaaaatgggtttataatactgttcataatgacctttgggattttgacttaccaatgcaaccaagtttggtagacttcccaatgaaagatggtacaactaaacctgcggttgttattggcactaaatcaggtcagttttatgtacttgatcgtgtgacaggtaaaccactgactaaagtgatcgagcagccaattaaagtggctgatattcctggcgaacaatacagtaaaactcagccgcgttcagttgaaatgccgcaaattggtaatcagacacttaaagagtctgatatgtggggcgcgacgccatttgatcagttgatgtgtcgtatcaactttaaatcaatgcgttatgacgggctttacaccgcaccaggtactgatgtatcactgagcttcccgggttctctgggtggtatgaactggggttctatcgcatttgatccaacgcaccgttatatgtttgtgaatgacatgcgtttagggctttggattcaattgatcaagcagactcctgaagatatcaaaattcaggcaaatggtggcgagaaagttaatacaggtatgggtgcagttccaatgaaaggtacgccatataaagtgaataaaaaccgctttatgtcagcgttgggcattccatgtcaaaaaccaccttttggtaccatgactgcaattgatatgaaaacacgtcaagtggcttggcaagtaccattgggtacgattcaagacacgggtccaatgggtattaaaatgggcttgaaagcaccaattggtatgccaaccattggtggtcctatggcgactcaaggcgggttagtattctttgctgcaacgcaagactactacttacgtgcgtttaactcatctaatggtaaagagttgtggaaagcacgtcttcctgtgggtagtcaaggtacgcctatgagttatatgtcaccaaaaactggaaaacaatacgttgttgtttcagcaggtggtgcacgtcagtctccagatcatggtgactacgtgattgcatatgcccttgaaaaataa

SEQ ID NO: 79 - protein, 798 aa, Acinetobacter sp. ADP1
MKVWCFILGLALLITGAFYVIGGGKLISLGGSWYFLIAGLMITTSAFFMFKKKATGVWLYALAFIGTVIWALIDAGFEFWPLHSRLMFPAGLFAAVMLTLPSIRKYQYQTPMSAPAYVIGGLTVLGMLGGLYGMFIPHETVKASGEELPLVPVDPAKKQVNWDHYGNDAGGSRFVALDQINRNNVSKLKEAWRFRTGDFTTGTGNGAEDQMTPLQVGNKVFLCTPHNNIFAIDADSGKQLWKAEVNSTADAWERCRGVAYFDSTQPLVQPTLAGATPVAALAANTECPRRVYTNTVDGRLIAVNADTGARCKDFGVNGTVNLHEGLGENTKAPRFEVTSAPTIAGTTIVVGSRIADNVAADMPGGVIRAYDVITGKLRWAFDPRNPDPNYVLKPGEIYKRSSTNSWAAMSYDPQMNTVFLPMGSSSVDVWGGNRTAADHKYNTSVLALDATTGKEKWVYNTVHNDLWDFDLPMQPSLVDFPMKDGTTKPAVVIGTKSGQFYVLDRVTGKPLTKVIEQPIKVADIPGEQYSKTQPRSVEMPQIGNQTLKESDMWGATPFDQLMCRINFKSMRYDGLYTAPGTDVSLSFPGSLGGMNWGSIAFDPTHRYMFVNDMRLGLWIQLIKQTPEDIKIQANGGEKVNTGMGAVPMKGTPYKVNKNRFMSALGIPCQKPPFGTMTAIDMKTRQVAWQVPLGTIQDTGPMGIKMGLKAPIGMPTIGGPMATQGGLVFFAATQDYYLRAFNSSNGKELWKARLPVGSQGTPMSYMSPKTGKQYVVVSAGGARQSPDHGDYVIAYALEK

SEQ ID NO: 80 - DNA, 2406 bp, Acinetobacter sp. ADP1
  CDS (1)..(2406): transl_table=11
atgtctcaaccatcttcaaattcaggacttagaacattgaccgtagttatcgctgcggtgattggtctattcctgctcgttggaggtatatggcttactgtactcggtgggtcattctattatgtgattgcaggattggcattactgatctttgcatggctcttgctcaaacgatcaagcacttctatctggttgtatgctgcattaatgctcggtacaacgctatggggtatttgggaagttggtacagacttctgggccttggcaccgcgtctggacattttaggcgtacttggtctatggattttaattccagccgtgagccgtggaatggacaatgcaaaatcaagcaaaattgcgttgtcttctacacttgtgattgcaattgtggtcatggtttattctatttttaatgatccgcaagaaattaatggtgtcattaaaaatgagcaacccaaaactgcacaagcagttgaaggtgttgatgctgctgattggcctgcctatggtcgtacccagggtggtgtacgttattcgcctttaacgcagattaatgatcagaacgttaaagatttgaaagtggcatggaccttccgtacaggtgacttaaaaactgcaaatgactcgggtgaaaccaccaatcaggttacgccaatcaaagttggcaataacatgtacatgtgtaccacccaccaatggttaattgcacttgaccctgcaacaggtaaagaaaaatggcgttttgatccgaaattaaaagcagataaaacctatcaacatttaacctgtcgtggtgtgatgtattacgatgccaataataccagtgagttcgcaaccagcttgcaagccaaaaaatcagcatcgacagaatgcccacgtaaagtctttttacctgtgaatgatggtcgtctggttgctatcaatgcagatactggtaaggcatgctctgactttggtacgaagggtgaagtcgatttacaaaagttgatgccatatgcttatccaggcggttataacccaacatcgccaggtattgtttctggtacaacagtggtgattgcaggttctgtcacagataactactccaataaagagccatcaggtgtcattcgtggttacgatgtaaacacgggtaaactgctttgggcatttgatacgggtgcacaagatccaaatgcacttcctggcgaaaattcgacgtttgtacacaattctccaaatgcatgggcgccattggcatacgatccgaagctggatatcgtctatgtaccaacaggtgtcggtacgccagatatctggggtggagatcgtaccgagttgaaagagcgttatgcaaattcaatgctggcaatcaacgccacaaccggtaaacttgtttggcatttccagaccacacatcatgatttgtgggatatggatgtaccatcacagccttcactggcagatgttaaagacaagtctggtcagactgttccagcgatttatgtgttaaccaaaacaggcaatgtttttgttctagatcgtcgtaatggtaaggcgattgtgccaattacagaaaaagcggtaccacagaccgtgaaacgtggcccacaaaccaagggtgaacgttattctgcgacacaaccattttctgcacttgatttagcaccaaaagacaaacttacagacaaacaaatgtggggtgccacaatgtttgatcagttgatgtgtcgcgtgtcattcaagcgtctgaactatgacggtatttatacaccaccatctgaaaacgggactttagtgttcccaggaaatctgggtgtatttgaatggggtgggatgtcggtcaatcaggatcgtcagattgcagtcatgaatccgttggcgctaccgtttgtgagccgtctgattccgatggatccgaaccgtaaggaaactgcacgtggtgcaggaacagagcatggtattcaaccgatgtatggtgtgccttatggtgtggaaatcaatgcattcttgtcgcctcttggtttgccttgtaagcagcctggctggggctatattgctggtgtcgatttaaattcacatgaagtggtctggaaaaaacgtatcggtactatccgtgatagtttgccaaatctattccagttgccagcacttaaaattggtgtacctggcttgggtggaaccatttcaactgcaggtaacgtaatgtttgttggtgcaacccaggataactatatccgtgcgtttaatgttagtaatggtgaaaaactgtgggaagcacgtttaccagcaggtggtcaagccacaccgatgacctatgaaatcaatggtaaacaatatgtggtaattatggcgggtggtcatggttcatttggcaccaagatgggtgactatcttgtggcttatgcattgccggataccaaataa

SEQ ID NO: 81 - protein, 801 aa, Acinetobacter sp. ADP1
MSQPSSNSGLRTLTVVIAAVIGLFLLVGGIWLTVLGGSFYYVIAGLALLIFAWLLLKRSSTSIWLYAALMLGTTLWGIWEVGTDFWALAPRLDILGVLGLWILIPAVSRGMDNAKSSKIALSSTLVIAIVVMVYSIFNDPQEINGVIKNEQPKTAQAVEGVDAADWPAYGRTQGGVRYSPLTQINDQNVKDLKVAWTFRTGDLKTANDSGETTNQVTPIKVGNNMYMCTTHQWLIALDPATGKEKWRFDPKLKADKTYQHLTCRGVMYYDANNTSEFATSLQAKKSASTECPRKVFLPVNDGRLVAINADTGKACSDFGTKGEVDLQKLMPYAYPGGYNPTSPGIVSGTTVVIAGSVTDNYSNKEPSGVIRGYDVNTGKLLWAFDTGAQDPNALPGENSTFVHNSPNAWAPLAYDPKLDIVYVPTGVGTPDIWGGDRTELKERYANSMLAINATTGKLVWHFQTTHHDLWDMDVPSQPSLADVKDKSGQTVPAIYVLTKTGNVFVLDRRNGKAIVPITEKAVPQTVKRGPQTKGERYSATQPFSALDLAPKDKLTDKQMWGATMFDQLMCRVSFKRLNYDGIYTPPSENGTLVFPGNLGVFEWGGMSVNQDRQIAVMNPLALPFVSRLIPMDPNRKETARGAGTEHGIQPMYGVPYGVEINAFLSPLGLPCKQPGWGYIAGVDLNSHEVVWKKRIGTIRDSLPNLFQLPALKIGVPGLGGTISTAGNVMFVGATQDNYIRAFNVSNGEKLWEARLPAGGQATPMTYEINGKQYVVIMAGGHGSFGTKMGDYLVAYALPDTK

SEQ ID NO: 82 - DNA, 2376 bp, Pseudomonas syringae pv. syringae B728a
  CDS (1)..(2376): transl_table=11
atgattctcaaagtgaccggtatcgtcatcgcgatactcagcctcattctgctattcatgggggcgcaactggtggctgccggcggttcaccggcctactcgatgatcgccctgggtttgctggccacagcaaccctggtattcctgaaaagaaagtcggcacttaccctgtatgcggtgatgatgtgggggattctgctctggatcatctatgaagcgggcctggacaaatggcagtggatccctcgcggcgatctgtttgcactgatcggcctgtggctggccatgccctgggtcgtgcggccgctttatcaagcgcggtcgagcaccgataagcgtcgttttcatccgttgctgggcggtacgcttggcgtaatgctgctgatcgtgattgcgctgatgtttcacgatccgtacccgcagcaagggcggatcgacagcgtggcgaccgcccgcagcgccgagtcggcaggcagtgactgggctgcatatggcggtagcaacgcgggccagcgcttttccagcctcgatcagatcaccccggacaacgtcggcaagctgtcggtggcctgggaataccacaccggtgacttgcgcgatgaagacgaggatgccggcgagtacacctttgaagcgacgcccctcaagatcaacgaccgggtgtatgtgtgcacgcctcataacgaagtgcatgcgctgaacccgcagaccgggcaactggcctggaaatacacccccgagaaaaaacgctcgtatttgcagcagcaccagacctgccgtggcgtcagctactattcggcagcctccagcccgacaggccagccacaacagcccgctcaatgcgccaaacgcatcatcaccgcgactgcagatgccaggctggtagcgcttgatgccgacagcggcaacctgtgcagcgacttcggcagcggcggggtgatcgacttgagcttcaacatgggcacgatccgcccgcacgcgctgatgcagacatccgcgccactgattgcaggcgatctgatagtgatcggcagctcgatcatggataacggttataacgacggcaacccgtcgggtgtgattcgcgcctacgacgtcatcaccggcaggctggtatggaatttcgatccgcaaaacccggacaacacccagcctatagcggctgaccagagctatccgcaggacacgccggtcgcctgggcaaccctgagcgctgatgtcaaaaacggtctggtgtacgtcccgttcggcaacgcttcgcccgacgaaaccggcacccggcgtaaccccgacagcaacaccgagaagtttcgcgatgcactggtggctctcgacctgaagagcggcgcgctgcgctggaaattccagacctcgaacaatgacctttgggatcgcgacaacccatcgcagccctcactgctggatctgggaaaagacggtagccgccagcctgccctggtgttgccgaccaaagtaggcaacatctttgtgcttgaccgactgacgggcgagccgatcgtgcctgtcgatcaggtcagtgtgcgcaccgcgggcggtgttgaaggcgagcgctttgcacccacccagccggtctcgcgacttaacttcatcccgccggtgttgaccgagaagtccatgtggggcgttacgccttttgaccagatggcttgccggatcgcgtacaacacccttcgttatgacggtaacccttggacaccggccaccgagtcgggatcgctgatctatcccggcaacataggcgtgttcaactggggttcggtggccgtggaccctgaccgccagttgctgatcaccgcaccggtgcgcctggcgtatgtctacaacctgatcaagcgccccgcgcaggcccgggaaaaacgcctgttcactcaggagggcaagccctactggaacgagaacttcgacggtgactatgccatccgtatttccagattcgcctcgagccttggcattccgtgcacagcgccaccgtgggggaccatggccggggtcgatctgacgaccggcaagacccaatggatgcgccgggttggtaccaccaaaaacctcaagaccagcttcatgcagggacgttttccggtcggttttcccatgggcatggtcgcccatggcggtccgatggtgacggcaggcggattggcctttcacggcgcgacggcggataactttttccgcgcctacgacgtcaatagcggcgaagtgctctgggaacacgagttacccgcgggtggccaatcgattccttcgacgtataccggcaacgacggcaaacagtacgtggtcattgctgccggcggtcacggatcgctcggtacgacgttgggcgacagcgtgattgccttccgggttgattga

SEQ ID NO: 83 - protein, 791 aa, Pseudomonas syringae pv. syringae B728a
MILKVTGIVIAILSLILLFMGAQLVAAGGSPAYSMIALGLLATATLVFLKRKSALTLYAVMMWGILLWIIYEAGLDKWQWIPRGDLFALIGLWLAMPWVVRPLYQARSSTDKRRFHPLLGGTLGVMLLIVIALMFHDPYPQQGRIDSVATARSAESAGSDWAAYGGSNAGQRFSSLDQITPDNVGKLSVAWEYHTGDLRDEDEDAGEYTFEATPLKINDRVYVCTPHNEVHALNPQTGQLAWKYTPEKKRSYLQQHQTCRGVSYYSAASSPTGQPQQPAQCAKRIITATADARLVALDADSGNLCSDFGSGGVIDLSFNMGTIRPHALMQTSAPLIAGDLIVIGSSIMDNGYNDGNPSGVIRAYDVITGRLVWNFDPQNPDNTQPIAADQSYPQDTPVAWATLSADVKNGLVYVPFGNASPDETGTRRNPDSNTEKFRDALVALDLKSGALRWKFQTSNNDLWDRDNPSQPSLLDLGKDGSRQPALVLPTKVGNIFVLDRLTGEPIVPVDQVSVRTAGGVEGERFAPTQPVSRLNFIPPVLTEKSMWGVTPFDQMACRIAYNTLRYDGNPWTPATESGSLIYPGNIGVFNWGSVAVDPDRQLLITAPVRLAYVYNLIKRPAQAREKRLFTQEGKPYWNENFDGDYAIRISRFASSLGIPCTAPPWGTMAGVDLTTGKTQWMRRVGTTKNLKTSFMQGRFPVGFPMGMVAHGGPMVTAGGLAFHGATADNFFRAYDVNSGEVLWEHELPAGGQSIPSTYTGNDGKQYVVIAAGGHGSLGTTLGDSVIAFRVD

SEQ ID NO: 84 - DNA, 2424 bp, Pseudomonas syringae pv. syringae B728a
  CDS (1)..(2424): transl_table=11
atgagcactgacagtgcttcaaatagaaatcgcctgttaccgaccctgctcgggctggtgatcctgttgatggggctggcgttgctggtcggtggtgcccgactgctgcaactggatggctcgttgtattacctgctggccggtatcggtttcgccgtgactggcgtgttgttgatcaccggtcgtgcggctgcgctgggcctttatgcactgctgctgttcgcgagcacggtctggtcgttgtgggaagtcggcctcgactggtggcaattggtgccacgcctggcgctgtggttcgccctgggtatcgtgttgctgctgccatggttccgcgagccgctactgcgcaacggtccggcacgcatgggcaccggtgcactgagcatcgctgtggtgctggccggcctgaccgcactggcaagccagttcactaacccgggtcgtatcgaaggccagctggaccgcgagacggctggcacgaccaacaccgccccggcgatgcctgacggcgactggcagtcctacggccgcaccgcgttcggtgaccgctactcgccactggcgcagatcacgccggaaaacgtcaacaagctggagccggcctggacctatcgcacgggtgacattccggggccgaatgacccgggtgaaaccactgccgagaacaccccgctcaaggtcaacggcatgctctacgtgtgcacgccgcacagtcaggtgatcgcccttgacccggattcgggcaaggaaatctggcgcttcgatccgaagctcagcactcagaacgctgccaacttcaagggttgggcgcacatgacctgccgtggcgtcacctatcatgacgacgctgcctatgccgccagtgccccggcgcaaagcccgacggtcccggctgctgacggtactgccaccgccagtgctgcctgcccgcgcagaatcttcctgccgactgccgacacccgtctgatcgcgctgaacgccgacaccggcaagatgtgcgaagacttcggcaacaagggttcggttgacctgaccgccaacatgggcaccttcgctccgggcggctactactccacgtcgccaccggcggtcaccaaggacctggtgattatcggtggccacgtcactgacaacgtttccatggacgagccgtccggcgtgatccgcgcctatgacgtacacactggccgtctggtgtggaactgggacagcggcaatccggaagaaactgcgccgattgccgaaggcaagatctacacgcgcaactcgccgaacatgtggtccatgttcagcgtcgatgaaaagctcggcatgatttacctgccgatgggtaaccagacgcctgaccagtggggcggcgaccgtacgccagagtccgagaagtacagcgcgggcctggttgcactggacatcgcaaccggccgcgtgcgctgggactaccagttcactcaccacgacctgtgggacatggacgtcggtggtcagccgaccctgctggacatgaaaaccgctgacggcatcaaacccgccgtactggcgtcgaccaagcagggcagcatctacgtcctggaccgtagcaccggcaaaccgatcgtgccgatcaatgaagtgccggtcccgcaaggcgctgtcgcgggtgatcacacctcgccaacccagcccaagtccgacctgaacttcatgccgccgccgcttaaagagcgcgacatgtggggcgtgacaccgtttgaccagatgatgtgccggatcgacttcaagtcgctgcgctacgatggtccgttcaccccgccttcgctgcagggttcgatcgtttatccgggcaacttcggtgtgttcgactggggtggtatttccgtcgacccggtgcgtcagatcgccttcgtcaatcctaactacatggctttccgttcgaagctggtgccttctgccgaagttgaaggcggcccgggccgcaagagcgaaaccgaaggcgtacagccgaacaagggcgcgccttatggtgtgatcctggaagcactgctgtcgccgatgggcctgccttgccaggcacctgcatggggttacgtggcggctgtcgacctgaccacccaaaaaaccatctggatgcacaagaacggcaccgtgcgcgacagctcgccgatcccgcttccgctgaccatgggcgttccaagcctgggtggtacgttcacaaccgccagcggcctggcgttcatgagcgctacgcttgaccagtacctgcgtgcttatgacgtgcgtaacggcaagcaattgtgggaagcccgcctgccagcaggcgcgcaaaccaccccgatgacctacaccggtaaggacggtcagcaatacgtgctggtcgttgcgggcggtcacggctcactgggcaccaaacagggtgactacgtgatggcgttcaaactgcctaagtaa

SEQ ID NO: 85 - protein, 807 aa, Pseudomonas syringae pv. syringae B728a
MSTDSASNRNRLLPTLLGLVILLMGLALLVGGARLLQLDGSLYYLLAGIGFAVTGVLLITGRAAALGLYALLLFASTVWSLWEVGLDWWQLVPRLALWFALGIVLLLPWFREPLLRNGPARMGTGALSIAVVLAGLTALASQFTNPGRIEGQLDRETAGTTNTAPAMPDGDWQSYGRTAFGDRYSPLAQITPENVNKLEPAWTYRTGDIPGPNDPGETTAENTPLKVNGMLYVCTPHSQVIALDPDSGKEIWRFDPKLSTQNAANFKGWAHMTCRGVTYHDDAAYAASAPAQSPTVPAADGTATASAACPRRIFLPTADTRLIALNADTGKMCEDFGNKGSVDLTANMGTFAPGGYYSTSPPAVTKDLVIIGGHVTDNVSMDEPSGVIRAYDVHTGRLVWNWDSGNPEETAPIAEGKIYTRNSPNMWSMFSVDEKLGMIYLPMGNQTPDQWGGDRTPESEKYSAGLVALDIATGRVRWDYQFTHHDLWDMDVGGQPTLLDMKTADGIKPAVLASTKQGSIYVLDRSTGKPIVPINEVPVPQGAVAGDHTSPTQPKSDLNFMPPPLKERDMWGVTPFDQMMCRIDFKSLRYDGPFTPPSLQGSIVYPGNFGVFDWGGISVDPVRQIAFVNPNYMAFRSKLVPSAEVEGGPGRKSETEGVQPNKGAPYGVILEALLSPMGLPCQAPAWGYVAAVDLTTQKTIWMHKNGTVRDSSPIPLPLTMGVPSLGGTFTTASGLAFMSATLDQYLRAYDVRNGKQLWEARLPAGAQTTPMTYTGKDGQQYVLVVAGGHGSLGTKQGDYVMAFKLPK

SEQ ID NO: 86 - DNA, 2421 bp, Pseudomonas fluorescens Pf-5
  CDS (1)..(2421): transl_table=11
atgagcactgagggtgcttcaagtccgagccgcttgctgccaagcctgctcgggatcttgctgctgctaatgggcctggccttgctggccggggggatcaagctgagcatgctcggcggctcgctgtactacgttttggccggtatcggcctgacgttgaccggcctcttgctgctggccggtaaacgcgcggcgctgggcctgtacgccctggtactgttcgccagtaccgtctggtcgctatgggaaatcggcctggactggtggcaactggtgccacgcctgtcgctgtggttcgccctcggcgtggtcctgctgctgccctggttccgtcgcccgctgctgcacgatggcccggccccgctgggcaccgctgccctgagcgtggccgtggtcctggccggtggcgccgccattggcagccagttcactaaccctggggaaatctccggtgacctgggccgcgacaccgcggacatgaccagcaccgcgccggccatccccgacggtgaatggcaggcctacggccgcaccgagttcggcgatcgctactcgccgctgaagcagatcaccccggccaacatcggcaagctgcaggaagcctggcgcatccgcaccggcgacatgccgaccgacaaggacccggtggaaatcaccaaccagaacaccccgctgaaggtcaacggcaagctctatgcctgcaccgcccacagcaaggtgctggccctggacccggataccggcaaggaaatctggcgcttcgacccgcagatccagggccccaacggcgacgacttccgtggctgggcacacatgacctgccgtggcgtgtcgtactacgacgaagccaacttcaagaacgccgacgccatcagccagccggccaccctgtcccccgcgggccaggccatcgccaccagctgcccgcgtcgcctgttcctgcctaccgccgatgcgcgcctgatcgccatcaacgccgacaccggcaaggtctgcgaagacttcggcaccaagggcgccgtggacctgaaggccggtatcggcccattcaccccgggcggctactactccacctccccggcggccatcacccgtaacctggtgatcattggcggccacgtgaccgacaacgagtcgaccaacgagccgtccggcgtgatccgcgccttcgacgtgcacgacggccacctggtgtggaactgggattcgggcaacccggacgagaccactccgctgccggaaggcaagacctatacccgcaactcaccgaacatgtggtccctggccagcgtcgacgagaaactgggcatggtctacctgccactgggcaaccagatgcctgaccaatggggcggcaaccgcaccgcaggcgccgagaaattcagcgccggcaccgtggccctggacatcgacaccggcaagctgcgctggaactaccagttcacccaccacgacctgtgggacatggacgtgggcagccagccgactctgctggacatgaagactgcggacggcgtcaagccggcgctgatccagccgaccaagcaaggcagcctgtacgtgctggaccgtcgcgatggcaccccgatcgtgccgatccgtgaagtaccggccccgaccggcgcagtcgaaggcgaccacaccgcgccaacccaggcccgttcggacctgaacctgctgccgccgccactggacgagaaagccatgtggggcgcgacgccgttcgaccagatgctgtgccgcatccagttcaaggagctgcgctatgaaggccagtacaccccgccgtcggtgcagggcagcctgatctacccgggtaacgtgggcgtgttcaactggggcagcgtgtccctggacccggttcgccaactgctgttcaccagcccgaactacatggccttcgtttccaagctggtgccgcgtgccgaagtggctgccgggagcaagcgcgaaagcgagacctcgggcgtgcaacccaacaccggcgcgccttacgcggtgatcatgcatccgttcatgtcgccgctcggcgtaccttgccaggctccggcctggggctacgtggccggtatcgacctgaccaccaacaaggtggtgtggaagcacaagaacggcaccagccgtgacagctcgccaatcccgatcggcctgccgatgggcgtgccgagcatgggcggctccatggttaccggtggtggcgtgggcttcctcagcggcaccctggaccagtacatccgcgcctatgacgtgaagaacggcaaggagctgtggaagtcccgcctgccagcgggtggccaggccacgccgatgagctacaccggcaaggatggcaagcagtacgtgctggtggtcgtgggcggccacggctccctgggcaccaagatgggcgactacatcattgcctacaaactgtcggaataa

SEQ ID NO: 87 - protein, 806 aa, Pseudomonas fluorescens Pf-5
MSTEGASSPSRLLPSLLGILLLLMGLALLAGGIKLSMLGGSLYYVLAGIGLTLTGLLLLAGKRAALGLYALVLFASTVWSLWEIGLDWWQLVPRLSLWFALGVVLLLPWFRRPLLHDGPAPLGTAALSVAVVLAGGAAIGSQFTNPGEISGDLGRDTADMTSTAPAIPDGEWQAYGRTEFGDRYSPLKQITPANIGKLQEAWRIRTGDMPTDKDPVEITNQNTPLKVNGKLYACTAHSKVLALDPDTGKEIWRFDPQIQGPNGDDFRGWAHMTCRGVSYYDEANFKNADAISQPATLSPAGQAIATSCPRRLFLPTADARLIAINADTGKVCEDFGTKGAVDLKAGIGPFTPGGYYSTSPAAITRNLVIIGGHVTDNESTNEPSGVIRAFDVHDGHLVWNWDSGNPDETTPLPEGKTYTRNSPNMWSLASVDEKLGMVYLPLGNQMPDQWGGNRTAGAEKFSAGTVALDIDTGKLRWNYQFTHHDLWDMDVGSQPTLLDMKTADGVKPALIQPTKQGSLYVLDRRDGTPIVPIREVPAPTGAVEGDHTAPTQARSDLNLLPPPLDEKAMWGATPFDQMLCRIQFKELRYEGQYTPPSVQGSLIYPGNVGVFNWGSVSLDPVRQLLFTSPNYMAFVSKLVPRAEVAAGSKRESETSGVQPNTGAPYAVIMHPFMSPLGVPCQAPAWGYVAGIDLTTNKVVWKHKNGTSRDSSPIPIGLPMGVPSMGGSMVTGGGVGFLSGTLDQYIRAYDVKNGKELWKSRLPAGGQATPMSYTGKDGKQYVLVVVGGHGSLGTKMGDYIIAYKLSE

SEQ ID NO: 88 - DNA, 2376 bp, Pseudomonas fluorescens Pf-5
  CDS (1)..(2376): transl_table=11
atgaaaaacacgggggctgccgccggcagcaaatggttgctcggggggctgggtatcctgattgccctgatcgggctgggcctggccgcaggcgggggttacctcctgagcctgggcggcagtgcctatttcctgttgatgggcctggcgatgctggtgtccgggctgttgatcgcgcggcgcaacccgcgtggtgcctggctgtatggggtggccctggtgctgacggcgatctgggcggtctgggatgcgggcctggaatactggccgctggtctcgcgggtactgaccttcgccgtgatcggcctcgtggtggcgctgatctacccgaccctggtgcgtgcctccggagcccatgccgggcgcggtgcctatggcctggctgggctgttggggatcggtgtggtcgcgaccctggcctacatgttcgtgccgacccatgtggtcaaggcggacaaggtgccagcggtccagccggtggctcccgggacggaacagaaagactgggcccactggggcaataccactgcgggcaatcgcttcgccgcactggaccagatcaacaagggcaacatcgaccagttgcaggtggcctggaccttccgcaccggtgacctgcccgaaagcaacggcgctggtgccgaagaccagaacacacccctgcagatcggcgataccgtctacacctgcaccgcctacggcaaggtgttcgccctggacgccgacaccggcgccgagcgctggaagttcgaccctcagggctacgcgccaaactggcagcgctgccgcggcctggggtatttcgacgcctctgccaccccggtagccgatgcttcggtgcctgctgctccggcggcctgcaccaagcgcctgttcctgccgaccggtgatgcgcgcctgatcgcgatcaacgctgaaaccggcaagccctgtgaagactttggcaaccagggcacggtcgatctgaaaaccgacatgggcgagatcaagccgggctactaccagcagacttcgacaccgttggtggcgggcaccgtggtgatcgtcggcggccgggtggcggacaacttctccaccggcgaaccgccgggcgtggttcgggctttcgatgtgcgcagcggcgagctgatgtgggcctgggacccgggcaacccggccaccaccaagcgcccgccggcgggtgaaacctacacccgtggcacgcccaacgtctggtcggcaatgtcctatgacgccaagctgggcctggtgtacctgcccactggcaacgccaccccggatttcttcggcggccagcgcaccgagttcgacgacaagtggaactcctccatcgtcgccatcgacgtgaagaccggccaggttcgctggcacttccagaccacccatcacgacctctgggacttcgacctgccggcacagccgctgctgtacgacattccggacgacaagggcggtgtgcaaccggcgctggcccaggtcaccaagcagggcgagatattcctgctcaaccgtgagaccggcaagccgattgcccgggtggaagagcgccccgtgccccagggcaatgtgccgggcgagcggtattcgccgacccagccgttctcggtggaaatgccgtcgatcggcaaccagaccctgaccgagtccgacatgtggggcgcgactcccttcgaccagctgatgtgccgtatccagttcaagggcatgcgccatgagggtgtttacaccccgccgggcctggatcatgcgttgcagtttccgggctccctgggcggcatgaactggggcagcgtgtcggtggaccccaccagcaactacatgttcgtcaacgacatgcgcctgggcctggccaactacatgattccccgggaccagatcgccgccggtgccagtggcatcgagatgggcgtggtgccccaggaaggcacgccgttcggcgccatgcgccagcgcttcctctcggcggcgggcattccctgccagaagccgccgttcggcaccatgtcggccatcgacctgaagacccgcaagctggtgtggcaagtgccggtgggtaccgtgcaggacaccggcccgctggggatccgcatgcacctgccgatcccgattggcatgccgaccctgggcgcgtccctggctacccaatccggtctgctgttcttcgccggtacccaggatttctacctgcgggccttcgataccggcaatggcaatgagatctggaaggcgcgcctgcccgtaggcagccagtcgggccccatgacctacgtgtcgcccaagaccggtcgccagtacatcctgctcaccgctggcggtgcgcggcagtcgacggatcgtggcgactacgtgattgcttacgcgttgcccaagaaataa

SEQ ID NO: 89 - protein, 791 aa, Pseudomonas fluorescens Pf-5
MKNTGAAAGSKWLLGGLGILIALIGLGLAAGGGYLLSLGGSAYFLLMGLAMLVSGLLIARRNPRGAWLYGVALVLTAIWAVWDAGLEYWPLVSRVLTFAVIGLVVALIYPTLVRASGAHAGRGAYGLAGLLGIGVVATLAYMFVPTHVVKADKVPAVQPVAPGTEQKDWAHWGNTTAGNRFAALDQINKGNIDQLQVAWTFRTGDLPESNGAGAEDQNTPLQIGDTVYTCTAYGKVFALDADTGAERWKFDPQGYAPNWQRCRGLGYFDASATPVADASVPAAPAACTKRLFLPTGDARLIAINAETGKPCEDFGNQGTVDLKTDMGEIKPGYYQQTSTPLVAGTVVIVGGRVADNFSTGEPPGVVRAFDVRSGELMWAWDPGNPATTKRPPAGETYTRGTPNVWSAMSYDAKLGLVYLPTGNATPDFFGGQRTEFDDKWNSSIVAIDVKTGQVRWHFQTTHHDLWDFDLPAQPLLYDIPDDKGGVQPALAQVTKQGEIFLLNRETGKPIARVEERPVPQGNVPGERYSPTQPFSVEMPSIGNQTLTESDMWGATPFDQLMCRIQFKGMRHEGVYTPPGLDHALQFPGSLGGMNWGSVSVDPTSNYMFVNDMRLGLANYMIPRDQIAAGASGIEMGVVPQEGTPFGAMRQRFLSAAGIPCQKPPFGTMSAIDLKTRKLVWQVPVGTVQDTGPLGIRMHLPIPIGMPTLGASLATQSGLLFFAGTQDFYLRAFDTGNGNEIWKARLPVGSQSGPMTYVSPKTGRQYILLTAGGARQSTDRGDYVIAYALPKK

SEQ ID NO: 90 - DNA, 2535 bp, Psychrobacter arcticus 273-4
  CDS (1)..(2535): transl_table=11
atggaaaaattcgtagcgatcattatggcagtttttgccgcccccttgcttatcggtggcgcttatctgctctctttaggcggtagtccatactatctctttgctggcattgtcatgctagcgacagcatttttattgttcaaaaaacattggagtgcttacgggctctacgctatttttatagtagcgactattgcttgggctctttgggagtccggcttttattggtgggcactggcacctcgtgttggcttcccattgatctttggtctattaatgttattgccgtgggtatctaataagatgcgcgggcagcgcgctcaagtagcgacaagcactgctaatagtgcaataactccaaacacggttaaaaagaatcctctttattattgggggttgctcgctagtgtggttgtaggtgcactcctttcttttgggagcttagcaaacaacgccacggacaagttaggtgaacttgatttaagtgcctctgataaagacacctctacaaatcttggcgattcattatcaactggcgaacaaacaccagatggcgaatggagcgcatatggccgtactgactatggccaacgctactctcctttgactcaaatcaccactgataatgtcaaagatttagagctggcttggcaaattcaaacgggtgatgttaaaggccctaacgatgttggcgagaccacttatcaggcaacgccgttaaaaatcggcaatgcgctgtacttatgtacgcctcataactgggtaatggcactagatgctgactctggtgagacactatggaagtttgatccaaaagtagaaaaaaacctacaacgccaacaccaaacctgtcgaggtgtgtcttactatgctggtcagtctggcacggatagcactcctccagtggctaataatgagacaagcagtaccattagcaatgcagctgtcagcaatcaacccgctgcaaccagcgatatgatagtgcaaaaaattgctggtaatacctttgaaaatgcatctaagcaatgcgatgctaagatatttatcccaacttctgatgccaaactatatgcactcgatccaaatactgggcaacgctgtcaagattttggtgaagatggcgcattagatttgatgcacaatatgccatttacacaggcgggctactactattcgacgtcgcctccgatagtggtaggcaatacgattgttgtggcaggggccgtcaatgacaactatgatgtaaattcaccttctggtgttatccgtgcttatgatgtcaatactggtgagctattgtggaactgggattcaggcgaccctgacaacaccgcgccttttgatgtcaatgatcctactcagacgtacaaaaccagctcgccaaattcatgggcgatcgctagtgctgatgaagagcttggtttggtttacttccctatgggtaaccgcacgccagatcagctgggcagctaccgaaacgctgctgaagaaaaatatgcaacctctgttgtcgcgttagatattaatacaggcgaagcgcgctgggtacagcagtttgtccatcatgatctttgggatatggatacacctgctcagccaacgttgcttgacttagatacagctgatggcgtccaacctgctttggttgtaccgaccaaacaaggtgatgtctatgtcttgaaccgcgcaacaggcgagcctattgtaccaatcaaagaacgtgatgcaccgcaaggctatctcattgcaggtgaacacgccgcacccactcagccttattctggtttgagttttgagccaccaatgttgaaagaaaaagacatgtggggtgccagcctgattgatcagatgatgtgccggattgaatttaaccagcttaattatgatggtcgttatacaccaccatcaacgaatggcagcatagtctatcctggtaactttggtacctttaactggggcggaatcgccgtcgatcctgaaaatggcgtgatgtttggtatgccaacttaccttgcctttacctcaaaactcattcccaaagaaacacttggtgatgttgaaaccaataaaggtgagcaaggtgtgaatgccaatgaaggcgcagattatgcggtagaaatgggaccgtttttatcaccgcttggcgtaccttgtcagcagccaccatggggcacgatagcaggtgctgatttggccacaggcgagattgcttatcaacgcaaaaatggtaccgtacaagacttatctcctattccattaaaattggagttaggtgtccctggtatcggtggacctatcatcactaaaggtggcgtcgcactcttatcagcggcgaccgaaaacaacttccgcgcttatgatttgaaaaatggtgatgtactatggaatgtgcgtattccagcaggtggtcaagccacgcctatgacttacttgaactctaaaggtgagcaaatggtagtattggttgctggtggacatggttcagtgggtacaaccattggtgattatgtcatggcctataagcttgctaagtga

SEQ ID NO: 91 - protein, 844 aa, Psychrobacter arcticus 273-4
MEKFVAIIMAVFAAPLLIGGAYLLSLGGSPYYLFAGIVMLATAFLLFKKHWSAYGLYAIFIVATIAWALWESGFYWWALAPRVGFPLIFGLLMLLPWVSNKMRGQRAQVATSTANSAITPNTVKKNPLYYWGLLASVVVGALLSFGSLANNATDKLGELDLSASDKDTSTNLGDSLSTGEQTPDGEWSAYGRTDYGQRYSPLTQITTDNVKDLELAWQIQTGDVKGPNDVGETTYQATPLKIGNALYLCTPHNWVMALDADSGETLWKFDPKVEKNLQRQHQTCRGVSYYAGQSGTDSTPPVANNETSSTISNAAVSNQPAATSDMIVQKIAGNTFENASKQCDAKIFIPTSDAKLYALDPNTGQRCQDFGEDGALDLMHNMPFTQAGYYYSTSPPIVVGNTIVVAGAVNDNYDVNSPSGVIRAYDVNTGELLWNWDSGDPDNTAPFDVNDPTQTYKTSSPNSWAIASADEELGLVYFPMGNRTPDQLGSYRNAAEEKYATSVVALDINTGEARWVQQFVHHDLWDMDTPAQPTLLDLDTADGVQPALVVPTKQGDVYVLNRATGEPIVPIKERDAPQGYLIAGEHAAPTQPYSGLSFEPPMLKEKDMWGASLIDQMMCRIEFNQLNYDGRYTPPSTNGSIVYPGNFGTFNWGGIAVDPENGVMFGMPTYLAFTSKLIPKETLGDVETNKGEQGVNANEGADYAVEMGPFLSPLGVPCQQPPWGTIAGADLATGEIAYQRKNGTVQDLSPIPLKLELGVPGIGGPIITKGGVALLSAATENNFRAYDLKNGDVLWNVRIPAGGQATPMTYLNSKGEQMVVLVAGGHGSVGTTIGDYVMAYKLAK

SEQ ID NO: 92 - DNA, 2334 bp, Pseudomonas syringae pv. phaseolicola 1448A
  CDS (1)..(2334): transl_table=11
ttgctgctgcttgggctgggagtactgatcgccctgatcgggctcggtctggcaggtggcggcggctatctggtgacattgggcggcagctggttcttcctgctgatgggactggcgatgctggtcagtggtgcgctgatcgccgtgcgcaaacccaaaggtgccgggttgtatggcatcgccctgatactgaccgccgtctgggctatctgggatgcaggcctgcactattggccgctggtgtcccgcctattgacctttgccgtgatcggcctggtgattgcgctgatctacccgacactggttcgcgcttcgggtgctcaggcaggccgcggtgcctatggtctggccggtctgttggccatcggtgttgtggcgaccatcggctacatgttcgttccgagccatgtggtcagcgccagcagcgtgccggctattgtcccggtggcaccgggtgccgagcagaaggactgggcacactggggcaataccccggcaggtaaccggttcgctgctctggatcagatcaacaagagcaacgtcgacaagctgcaggttgcctggaccttccacaccggcgacattccgcagagcacaggtgccggtgcagaagaccagaacaccccgctgcagatcggcgacacggtgtacacctgcaccgcctacggcaaagtattcgcactggatgctgacaccggcactcagcgctggaagttcgacccgcagggcagtgcgcccaactggcagcgctgccgaggcctgggctacttccccgcacccgcagctgcacccgacgcacctgcccagccagccgccgcgtgcgccacacgcgtgtttctgccgactggcgacgctcgcctgatcgcactcgatgccaggaccggcgagacctgcaaggactttggtaatcaaggcgtagtcgatctgaaaaccgacatgggcgaagtcaaggaaggctactaccagcagacctcgacgccgctggtggcgggcaatgtggttgtggtgggcggtcgggttgccgacaacttctccaccggcgaacctccaggcgtggtgcgtgctttcgacgtacacagcggcgagctggtctgggcatgggatccgggtaacccgaataccaacaagcgtccgccagcaggcgaaacctatacgcgtggcacgccgaacgtctggtcggccatgtcctacgatgacaagctcggcctgatctacctgccgaccggtaacgctacacccgacttcttcggcgggacgcgtaccgagcaggacgacaaatggtcctcatcagtcgttgcggtggacgtaaagaccggtcaggtgcgctggaacttccagatgacccaccatgatctatgggacttcgacattccggcgcagccgttgctgtatgacatcccggacggcaagggcggtacgcagccggcattggcgcaagtcaccaagcagggcgagatttttctgctcaaccgcgaaaccggcgtgccgatttcgcgtgtcgaagaacgccctgtgccgcagggcaatgtgccgggcgagcgctattcgccgacccagccgttctcggtggacatgccgtcgattggcaaccagaccctcaaagagtcggacatgtggggtgctacggcgttcgaccagctgatgtgccgcatcgctttcaaaggcatgcgtcacgagggcgtttacacaccgccaggcctggcccctgcgttgcagttccccggctcgctgggcggcatgaactggggcagcgtctcggtcgacccgaccaacaactatatgttcgtcaatgacatgcgcctgggcctggccaactacatgatcccgcgcgacaagatcgccgccggtgccagtggtatcgagatgggcgtcgtgccgcaaaccggcacgccgtttggtgccatgcgccagcgcttcctgtctgccgtcggcataccgtgccaggcaccgccgttcggcaccatgtcggcgattgacctgaaaaccaaaaagctgatgtggcaggttccggtcggcaccgtgaaagacacaggtccgatgggcatccgcatgggcctgccgattccgattggcatgccgacgctgggcgcttcgttgtctacccagtcgggcttgctgttcttcgccggtacccaggacttctacctgcgtgccttcgacagcggcaacggcaacgaagtctggaaggcccgtctgccagtcggcagtcagtccggcccgatgacctacgtgtcgcccaaaaccggcaagcaatacatcctgctcaccgccggcggcgcccgccaatcgccggatcgtggcgattacgtgattgcctacgcgttacccaagtaa

SEQ ID NO: 93 - protein, 777 aa, Pseudomonas syringae pv. phaseolicola 1448A
MLLLGLGVLIALIGLGLAGGGGYLVTLGGSWFFLLMGLAMLVSGALIAVRKPKGAGLYGIALILTAVWAIWDAGLHYWPLVSRLLTFAVIGLVIALIYPTLVRASGAQAGRGAYGLAGLLAIGVVATIGYMFVPSHVVSASSVPAIVPVAPGAEQKDWAHWGNTPAGNRFAALDQINKSNVDKLQVAWTFHTGDIPQSTGAGAEDQNTPLQIGDTVYTCTAYGKVFALDADTGTQRWKFDPQGSAPNWQRCRGLGYFPAPAAAPDAPAQPAAACATRVFLPTGDARLIALDARTGETCKDFGNQGVVDLKTDMGEVKEGYYQQTSTPLVAGNVVVVGGRVADNFSTGEPPGVVRAFDVHSGELVWAWDPGNPNTNKRPPAGETYTRGTPNVWSAMSYDDKLGLIYLPTGNATPDFFGGTRTEQDDKWSSSVVAVDVKTGQVRWNFQMTHHDLWDFDIPAQPLLYDIPDGKGGTQPALAQVTKQGEIFLLNRETGVPISRVEERPVPQGNVPGERYSPTQPFSVDMPSIGNQTLKESDMWGATAFDQLMCRIAFKGMRHEGVYTPPGLAPALQFPGSLGGMNWGSVSVDPTNNYMFVNDMRLGLANYMIPRDKIAAGASGIEMGVVPQTGTPFGAMRQRFLSAVGIPCQAPPFGTMSAIDLKTKKLMWQVPVGTVKDTGPMGIRMGLPIPIGMPTLGASLSTQSGLLFFAGTQDFYLRAFDSGNGNEVWKARLPVGSQSGPMTYVSPKTGKQYILLTAGGARQSPDRGDYVIAYALPK

SEQ ID NO: 94 - DNA, 2418 bp, Pseudomonas syringae pv. phaseolicola 1448A
  CDS (1)..(2418): transl_table=11
atgagcactgacagtgcttcaaatagaaatcgcctgttgccgaccctgctcgggctggtgatcctgttgatggggctggccttgctggtcggtggtgcccgactgctgcaactggatggctcgttgtattacctgttggccggtatcggcttcgccgtgaccggcgtgttgctgatcactggtcgcgcggctgcgctgggcctttatgcactgctgctgttcgcgagcaccgtatggtcgttgtgggaagtcggactcgattggtggcaactggtgccacgcctggcgctgtggttcgcactgggcatcgtcctgctgctgccgtggttccgcaagccactgctgcgcaatggcccggcgcgcctgggcactggcgcattgagcgttgctgtcgtgctggccggtctgaccgcgctggcgagccagttcaccaaccctggccgtatcgaaggccagctggaccgcgaaactgctggcaccaccaacaccgctccggccatgcctgacggcgactggcagtcctacggccgtaccgcattcggcgaccgctactcgcctctggcacagatcaccccggaaaacgtcaacaaactggaaccggcctggaccttccgcactggcgacatccctgggccgaacgacccgggtgaaaccactgccgagaacaccccgctcaaggtcaacggcatgctctacgtgtgtacgccgcacagccaggtgatcgcgcttgatccggattcgggcaaggaaatctggcgcttcgatccgaagctcagcacccagaatgcgaaaaacttcaaaggctgggcgcacatgacctgccgtggcgtcacttatcatgacgacgcagcctatgcagccagcgccccggcacaaagcccggcagcaccggccgcagccagtgccacttcaagtgcctgtccacgcagaatcttcctgccgactgccgacacccgtctgatcgcgctgaacgccgataccggcaagatgtgtgaagatttcggcaacaagggttcggttgacctgaccgccaacatgggcacattcgcgccgggcggctattactccacgtcgccaccggcagtgaccaaagacctggtgatcatcggcggccacgttaccgataacgtctccatggatgaaccgtccggcgtgatacgtacctacgacgtgcacactggccgtctggtctggaactgggacagcggcaacccggaagagactgcgccgattgccgaaggcaagatctacacgcgcaactcgccgaacatgtggtccatgttcagcgtcgatgaaaagctcggcatgatctacctgccgatgggtaaccagacgcctgaccaatggggcggcgatcgtacgccggattccgagaaatacagcgcgggcctggttgcgctggacatcgcgacgggtcgcgtacgttggaattaccagttcacccaccatgacctgtgggacatggacgtgggtggtcaaccgaccctgctggacatgaaaacggctgatggcgtgaagccggcggtattggcatcgaccaagcagggcagcatctacgtgctggaccgcagcaccggtcagcccattgtgccgatcaacgaaataccggttccgcaaggcgctgttgcaggcgatcacacctcgccgacccagcccaagtccgacctgaacttcatgccgccgccgcttaaagagcgcgacatgtggggcgtgacgccatttgaccagatgatgtgccggatcgacttcaagtcgctgcgctacgacggcccgttcacgccgccatcgctgcagggttcgattgtttatccaggtaacttcggtgtgttcgactggggcggtatttccgtcgacccggttcgtcagattgccttcgtcaacccgagctacatggcgttccgttcaaagctggtgcctgctgccgaagtcgaaggcggccctggccgcaagagcgaaaccgaaggcgtgcagccaaacaagggcgcaccttatggcgtgatcctggaagcactgctgtcgccaatggccctgccgtgccaggcaccggcgtggggttacgtggcggcggtcgatctgaccacccacaaaaccatctggatgcacaagaacggtaccgtgcgtgacagttcgccaatcccgatcccgctgaccatgggcgttccaagcctgggtggcccgatcacaacggcgagcggtctggccttcctgagcggtacgcttgaccaatacctgcgcgcctacgatgtacgtaacggcaaacagctgtgggaaggtcgcctgccagcaggcgcccaaaccacaccgatgacctacaccggcaaggacggtcagcaatacgtgctggtcgtggcgggcggtcacggttcactgggcaccaaacagggtgactacgtgatggcattcaaactgccgaagtga

SEQ ID NO: 95 - protein, 805 aa, Pseudomonas syringae pv. phaseolicola 1448A
MSTDSASNRNRLLPTLLGLVILLMGLALLVGGARLLQLDGSLYYLLAGIGFAVTGVLLITGRAAALGLYALLLFASTVWSLWEVGLDWWQLVPRLALWFALGIVLLLPWFRKPLLRNGPARLGTGALSVAVVLAGLTALASQFTNPGRIEGQLDRETAGTTNTAPAMPDGDWQSYGRTAFGDRYSPLAQITPENVNKLEPAWTFRTGDIPGPNDPGETTAENTPLKVNGMLYVCTPHSQVIALDPDSGKEIWRFDPKLSTQNAKNFKGWAHMTCRGVTYHDDAAYAASAPAQSPAAPAAASATSSACPRRIFLPTADTRLIALNADTGKMCEDFGNKGSVDLTANMGTFAPGGYYSTSPPAVTKDLVIIGGHVTDNVSMDEPSGVIRTYDVHTGRLVWNWDSGNPEETAPIAEGKIYTRNSPNMWSMFSVDEKLGMIYLPMGNQTPDQWGGDRTPDSEKYSAGLVALDIATGRVRWNYQFTHHDLWDMDVGGQPTLLDMKTADGVKPAVLASTKQGSIYVLDRSTGQPIVPINEIPVPQGAVAGDHTSPTQPKSDLNFMPPPLKERDMWGVTPFDQMMCRIDFKSLRYDGPFTPPSLQGSIVYPGNFGVFDWGGISVDPVRQIAFVNPSYMAFRSKLVPAAEVEGGPGRKSETEGVQPNKGAPYGVILEALLSPMALPCQAPAWGYVAAVDLTTHKTIWMHKNGTVRDSSPIPIPLTMGVPSLGGPITTASGLAFLSGTLDQYLRAYDVRNGKQLWEGRLPAGAQTTPMTYTGKDGQQYVLVVAGGHGSLGTKQGDYVMAFKLPK

SEQ ID NO: 96 - DNA, 2406 bp, Pseudomonas fluorescens PfO-1
  CDS (1)..(2406): transl_table=11
gtgaagcagagtcaacgcctctcgggcatatcaacattcattctggtcgggctgggcgtgatcatcgccctgctcggcctggcactggccgctggcggtgtgaaattggtcagcctgggaggctcctggtacttcctggtgggtggtctggtgatggccgtttccggtctgctgatcgcgcggcgcaagcctgccggtgcctggctgttcgcggcgtttctggttgggaccgccatctgggccgtgatcgacgcagggctggtgttctggccggtgttctctcgcctgttcatgttcagcgcggtgggtctggtggtcgcgctggtctatccgctgctcaaacgcgccaatggtgacgttgcaggtcgcggtgcttacggcgttgcggctgttctggccgttggactggccgtggctgccggcaacatgttcgtcgcgcacccgaccgtcgcccctaccggcaccggcccgggcctcaccccggtcgagccggaaaaggcgcagaaagactgggcccactacggcaataccgaaggcggcagccgcttcgccgcgctggaccagatcaaccgcagcaacgtcgacaagctgaaagtggcgtggacctaccacaccggcgacatcgccgagagcgatggcaacggtgccgaagaccagctgaccccactgcagattggcaacaaggtgttcatctgcaccccgcacaacaacctgattgcgctggatgccgataccggtaaagagctctggaaaaacgcgatcaacgctcaatccaaagtctggcagcgttgccgtggcatggcgtatttcgacgccagcgccgccgtcgccaaaccggccagcgcgccagtgagcgaaaccccgaccgctccaatcgccaactgcacacgtcgcttgctgaccaacaccatcgacgcccgcctgatcgcggttgatgccgacaccggcgagttctgccggggtttcggcaacaatggccaggtcgatctgaaggccggtctgggtgatgtcccggacagctactatcaactgtcctccgcgccgctgatggccggcaccactgtggtggttggcggtcgtgtggccgacaacgtgcagaccgacatgccgggcggcgtgatccgtggtttcgacgtgatgaccggtgccatgcgctgggcattcgacccgggcaatccaaccgatcgcaaggcacccgcagacggcagcacttatgtgcgcagcacgccgaacagctgggccccgatgtcctacgacccggcgaccaacaccgtattcctgccgatgggcagttcttccaccgacatctatggtgtcgagcgcagcaaactcgatcacacctacggtgcctccgtcctggcgctggacgccaacagcggcgaagaaaagtgggtattccagaccgtgcacaacgacctctgggacttcgacttgccgatgcagccaagcctgatcgacttcaccaaggacggtaaaaccgtaccggcggtggtcatcggcaccaaggccgggcagatttacgtgctcgaccgcgccactggcaaaccgttgaccgacgtaaaggaagtgccggtcaaggccgccaatatccccaacgagccgtactcgccgacccagccgaaatccgtgggcatgccgcaaatcggtgcccagcacttgactgaatcggacatgtggggcgccaccccgtacgaccagctgctgtgccggatcgatttcaagtcgatgcgttacgacggcttgtacaccgcgccgggcactgacaaatccctgagtttcccgggttcgctgggcggcatgaactggggcagcatttccactgacccggtgcacggtttcatcttcgtcaacgacatgcgtctgggcctgtggattcagatgatcccgtcgcagaacaaggctcaggcctcttccggtggcgaagcgctgaacaccggcatgggtgccgtgccgctcaagggcacgccttacgccgtgaacaaaaaccgcttcctgtcggtcgccggcattccgtgccaggccccgccgttcggtacgctgaccgccatcgacatgaaaacccagaaagtcgcctggcaagtgccggtcggcaccgttgaagacaccggtcccttgggcatccgcatgcacctgccgatcaagatcggtctgccaaccctcggcggcacgctgtcgacccagggcggcctgatcttcatcgccggcacccaggacttctacctgcgcgccttcaacagcgccaatggtgaagaaatctggaaagcgcgtctgccggtcggcagtcagggtggcccgatgacctatgtgtcgccgaaaaccggcaagcaatacgtggtcatcaccgccggtggcgctcgccagtcgactgatcgcggtgactacgtgatggcttacgccctgccgtaa

SEQ ID NO: 97 - protein, 801 aa, Pseudomonas fluorescens PfO-1
MKQSQRLSGISTFILVGLGVIIALLGLALAAGGVKLVSLGGSWYFLVGGLVMAVSGLLIARRKPAGAWLFAAFLVGTAIWAVIDAGLVFWPVFSRLFMFSAVGLVVALVYPLLKRANGDVAGRGAYGVAAVLAVGLAVAAGNMFVAHPTVAPTGTGPGLTPVEPEKAQKDWAHYGNTEGGSRFAALDQINRSNVDKLKVAWTYHTGDIAESDGNGAEDQLTPLQIGNKVFICTPHNNLIALDADTGKELWKNAINAQSKVWQRCRGMAYFDASAAVAKPASAPVSETPTAPIANCTRRLLTNTIDARLIAVDADTGEFCRGFGNNGQVDLKAGLGDVPDSYYQLSSAPLMAGTTVVVGGRVADNVQTDMPGGVIRGFDVMTGAMRWAFDPGNPTDRKAPADGSTYVRSTPNSWAPMSYDPATNTVFLPMGSSSTDIYGVERSKLDHTYGASVLALDANSGEEKWVFQTVHNDLWDFDLPMQPSLIDFTKDGKTVPAVVIGTKAGQIYVLDRATGKPLTDVKEVPVKAANIPNEPYSPTQPKSVGMPQIGAQHLTESDMWGATPYDQLLCRIDFKSMRYDGLYTAPGTDKSLSFPGSLGGMNWGSISTDPVHGFIFVNDMRLGLWIQMIPSQNKAQASSGGEALNTGMGAVPLKGTPYAVNKNRFLSVAGIPCQAPPFGTLTAIDMKTQKVAWQVPVGTVEDTGPLGIRMHLPIKIGLPTLGGTLSTQGGLIFIAGTQDFYLRAFNSANGEEIWKARLPVGSQGGPMTYVSPKTGKQYVVITAGGARQSTDRGDYVMAYALP

SEQ ID NO: 98 - DNA, 2412 bp, Pseudomonas fluorescens PfO-1
  CDS (1)..(2412): transl_table=11
atgagcactgaaggtgcttcgagtcgaagccgtcttctgccgaacctgctcggcattctgcttctgctgatgggcctggccatgctggccgggggaatcaagctgagtacgctcggcggctcgctgtattacctgctggccggtatcggcatcacgctgaccggcattctgatgctgatgcgccgtcgcgcagcattgggcctgtacgccatcgtgctgttcgccagcactgtctgggcgctgtgggaagttggtctggactggtggcaactggtgccgcgtctggcgctgtggtttgtcctcggtttcgtgatgctgctgccgtggttccgtcgtccgctgctgctcgcaggccctgcgccgatgggcaccggcggtttgaccgtggctgtgattctggccggcgtcactgccctggccagcctgttcacccacccgggcgaaaccttcggcgaactgggtcgcgacaccgccgacaccaccagcaccgccccgcaaatgccggacggcgactggcaggcctacggccgcaccgaattcggtgaccgctactcgccactgaaacagatcaccccggccaacgtcggcaagctgcaagaagcctggcgcatccagaccggcgacctgccgactgccgacgacccggtcgagctgaccaacgaaaacaccccgctgaaagccaacggcatgctttacgcctgcactgcgcacagcaaagtgctggcactggacccggacaccggcaaggaactatggcgcttcgatccgcagatcaaaagcccggaaggcttcaagggcttcgcccacatgacctgccgtggcgtgtcgtactacgacgaagccgcgtacgccaagtctgaaaacgcggcgtccaccgtgatctccgaggccggcaaagccgtcgcccaggcctgcccgcgtcgcctgtacctgcctaccgccgatgcccgcctgatcgcactgaacgccgacaccggcaagatctgcgaaggcttcggcaccaacggtgtggttgacctgacccagggcatcggcccgttcaccgctggcggttactactccacctctcctgccgcgatcacccgtgatctggtgatcatgggcggtcacgtcaccgacaacgaatcgaccaacgagccgtccggcgtgatccgcgcctacgacgtgcgcgacggccatctggtctggaactgggacagcaacaacccggacgccaccgaacccttggccccgggccagacctacagccgcaactcggccaacatgtggtcgctggccagcgtcgatgaaaaactcggcatggtctatctgccattgggcaaccagacgcctgaccagtggggcggcgatcgcacccccggtgccgagaaattcagcgccggcctggtcgcgctggacctggcgaccggcaaggtgcgctggaactaccagttcacccaccacgacctgtgggacatggacgtcggcagccagccaaccctgctggacatgaaaaccgccgacggcatcaagcctgcgctgatcgccccgaccaagcagggcagcctgtacgtcctcgaccgtcgtgacggcacgccgatcatcccgatccgcgagatcccggtgccgcaaggcgccgtgaaaggcgaccacaccgccccgacccaggcccgttcggacctgaacctgctggccccggaactgaccgaaaaagccatgtggggcgccagcccgttcgaccagatgttgtgccgcatccagttcaaggaactgcgctacgaaggccaatacacgcctccgtcggaacagggcagcctgatctacccgggtaacgtcggcgtgttcaactggggcggtgtttctgtcgacccggttcgccagatgctgttcaccagcccgaactacatggctttcgtctccaagatgatcccacgtgccgacgtacccgccgacagcaagcgcgaaagcgaaacttccggcatccagaaaaacaccggtgcgccgtatgccgtgaccatgcacccgttcatgtcgccactgggcgtaccttgccaggccccggcctggggctacgtcgccggtatcgacctgaccaccggcaaagtcgtctggaaacgcaaaaacggtaccagccgcgacagctcgccaatcccgatcggcttcaccctgggcgtgccaagcatgggcggctcgatcgtcactgccggcggcgtcggcttcctcagcggcacgctggaccagtacctgcgcgcctacgacgtgaacaccggtaaagaactgtggaaatcgcgtctgccggccggcggccaggcgaccccaatgacctacaccggcaaggacggcaagcaatacgtcctgctcgtggtgggtggtcacggctcgctgggcaccaagatgggtgactatgtgattgcctacaaactgccggaataa

SEQ ID NO: 99 - protein, 803 aa, Pseudomonas fluorescens PfO-1
MSTEGASSRSRLLPNLLGILLLLMGLAMLAGGIKLSTLGGSLYYLLAGIGITLTGILMLMRRRAALGLYAIVLFASTVWALWEVGLDWWQLVPRLALWFVLGFVMLLPWFRRPLLLAGPAPMGTGGLTVAVILAGVTALASLFTHPGETFGELGRDTADTTSTAPQMPDGDWQAYGRTEFGDRYSPLKQITPANVGKLQEAWRIQTGDLPTADDPVELTNENTPLKANGMLYACTAHSKVLALDPDTGKELWRFDPQIKSPEGFKGFAHMTCRGVSYYDEAAYAKSENAASTVISEAGKAVAQACPRRLYLPTADARLIALNADTGKICEGFGTNGVVDLTQGIGPFTAGGYYSTSPAAITRDLVIMGGHVTDNESTNEPSGVIRAYDVRDGHLVWNWDSNNPDATEPLAPGQTYSRNSANMWSLASVDEKLGMVYLPLGNQTPDQWGGDRTPGAEKFSAGLVALDLATGKVRWNYQFTHHDLWDMDVGSQPTLLDMKTADGIKPALIAPTKQGSLYVLDRRDGTPIIPIREIPVPQGAVKGDHTAPTQARSDLNLLAPELTEKAMWGASPFDQMLCRIQFKELRYEGQYTPPSEQGSLIYPGNVGVFNWGGVSVDPVRQMLFTSPNYMAFVSKMIPRADVPADSKRESETSGIQKNTGAPYAVTMHPFMSPLGVPCQAPAWGYVAGIDLTTGKVVWKRKNGTSRDSSPIPIGFTLGVPSMGGSIVTAGGVGFLSGTLDQYLRAYDVNTGKELWKSRLPAGGQATPMTYTGKDGKQYVLLVVGGHGSLGTKMGDYVIAYKLPE

SEQ ID NO: 100 - DNA, 2346 bp, Rhodobacter sphaeroides 2.4.1
  CDS (1)..(2346): transl_table=11
ttgaccgctaccctgaccgccatcgtccttgccctcgccgggctgggcctcctcatcccgggcgcctggctggccgttctgggcgggagctggttctacctcgtggccggagccctcatgctgctgacggcatggcaggtgttccgccgctcctcctccgccgaatggatctatggcggcctcatcctcggcgcgctcgtctggtccgtctgggaagtgggcttcgactggtgggaactcattccccgcggcggcatcatcgcgcttctgggcatctggctctacctgcccttcatgcggcggcagctgctgaccgaggacggccgccccgcgcccggcctgcccttggccctgccccttctggcggccatcggggccgccatctggtcatggaccggagacgaagcgggacatgcaggctcgctgccgacggaagtggtcagcgccgagcccgatctcggcccctccgcgcctcccggcgagtggcaccagtacggccgcacgcagtacgggcagcgctacagcccgctcgaacagatcaacatccagaatgtcgccgagctcgagcaggtctggcagtatcagaccggcgatgtgaagctgccgcaggacgtgaccgagaccacctatcaggtcacgccgctgaaggtcgccgaccgtctctacatctgcaccccgcacgatctggccatcgcgctcgatgcggcgaccggcaaggaagcctggcgcttcgacgcgcgctccgggctcgagtccgaccggcagcaccagacctgccgcggcgtgacctactggcgggatccggcacgcgccgagggagagctctgcgccgagcgggtctatctgccgacggccgatgcgcggctgatcgcgctcgacgcaaagtccggcgcggtctgcaccttcttcgccgacgagggtacgctccatctcgagaacgggatgccctacaccccggcaggcttctactattccacctccccgcccgtggcggtcggaggccggatcatcatcggcggcgcggtcaacgacaatttctcggtctattcgcagtcgggcgtgatccgggccttcgatgccaacaccggggcgctcctgtggaactgggacagcgccaaccccgacaagaccgcccccatcgactggatgaacggcgagacctataccgcaaattcgcccaactcctggtcggtcttctcggtcgatgaggaacgcggcctcgtctacatcccgctcggcaaccaggtccccgaccagctgggcttcaaccgctcgcccgccgtcgaggaacattcctcctcggtcgtggcgctcgacgtggcgacgggtcagaaggcctgggtgttccagaccgtgcaccatgacctgtgggacatggacgtgcccgcccagcccgttctgatcgatctcgacatcgacggtcagacggtgcccgcgctcgtgcagccgacgaagcagggcgacatctatgtgctcaaccgcgagacgggcgagccgatcctgcccgtcaccgaagagcccgccccgcaggagggcgctctgcgcgaagagacccctgccccgacgcagcccacctcggcgctgagcttcaaacccgaggcgctgcgcgagaaggacatgtggggcgtcacgctctacgaccagctcgcctgccggatccagtatcaccggttgaactacgagggccgctacacgcccccgtcgctgaacggcaccatcgtctatccgggcaatttcggcaccttcaactggggctccgtcgccgtcgatcccgagcggcaggtgatgttcggcatgcccacctacctgcccttcacgagccagctggttccggccgaggacatcccgccgcccggcgcagatcagaaggccagcgaacagggcctgaaccgcaacgagggcgcgccctacggcgtcatcatggggcccttcctcgggccgctcggcgtgccctgctcggcgccgccgtggggcttcgtcgcgggggcggacctccgcaccggagagatcgcctacatgcaccgcaacggcaccgtgcgcgacatgacgcccctgccgctgcccttcaaggtgggcgtgccggggatcggcgggccgatcgtcacgcgcggcggcgtggccttcctcggagcggcggtcgacgactacctgcgcgcctacgatgtgaccacgggcgatcagctctggcaggcgcggctgcccgcgggcggccagtcgacgccgatgacctacgagcaggacggccggcagttcgtggtgatcgtggcgggcgggcacggctcggtcggcacgaaaccgggcgactatgtgatcgcctacgccctgcccgacggctcggagggttga

SEQ ID NO: 101 - protein, 781 aa, Rhodobacter sphaeroides 2.4.1
MTATLTAIVLALAGLGLLIPGAWLAVLGGSWFYLVAGALMLLTAWQVFRRSSSAEWIYGGLILGALVWSVWEVGFDWWELIPRGGIIALLGIWLYLPFMRRQLLTEDGRPAPGLPLALPLLAAIGAAIWSWTGDEAGHAGSLPTEVVSAEPDLGPSAPPGEWHQYGRTQYGQRYSPLEQINIQNVAELEQVWQYQTGDVKLPQDVTETTYQVTPLKVADRLYICTPHDLAIALDAATGKEAWRFDARSGLESDRQHQTCRGVTYWRDPARAEGELCAERVYLPTADARLIALDAKSGAVCTFFADEGTLHLENGMPYTPAGFYYSTSPPVAVGGRIIIGGAVNDNFSVYSQSGVIRAFDANTGALLWNWDSANPDKTAPIDWMNGETYTANSPNSWSVFSVDEERGLVYIPLGNQVPDQLGFNRSPAVEEHSSSVVALDVATGQKAWVFQTVHHDLWDMDVPAQPVLIDLDIDGQTVPALVQPTKQGDIYVLNRETGEPILPVTEEPAPQEGALREETPAPTQPTSALSFKPEALREKDMWGVTLYDQLACRIQYHRLNYEGRYTPPSLNGTIVYPGNFGTFNWGSVAVDPERQVMFGMPTYLPFTSQLVPAEDIPPPGADQKASEQGLNRNEGAPYGVIMGPFLGPLGVPCSAPPWGFVAGADLRTGEIAYMHRNGTVRDMTPLPLPFKVGVPGIGGPIVTRGGVAFLGAAVDDYLRAYDVTTGDQLWQARLPAGGQSTPMTYEQDGRQFVVIVAGGHGSVGTKPGDYVIAYALPDGSEG

SEQ ID NO: 102 - DNA, 2400 bp, Burkholderia xenovorans LB400
  CDS (1)..(2400): transl_table=11
atgcacagttccgcctcaattcgcgtagcgcatttgcttagcgttctgtttgcctcattgtcgggggtgtacctgctggtcggcgggatctggctagcggcgaccggcggatcgctgtactacgttttcgccggtatcgtcatgctcgttacggcggttctgatttatcggcgttccccactagcactcggcctctacgcattactgctgttgtgcacgatcgtgtggtcgctgtgggaggtcggcacggatttctgggctcttgccccgcgtctggacgtactggtcgtcttcggcatctggctgctgttgccgtatgtctatcgcgcgttcgagccgtccgcaaaaacgcatggtctcgcgctcggggccacgttgatcgtgagcgtcgcagtgctggtttttgcagtcttcaacgacccacaggaaatcaacggcacgctggcgagcgcgcctgcccaggcggcggcgacgcccgccggcgagcgcgtcgccgagggcgactggcccgcctacggccgtacccagcacggtacgcgctactctccgctcaagcagatcaacgcggataacgtcaaggatctgaaggtcgcgtggatattccggaccggcgacatgaagcgctccaccgacccaggtgaaatcacgaacgaagttaccccgatcaaggtgggcgacatgctgtatctgtgctcgccgcaccagatactgttcgcgcttgacgctgccaccggccaggaaaaatggcgcttcgatcccaagctgaagaccgatcccagttttcagcatgtcacgtgccgtggggtgtcgtaccatgattcgaccgcttcgggcagtaacaacgacagcccggaccaggccccggctacggcgcctgcaatctgcgcgcgccgcgtctacctgcctgtcaacaacgggcatctgtacgcgctcgacgcgcagaccggccagctatgcccggacttcgccaatcacggcgacctcgacctgcaagtgggccagcccgtgacgaccgcgggtcaatatgaacccacttcgccgccggtcatcaccgggaaggtgatcgtaatcgcaggctcagtcgaggataactattcgacgcgggagccctcgggagtgatccggggtttcgatgtcaacaccggcaaactgttgtgggcgttcgatccgggcgcgaagaacccggaagcggtgctcggcgcaggccagcattattcggtcaactcgccgaactcctgggcaccggctgtttatgacgcaaagctcgatcttgtctatctgccgatgggcgtaagcacgcccgacatctggggcggctaccgcacgccggagcaggaacgctttgcgagcgggctgctcgcgctcaacgcgacgaccggcaagctcgcctggttttatcagacggtccaccacgacctgtgggacatggacctgccggcgcagccgacgctcgccgatatcacggaccggtcgggcaacctcgtgccggcggtctacgccccggcaaagacgggcaacattttcgttcttgaccgccgcacaggcacgccgatcgttcctgctccggagaagccggttccgcaaggcgcggcgcaaggcgatcacgtgtcgcccacccagccgttttcggcgctgaccttccggccggacaggaaactgaccggcgcggacatgtggggcgcaacgatgtttgaccagctcgtgtgccgagtgatgttccagcgcctgaactatgacggcacgtttacccctccgtcggtgaagggcaccctggtttttccgggtaacctcgggatgttcgagtggggcggcatagcagtggataccgatcgccagatcgcgattgcgaacccgatcgcactgccgttcgtgtccaggttgatgccgcgtgggccgggcaacccgatcgaaccggccgccggcggcacgggcggcagcggtaccgaatccggtatccagccgcagtacggcgtgcccttcggtgtgacgttgaatgccttcatgtcgccgctcggcctgccgtgcaagcagccggcgtggggctacatatccgcggtcgatctgaagaccaaccagattgtctggaaaaagcgcattggcaccgtgcgtgacagttcaccgctgccgctgccgttcaagatggggatgccgatgctcggcggcccgatgacaacggccggcgacgtgttcttcatcggggccaccgccgacaactacatccgcgcgttcgacaccaacaccggcaagcagttgtggcaagcacgtttgcccgcgggtggccaggcgacgccaatgacctacgaggcgaaagggaagcagtacgtggtcatcgcggccggcggccacggctcgttcggcaccaggttgggcgactacgtgatggcttatgcgctgccttga

SEQ ID NO: 103 - protein, 799 aa, Burkholderia xenovorans LB400
MHSSASIRVAHLLSVLFASLSGVYLLVGGIWLAATGGSLYYVFAGIVMLVTAVLIYRRSPLALGLYALLLLCTIVWSLWEVGTDFWALAPRLDVLVVFGIWLLLPYVYRAFEPSAKTHGLALGATLIVSVAVLVFAVFNDPQEINGTLASAPAQAAATPAGERVAEGDWPAYGRTQHGTRYSPLKQINADNVKDLKVAWIFRTGDMKRSTDPGEITNEVTPIKVGDMLYLCSPHQILFALDAATGQEKWRFDPKLKTDPSFQHVTCRGVSYHDSTASGSNNDSPDQAPATAPAICARRVYLPVNNGHLYALDAQTGQLCPDFANHGDLDLQVGQPVTTAGQYEPTSPPVITGKVIVIAGSVEDNYSTREPSGVIRGFDVNTGKLLWAFDPGAKNPEAVLGAGQHYSVNSPNSWAPAVYDAKLDLVYLPMGVSTPDIWGGYRTPEQERFASGLLALNATTGKLAWFYQTVHHDLWDMDLPAQPTLADITDRSGNLVPAVYAPAKTGNIFVLDRRTGTPIVPAPEKPVPQGAAQGDHVSPTQPFSALTFRPDRKLTGADMWGATMFDQLVCRVMFQRLNYDGTFTPPSVKGTLVFPGNLGMFEWGGIAVDTDRQIAIANPIALPFVSRLMPRGPGNPIEPAAGGTGGSGTESGIQPQYGVPFGVTLNAFMSPLGLPCKQPAWGYISAVDLKTNQIVWKKRIGTVRDSSPLPLPFKMGMPMLGGPMTTAGDVFFIGATADNYIRAFDTNTGKQLWQARLPAGGQATPMTYEAKGKQYVVIAAGGHGSFGTRLGDYVMAYALP

SEQ ID NO: 104 - DNA, 2430 bp, Burkholderia xenovorans LB400
  CDS (1)..(2430): transl_table=11
atgtccagacaatcggcatcgccgggtttcatcgccgtcatcacactcctgtttactgcgctaaccgccctctatctgctgataggcggtgcatggctgctctcgctcggcgggtccgcgtattacgtcgtggtcgggttcgtgctgctcggcgtgacctggctgctgtaccgccgcagtccggcggcgctcacactctacgcactcgtgctggtcggcacggcggtctgggcgctgtgggagtcgggtcccgacttctgggcgcttgcgccgcgctccggcgtgctcgtcgtgttcggcgtgtggctgctgctgctcgtgagctggcgcctcgatgcgccgcgcaagctcggcgtaacgtcgctagtcggcgcgctcgtgatctgggccggcgtgctggtctacgcgagcttcaatgatccgcagacgatcaacggcacgctgagctcagtggccgccacgcccgccgccaatcccaacggcatcgatccgtccgactggcccgcctatggccgaacccaggaaggcacgcgctacgcgccgctgcagcagatcacgcccgaaaacgtcaagaacctgcaggtggcctggaccttccgcacaggcgatatgaaaggtccaaacgatccggtcgagatcaccaatgaagtcacgccgatcaagatcggcaatctgctctatctgtgctcgccccaccagatcctgttcgcgctcgatgcgaagaccggcgaacagaaatggaagttcgacccgaaactgcggcccgatccgtcgttccagcacgtgacctgccgcggcgtgtcgtatgtcgatctctcggcaagcgctgcgaccgcgcaacccaacgcgcccgccgcacccgcgagcgacaccgcgccggcggcatcggccgcatcggcggccagcggcgcctgcctgcgccgcatctatctgcccgtcaacgacggccacctctacgcgctcgacgcgcagacaggcgagcgctgcgcgggcttcggcaacaacggcgatctcgaccttcagcacgcgcagccggtcacgacgccgggcatgtacgagccgacttcgccgccgatcgtcacgaacacgacgatcatcgtggcgggcgcggtggaagacaacttctcgacgcgcgagccctcgggcgtgatccgcggcttcgacgtgcgcaccggccagctgcagtgggcgttcgatcccggcgcgcaagacccgaacaggattccgggcgcgggcgagcactacaccatcggttcgccgaactcgtgggcgccctccgcctacgacgcgaagctcgacatcatctatctgccgatgggcgtgaccacgcccgacatctggggcggcaaccgcacacccgagcaggagcgctatgcgagcggcctgctggcgctgcatgcgtcgacgggcaagctggcctggttctaccagaccgcgcaccatgacctgtgggacatggaccagccgtcgcagcccacactggcggacatcaccggcaaggacggcaagaccgtgccggtcgtgtatgcgcccgccaagaccggcaacctgttcgtgctcgatcgccgcaccggcaccccggtcgtacccgcgcccgaaatgccggtgccgcaaggcgccgcgcccggcgatcacgtttcgcccacgcaaccgttctccgatctcacattccgcccgaagaacctgctcaccgacgccgacatgtggggcgcgacgatgtacgaccagctcgtatgccgcgtcatgtttcacaagctgcggtatgaaggcacgttcacgccgccgtcgctgcagggcacgctggtgtttccgggcaacctcggcatgttcgagtggggcggcattgccgtcgacaccgaccggcagatcgccattgccaatccgattgcactgccgttcgtctcgcgcctgatcccacgcggcccaggcaacccgatgcaacccgagccgggcgcaaaaggcagcggcaccgaagcgggcatccagccgcaatacggcgtgccgtacggcgtgacgctgaacgcgttcctctcgccgttgggcttgccgtgcaaacagccggcctggggctacatctcggcggtcgatctgaagaccaacgagatcgtgtggaagaagcgcatcggcacggtgcgcgacagttcgccgattccgctgccgttcagaatgggcatgccgatgctcggcggtccgatcgtgacggcgggcggcgtcgtgttcatcggtgcgacggcggacaactacatccgcgcgttcgacgtgaacaacggcaaggaactgtggcgcgcgcgtctgccggcgggcggccaggccacgccgatgagctattccatcgacggccgccagtacatcgtgatcgccgcgggcgggcacggttcgttcggcaccaaactcggcgattacgtgatggcttacgcgttgccgcagtaa

SEQ ID NO: 105 - protein, 809 aa, Burkholderia xenovorans LB400
MSRQSASPGFIAVITLLFTALTALYLLIGGAWLLSLGGSAYYVVVGFVLLGVTWLLYRRSPAALTLYALVLVGTAVWALWESGPDFWALAPRSGVLVVFGVWLLLLVSWRLDAPRKLGVTSLVGALVIWAGVLVYASFNDPQTINGTLSSVAATPAANPNGIDPSDWPAYGRTQEGTRYAPLQQITPENVKNLQVAWTFRTGDMKGPNDPVEITNEVTPIKIGNLLYLCSPHQILFALDAKTGEQKWKFDPKLRPDPSFQHVTCRGVSYVDLSASAATAQPNAPAAPASDTAPAASAASAASGACLRRIYLPVNDGHLYALDAQTGERCAGFGNNGDLDLQHAQPVTTPGMYEPTSPPIVTNTTIIVAGAVEDNFSTREPSGVIRGFDVRTGQLQWAFDPGAQDPNRIPGAGEHYTIGSPNSWAPSAYDAKLDIIYLPMGVTTPDIWGGNRTPEQERYASGLLALHASTGKLAWFYQTAHHDLWDMDQPSQPTLADITGKDGKTVPVVYAPAKTGNLFVLDRRTGTPVVPAPEMPVPQGAAPGDHVSPTQPFSDLTFRPKNLLTDADMWGATMYDQLVCRVMFHKLRYEGTFTPPSLQGTLVFPGNLGMFEWGGIAVDTDRQIAIANPIALPFVSRLIPRGPGNPMQPEPGAKGSGTEAGIQPQYGVPYGVTLNAFLSPLGLPCKQPAWGYISAVDLKTNEIVWKKRIGTVRDSSPIPLPFRMGMPMLGGPIVTAGGVVFIGATADNYIRAFDVNNGKELWRARLPAGGQATPMSYSIDGRQYIVIAAGGHGSFGTKLGDYVMAYALPQ

SEQ ID NO: 106 - DNA, 2559 bp, Mesorhizobium sp. BNC1
  CDS (1)..(2559): transl_table=11
gtgtttcgtatcatactatcagtaatcattgctgttcttggccttgtcattgccgccggcggcgtttggctcgctgttcttggcggctcctggttctacatcctgcttgggcttcttctcgttctttccggcgctttgcttttgaggcgcagcgcaagcgggcttcttctgtacggcctgaccattcttctcactcttgcctggagtgtttgggaagtgggcttcgactggtgggctttggttccccgcggtgctctcatcctagtcctgggcgttcttttgctactgccgcccatattgcgggccatgcgcgttccagaaggccgacgggcgagctacgggatgaacagcggcgtgcttgcggcctcgatcttcatcgcagccatcgttggcatctattcgatgtttcaacagccgcacgatatcgatggcgcattccccgagcagcggattgccgtgtccccggcgccgcagcaaggcgatgtgccgcctggcgaatgggcagcctatggccgcacctcctttggccagcgctattcaccactggaccagatcacgcctgaaaacgtgtcgcagttggaagtggcatggagctatcagacgggagagatgcgcgatgaaaacgatcccggcgagacgacatatgaggtgacgccgctgatggtgaacaacaccctctatatctgtacgcccttcagcacggtgatcgcgcttgatcctgttactggccaggaaaagtggcgcttcgacccgcaactgagacagccgccgaccgagacaacgcagcatatgacctgccgcggcgtttcgtatcacgaggcagcgccgggggatcttcctgcgaccagccccacggctcaggctgcaccggaaaccgcgccgacgggccaagccggagcaccggatgaaacggcggagatcgcgacgagcgtggatgagataacgacgcaggcagcacctgtgccgcagaacatcgttaccggacaggcagaacccggcgcacttagctttgttgttacgcgcgaagagccgcctgcgcgcgtgacgctcagccagcagtgcatgaagcggctgttcgtgcccacgtcggatgggcggctgatcacgataagtgccgatacgggggagatctgccccggcttcggcggcgacggcacgatcaatctctgggcgaatatgccgaacgttacgcccggctcctactattccacctcgcctcccctgattgccggccggcttgtcatcatcggcggggccgtaaacgataacgaagcgatcacctcgccctccggcgtaatccgggccttcgatctctacaccggcgcacttgtctggaatttcgacagcaagaatcccgaagcgacgcagccgatcgcgccagacggcgtatattcccagaacgcaccaaattcctggagcgtggcgagctacgaccctaatctcggcctcgcctattttccgatgggcaacgaatcgccggaccagttcggcggaaatcggggtgaaaataccgaacgctactcctcctcggttctggcgctgcgggctgacaccggcgaggtggcatgggtgttccagacagtgcatcacgacatctgggactatgacgtgcccgctcagcctgtcctgatcgacctcacggtcgatggacaggcagtgccagcgctggtgcaggccacaaaacaaggcgacatcttcgtgctcaaccgggcaaccggcgagcccattttccctatcgaggagcggccaacgccgcagggcgcggtggagggcgaccggacagcgcccacccagccgcattcagccatttcgttcggcccggcccccctcagagaagccgatatgtggggcgcgacgccgatcgatcagctctattgccgggttcgtttccaccagcttcgctacgaaggccgatacacgccgccttcactccaaggcacaattgtgtatccgggcaatttcggcacgttcaactggggttctgtggctgtggaccccaaccgcgacatcatgtttgcgatgcccgtctatcttgccttcgaggtgaaacaggttcctcggcagaacgagctttcccgggttgtgacacaggagggcgaggcgatcttcaacgagaatttcggtgcaccttacgcggcgcagatggggccgttttattcgccccttcagcttccctgccaaaggccgccttggggctatatcgcagcggtggacctgaccacgggcgaaaccgtttacaagcaagtaaacggcacagtgcgggatctttcgcccattcccctgccgtttgaaatgggcgtgccgggaattggcgggccgatcgttaccgctggcggtgtagcctttctctcgggcacgctcgactattatgtgcgcggctatgacctgcgtaccggcgaggagctgtggcgtgagcggctgcccgccggcggccaagccacgccttccacctatgtgggcgaggatggccggcaatatctggtcgtggtcgccggcggccacggttccaccggcacaaaggcgggcgattcgattatcgcttatgcactgccgcaatag

SEQ ID NO: 107 - protein, 852 aa, Mesorhizobium sp. BNC1
MFRIILSVIIAVLGLVIAAGGVWLAVLGGSWFYILLGLLLVLSGALLLRRSASGLLLYGLTILLTLAWSVWEVGFDWWALVPRGALILVLGVLLLLPPILRAMRVPEGRRASYGMNSGVLAASIFIAAIVGIYSMFQQPHDIDGAFPEQRIAVSPAPQQGDVPPGEWAAYGRTSFGQRYSPLDQITPENVSQLEVAWSYQTGEMRDENDPGETTYEVTPLMVNNTLYICTPFSTVIALDPVTGQEKWRFDPQLRQPPTETTQHMTCRGVSYHEAAPGDLPATSPTAQAAPETAPTGQAGAPDETAEIATSVDEITTQAAPVPQNIVTGQAEPGALSFVVTREEPPARVTLSQQCMKRLFVPTSDGRLITISADTGEICPGFGGDGTINLWANMPNVTPGSYYSTSPPLIAGRLVIIGGAVNDNEAITSPSGVIRAFDLYTGALVWNFDSKNPEATQPIAPDGVYSQNAPNSWSVASYDPNLGLAYFPMGNESPDQFGGNRGENTERYSSSVLALRADTGEVAWVFQTVHHDIWDYDVPAQPVLIDLTVDGQAVPALVQATKQGDIFVLNRATGEPIFPIEERPTPQGAVEGDRTAPTQPHSAISFGPAPLREADMWGATPIDQLYCRVRFHQLRYEGRYTPPSLQGTIVYPGNFGTFNWGSVAVDPNRDIMFAMPVYLAFEVKQVPRQNELSRVVTQEGEAIFNENFGAPYAAQMGPFYSPLQLPCQRPPWGYIAAVDLTTGETVYKQVNGTVRDLSPIPLPFEMGVPGIGGPIVTAGGVAFLSGTLDYYVRGYDLRTGEELWRERLPAGGQATPSTYVGEDGRQYLVVVAGGHGSTGTKAGDSIIAYALPQ

SEQ ID NO: 108 - DNA, 2340 bp, Rhizobium leguminosarum bv. viciae 3841
  CDS (1)..(2340): transl_table=11
atggcgatcatcgtcacctccatcttcttcatcatcgtcggtcttactctcggcggcggtgggctctggcttgtcacgctcggcggcagcgtcttctatctgttcgccgggctgatgttcctgattaccgccgggctgctgttgatgcgcaaggcggtggcgctctgggtctatgcggtgctcgtcgtcgcagcactcgcctgggcgatctgggaggtcggcttcgactggtggcaactcggcccgcgcggcggcatgatcatcctgctcgggctctggctgctgacgccgtggatccgccggccgctcggcctgcgcagcccgacgggcattacctatgccgccaacccgtggccgctcgccgtgcctgtcatcctcgccatcctcgtcgccctttattcgatgacgactgacccgcatgatctcgccggcgaactgccgaaggatacggtcgccgccaatcccgccttcggcggcagcgtaccggatggcgaatggcatcaatacggccgcacgcccttcggccagcgctattcgccgctcgaccagatcaccgccgagaacgtctccaccctcaaggaagcgtggcgataccagaccggcgacgtcaagcggccggacgatgtcggcgagacgacctatcaggtgacgccgctcaaggtgaaggacacgctctatctctgcacgccgcataactgggcgatcgcgctcgacgccaagaccggcaaggagaaatggaaatacgacgccaactccggcatgaaccccgaccggcagcatcagacctgccgcggcgtcacctattatgccgatcctgccgttgccgccggccagccctgcgccgagcgcgtctacctgccgacctccgacgcccggctgatcgcgctcgatgctgcggacgggaaggtctgcaccagctttgccgatcaaggcgtgctgcatttggaaaccggcatgcgctacaacccggccggctattattattccacttcgccgccggtcgcggtggcgggcaagatcatcgtcggtggggcggtcaacgacaattattcgactgaggaacaatccggcgtcatccgcgccttcgacatcaataccggcgccttggtctggaactgggattccggcaatcccgatctgacgacgccgatcaccgagggccagacctacacgaccaactcaccgaacagctggtcagtcttcagcgtcgatgaggcgctcggcatggtctacatcccgctcggcaaccaggtgcccgaccagatcggcatcaaccgcagcgacaatgtcgagaaattttcctcctctatcgtcgcgctcgatatcgccaccggccagttgcgctgggtacgccagacagtgcatcacgatctctgggacatggacgtgccggcccaaccggcgctgatcgatctgacgaagcaggacggcaccgttgttccggccttggtcggcccgaccaagcagggcgatatctatgtgctcgaccggcgcagcggcgagccgatcatcccggtcaaggaaataccagcgccaggcggcgctgtctcgggcgatcatacctcgccgacacagccgatctcggacctcaccttctcgcccgagccgcttcaggaaaaggacatgtggggcgtgtcgctgtttgatcagatggcctgccgcatcgacttccaccgctaccactatgagggccgctatacgccgccttcgctcaaaggcacgatcgtctatcccggcaatttcggcaccttcaactggggctcggtggcggtggatccggagcggcagatcatgttcggcatgccgacctatctcgccttcacctcgcgcctggtaccggccgccgatattccgccgcgaggccaggacgagaagggcagcgaacaggggctcaaccgcaatgacggcgcgccctacggcgtcttcatgggtcccttcctcgggctgcttcaaatcccctgccaggcgccgccatggggctatgtcgccggcgtcgacctgcgcaccggcaagatcgcctatatgcacaagaacggcaccgtgcacgacatgacgccactgcccctgcccttcaaggtcggcgtacccggcatcggcgggccgatgctgaccaagggcggcgttgccttcctgggggccgcggtcgacaactacctgcgcgcctatgacgtgacgagtggccgggagctctggcagggacggcttcccgccggcggccaggcgactccgatgacctacatgactgatgacaacaagcaatatgtcgtcatggtcgccggcggccacggctcggtcggcacgacacccggcgactacgtgatcgcctatacgctgccttga

SEQ ID NO: 109 - protein, 779 aa, Rhizobium leguminosarum bv. viciae 3841
MAIIVTSIFFIIVGLTLGGGGLWLVTLGGSVFYLFAGLMFLITAGLLLMRKAVALWVYAVLVVAALAWAIWEVGFDWWQLGPRGGMIILLGLWLLTPWIRRPLGLRSPTGITYAANPWPLAVPVILAILVALYSMTTDPHDLAGELPKDTVAANPAFGGSVPDGEWHQYGRTPFGQRYSPLDQITAENVSTLKEAWRYQTGDVKRPDDVGETTYQVTPLKVKDTLYLCTPHNWAIALDAKTGKEKWKYDANSGMNPDRQHQTCRGVTYYADPAVAAGQPCAERVYLPTSDARLIALDAADGKVCTSFADQGVLHLETGMRYNPAGYYYSTSPPVAVAGKIIVGGAVNDNYSTEEQSGVIRAFDINTGALVWNWDSGNPDLTTPITEGQTYTTNSPNSWSVFSVDEALGMVYIPLGNQVPDQIGINRSDNVEKFSSSIVALDIATGQLRWVRQTVHHDLWDMDVPAQPALIDLTKQDGTVVPALVGPTKQGDIYVLDRRSGEPIIPVKEIPAPGGAVSGDHTSPTQPISDLTFSPEPLQEKDMWGVSLFDQMACRIDFHRYHYEGRYTPPSLKGTIVYPGNFGTFNWGSVAVDPERQIMFGMPTYLAFTSRLVPAADIPPRGQDEKGSEQGLNRNDGAPYGVFMGPFLGLLQIPCQAPPWGYVAGVDLRTGKIAYMHKNGTVHDMTPLPLPFKVGVPGIGGPMLTKGGVAFLGAAVDNYLRAYDVTSGRELWQGRLPAGGQATPMTYMTDDNKQYVVMVAGGHGSVGTTPGDYVIAYTLP

SEQ ID NO: 110 - DNA, 2319 bp, Rhizobium leguminosarum bv. viciae 3841
  CDS (1)..(2319): transl_table=11
atgaaatttctggccaccctgttctgtattgttctcgcccttatcggattggggctgatcggaggcggcgcctggctgctgcgcctcggcggctcaccctattacgcagccgtcgggcttgcctatctggttgccgcgcttttgctgtggcgccggaagacgcgaggcgcactcatcgtcctgcttgtcgccgttttcacccttccctgggctctatgggagtcgggcctcaatttctgggcgctgtttgcccgcttgatgtcccccatcgcgctggcgggctttgcccttctctttgcaccatcgctttccccgaccgccaaccggaagctcttttatggcggcgctttggtgaccgctctcatctttgccacgggtttcggtctcagcttcgtgccgcatgggatcatccagccctccgccgacatcaccgcctataaaaccgccaagggcgacaactctccctccgactggacatcctatggccgcaccacggcaggagatcgttattccccgttcgatcagatcaaccgcggcaatgtgtccaagctcgatctcgcctggacatatcgcaccggaaaaggcgatggcgccgatcagaacacgcctctgcagatcggcgacacggtctacacctgcacgccgacagatgtgatcgcagcgctcgatgcagataccggcaaacctcgctggactttcgatcccaaggcgacggcgccttattggcaacgctgccgcggcctcggttactacaagatgccgatggaggcccagtccgccgacggtctttgcaatgagcgcctggtgcagacgacgatcgatgcccgtctcctggcgatcgacagcaagaccggcgcgccctgcaaggacttcggagacaatggcaccgtgcagctttcccagggcatgggcgaagtcaagacgggctattatttccagacatcggcgccgctgattgcccgcaacctgatcgtcgtcggaggctgggtcacggacaatcaggaggtcggggaaccctctggcgtcatccgtgcgttcaacgtcgtcaccggcgagctcgaatgggcatgggatctcggcaacccggagatcaccaaacttccgccggagggccagacttatacgcgggccacgcccaacatgtggacgacggccgcattcgacgacaagcttggcctcatctatgcaccgctcggcaataccacgccggattattacggcgtcaatcgccctgccttcgccgatcaatataatgcgacattggtggcactcgatgtaacgacgggtcgggagaaatggaaattccagaccgtccatcacgacatctgggactatgatctgccggcccaaccggtcctggtcgacctgcctgacggtaatggcgtcactgtgcctgctctgctgcagaccaccaaacgcgggcagctttttctcctcgaccgccgaaccggcacaccgcttgccgaagttcaggagaagccggtgccgcagcaaggcggcgtgccggaagagaaactctccccgacgcagccctactccgtcggcatgccgacaattggtgcggagcgcgtgacggagcagacggcctggggcctgacgatattcgatcagctggcatgccgcatcgccttccgcaagatgcgctatgacggcgatttcaccccgatcggcacgcaatatgcgatccagcagccgggaaatctgggtggcctcaattggggaagcgtatccgtcgatctgcccaacaacagggtcttcatgaacgatatccgcgtccccagtctcttcgcactcatcccacgcgaggagtatgtcgactttgccctcaccacgaccgcgcatggcccctcagctccgcagcgcggtacgccttacgccatggccaccgagatgtggacatcaaggctccgcgttccctgcacccaaccacccttcggcaccgtcactgcagtggatctgaagacgcgcaagatcgcgtggcaggttccggcaggcacagccgaagaactcgggccgttcaagatcaaaaccaagctgcctatgccgatgggcctgccgagctatgccggcacttccgcgaccgccggcggcgtcgtctttttcgctggcttccaggactattatatccgcgcctatgatgccgagaacggtacagaactctggaaatatcccctgccggtcggttcgagcgcgacgcccatgacctatgtctctccgaaaacaggcaagcaatatgtcctgatatcggttggcggcgcaccctattcgaaggatgtcggcgactacgtccttgccttctctttgaagaaccgagattag

SEQ ID NO: 111 - protein, 772 aa, Rhizobium leguminosarum bv. viciae 3841
MKFLATLFCIVLALIGLGLIGGGAWLLRLGGSPYYAAVGLAYLVAALLLWRRKTRGALIVLLVAVFTLPWALWESGLNFWALFARLMSPIALAGFALLFAPSLSPTANRKLFYGGALVTALIFATGFGLSFVPHGIIQPSADITAYKTAKGDNSPSDWTSYGRTTAGDRYSPFDQINRGNVSKLDLAWTYRTGKGDGADQNTPLQIGDTVYTCTPTDVIAALDADTGKPRWTFDPKATAPYWQRCRGLGYYKMPMEAQSADGLCNERLVQTTIDARLLAIDSKTGAPCKDFGDNGTVQLSQGMGEVKTGYYFQTSAPLIARNLIVVGGWVTDNQEVGEPSGVIRAFNVVTGELEWAWDLGNPEITKLPPEGQTYTRATPNMWTTAAFDDKLGLIYAPLGNTTPDYYGVNRPAFADQYNATLVALDVTTGREKWKFQTVHHDIWDYDLPAQPVLVDLPDGNGVTVPALLQTTKRGQLFLLDRRTGTPLAEVQEKPVPQQGGVPEEKLSPTQPYSVGMPTIGAERVTEQTAWGLTIFDQLACRIAFRKMRYDGDFTPIGTQYAIQQPGNLGGLNWGSVSVDLPNNRVFMNDIRVPSLFALIPREEYVDFALTTTAHGPSAPQRGTPYAMATEMWTSRLRVPCTQPPFGTVTAVDLKTRKIAWQVPAGTAEELGPFKIKTKLPMPMGLPSYAGTSATAGGVVFFAGFQDYYIRAYDAENGTELWKYPLPVGSSATPMTYVSPKTGKQYVLISVGGAPYSKDVGDYVLAFSLKNRD

SEQ ID NO: 112 - DNA, 2412 bp, Pseudomonas aeruginosa UCBPP-PA14
  CDS (1)..(2412): transl_table=11
atgagcgaaggtaaccacagtcgatcgcgcctgctgccgagcctgctcggcctgttgatcctgctgtccggcctggcgctgctggccggcggcatcaagctggcgagcctgggcggctcgctgtactacctgctggccggcatcggcctggccctgagcgggctgttgctgctgctgggcaagcgtgcggcgctaggcctgtacgccctggtgctgttcgccagcaccgtctgggcgctgtgggaagtcggcctggactggtggcaactggtgccgcgcctggccctgtggttcgtcttcggcctgctgctctggctgccctggttccgtcgtccgctgctggccgaggggccggcgccgctgggcaccgcggcgctgggcgtggcggtggtcctggccggcgccgccgcggtgggcagccagttcaccaatccggggcagatcgtcggtcgcatcgaccgcgacagcggcatgaccagcaccgccccggcgatgccggacggcgactggcaggcctacggccgcaccgagttcggcgaccgctactcgccgttgaagcagatcaccccggccaacgtcggccagctcgaggaagcctggcgcatccgtaccggcgacctgccgaccgccgacgatccgctcgaactgaccaacgagaacaccccgctgaaggtcaacggcatgctctacgcctgcaccgcgcacagcaaggtgctggccctcgacccggacaccggcgcggaaatctggcgcttcgacccgcagatccagagcccggtaggcttcaagggcttcgcccacatgacttgccgtggcgtctcctactacgacgaagagcagtacgccaggagcgacgtcggcgcgccgccggccgcgctctccgaggccggcaaggcggtcgccgccagttgtccgcggcgcctgttcctgcccaccgccgacgcccgcctgatcgcgatcaacgccgacaacggcaaggtctgcgaggacttcggggtcaagggcgcggtcgacctgacggccggcatcggtccgttcaccccgggcggctactactccacctcgccggcggcggtcacccgcaatctggtgatcatcggcggccacgtcaccgacaacgagtcgaccaacgagccgtccggggtgatccgcgccttcgacgtgcacgacggcaagctggtgtggaactgggacagcggcaacccggacgagaccgagcccctggctcccggcaagttctatacccgcaactcgccgaacatgtggtcgctggccagcgtcgacgagaagctcggccaggtctacctgccgctgggcaaccagatgcccgaccagtggggcggcaaccgcacccccggtgccgagaagttcagcgccggcctggtggctctcgacctgaacaccggcaagctgcgctggaactaccagttcacccaccacgacctgtgggacatggacgtcggcagccagccgaccctgctcgacctgaagaccgccgatggcgtcaagccggcgctgatcgcgccgaccaagcagggcagcctgtacgtgctggaccgccgcgacggcacgccgatcgtgccgatccgcgaagtgccggcgccgcagggcgcggtggagggcgaccataccgcgccgacccaggcgcgttccgacctcaacctgctgcgcccgccgctgaccgagcgcgacatgtggggcagcagcccgttcgaccagatgctctgccgcatccagttccgctcgctgcgctacgagggccagtacaccccgccgtcggagcagggcagcctgatctatccgggcaacgtcggggtgttcaactggggcggggtgtcggtcgacccggtgcgccagatcctcttcaccagccccaactacatggccttcgtctcgcagatggtgccgcgcgacaaggtgcccagcggaagcaagcgcgagggcgagaccagcggcgtgcagccgaacaccggcgcgccctacgcggtgatcatgcatccgttcatgtcgcccatcggcctgccgtgccaggcgccgtcctggggtgacgtggcgggtatcgacctgaccaccgccaaggtcgtctggcagcacaagaacggcaccagccgcgacaacaccccggtgccgatcggcctcaccgtcggcgtaccgagcatgggcggctcgatcaccaccgccggcggcgtggccttcctcagcggcacgctcgaccagtacctgcgcgcctacgacgtgaaggacggcaagcagctctggcaggcgcgcctgccggccggcggccaggccacgccgatgagctacaccggcaaggacggtcgccagtacgtgctgatcgtcgctggcggacacggctccttcggcacccgcatgggcgactacatcatcgcctacgccctgcccaggcaatga

SEQ ID NO: 113 - protein, 803 aa, Pseudomonas aeruginosa UCBPP-PA14
MSEGNHSRSRLLPSLLGLLILLSGLALLAGGIKLASLGGSLYYLLAGIGLALSGLLLLLGKRAALGLYALVLFASTVWALWEVGLDWWQLVPRLALWFVFGLLLWLPWFRRPLLAEGPAPLGTAALGVAVVLAGAAAVGSQFTNPGQIVGRIDRDSGMTSTAPAMPDGDWQAYGRTEFGDRYSPLKQITPANVGQLEEAWRIRTGDLPTADDPLELTNENTPLKVNGMLYACTAHSKVLALDPDTGAEIWRFDPQIQSPVGFKGFAHMTCRGVSYYDEEQYARSDVGAPPAALSEAGKAVAASCPRRLFLPTADARLIAINADNGKVCEDFGVKGAVDLTAGIGPFTPGGYYSTSPAAVTRNLVIIGGHVTDNESTNEPSGVIRAFDVHDGKLVWNWDSGNPDETEPLAPGKFYTRNSPNMWSLASVDEKLGQVYLPLGNQMPDQWGGNRTPGAEKFSAGLVALDLNTGKLRWNYQFTHHDLWDMDVGSQPTLLDLKTADGVKPALIAPTKQGSLYVLDRRDGTPIVPIREVPAPQGAVEGDHTAPTQARSDLNLLRPPLTERDMWGSSPFDQMLCRIQFRSLRYEGQYTPPSEQGSLIYPGNVGVFNWGGVSVDPVRQILFTSPNYMAFVSQMVPRDKVPSGSKREGETSGVQPNTGAPYAVIMHPFMSPIGLPCQAPSWGDVAGIDLTTAKVVWQHKNGTSRDNTPVPIGLTVGVPSMGGSITTAGGVAFLSGTLDQYLRAYDVKDGKQLWQARLPAGGQATPMSYTGKDGRQYVLIVAGGHGSFGTRMGDYIIAYALPRQ

SEQ ID NO: 114 - DNA, 2418 bp, Pseudomonas putida GB-1
  CDS (1)..(2418): transl_table=11
atgaaagaaacaccgcgcgcctctggcgccccaaacatcattctgatcggcctgggcgtaatcatcgccctgctcggcctcctcctggctgccggcggcgtcaagctcgccggcctgggcgggtcctggtacttcctgatcggcggcctggccatggccatcgccggtgtactcattgctcgccgcaagctggctggcgcctggctgtatgccgcattcctgatcggcaccgtgatctgggcactgagcgatgtcggcctggtgttctggccgttgttctcgcgcctgttcatgttcggcgcaatcggcatggtggtggcactggtctacccgctgctggcgcgtaccaacggcgccagcgccggtcgcggtgcctacggtatcgccggggtaatggcggtggtgttggtgatcgctgccggcaacatgttcgttgcccacccaagcgtcgcccccaccggcaaaggcccaggcatgaccccggtcgaagccggcaaggaacagaaagactgggcccactacggcaacaccgaaggtggcagccgcttcgccgcgctggaccaaatcaaccgggacaacgtcaacaagctgaaagtggcctggacctaccacaccggtgacgtcgccatcagtgacggcaacggtgccgaagaccagctgacaccgctgcagatcggcaacaaggtgttcatctgcaccccgcacaacaacctgatcgccctcgatgccgacaccggcaaagagctgtggaaaaacgcaatcaacgcccagtccaaggtctggcagcgttgccgtggcatggcctacttcgacgccactgccgccatcgctcagccgacccagccgaacagctcgccgattaccggcggtagcgtagcggcgggtgccaactgccagcgtcgcctgctgaccaacaccatcgatggccgcctgattgccgtcgacgccgacaccggcgagttctgccagggctttggcaacaatggccaggtcaacctgatggccggcctgggcaatgtcccggactcctactaccagctctcctcggcaccgctgatggccggtaccaccgtggtggttggcggccgcgttgccgacaacgtccagaccgacatgccaggtggcgtgatccgtggcttcgacgtgatcaccggtgaaatgcgctgggccttcgacccgggcaacccggaagatcgccaggcaccgcaaggcgacagcacctatgtgcgcagcacgccgaacagctgggcaccgatgtcctacgacccggcgatgaacaccgtgttcctgccgatgggctcgtcgtccaccgacatctacggtgttgagcgcaacaagctggaccacacctacggcgcttcggtgctggccctggacgccactaccggcaaccagaagtgggtataccagaccgtgcacaacgacctctgggacttcgacctgccgatgcagccaagcctgatcgacttcaccaaggatgacggccagtcggtacctgcggtagtgatcggcaccaaggccgggcagatctacgtgctcgaccgcgccaccggtaagccgttgacccaggtcgacgaagtacccgtcaagccaagcaacatcccgaacgagccatactccccaacccagcccaaatcggtaggcatgccgcagatcggcgcacagaccctgaccgagtcggacatgtggggtgccaccccgtatgaccagctgctgtgccgcatcgacttcaagaaaatgcgctacgacggcctgtacaccgcgccgggcaccgacctgtcgctgagcttcccaggttcgctgggtggcatgaactggggcagcatttccaccgacccggtgcatggtttcatcttcgtcaacgacatgcgtctgggcctgtggatccagatgatcccgtcgcagaacaaaggtggcgcggcctctggcggtgaggcactgaacaccggcatgggcgcggtaccactcaagggcacgccgtatgccgtgaacaagaaccgcttcctgtcggtagcgggcattccatgccaggcgccgccgttcggcaccctgaccgccatcgacatgaaaacccgccaggtggcctggcaggtacccgtgggcaccgttgaagacactggcccgctcggcatccgcatgcacctgccgatcaagatcggcctgccaaccctgggcggcaccctgtcgacccaaggcggcctggtgttcattgccggcacccaggacttctacctgcgcgcctatgacagcagcaacggtaacgaaatctggaaagctcgcctgccagtgggcagccagggcggcccgatgacctacgtttcgccgaagaccggcaagcagtacgtggtgatcactgctggcggcgcccgccagtcgactgaccgtggcgactacgtgatttcttacgcgctgccgtaa

SEQ ID NO: 115 - protein, 805 aa, Pseudomonas putida GB-1
MKETPRASGAPNIILIGLGVIIALLGLLLAAGGVKLAGLGGSWYFLIGGLAMAIAGVLIARRKLAGAWLYAAFLIGTVIWALSDVGLVFWPLFSRLFMFGAIGMVVALVYPLLARTNGASAGRGAYGIAGVMAVVLVIAAGNMFVAHPSVAPTGKGPGMTPVEAGKEQKDWAHYGNTEGGSRFAALDQINRDNVNKLKVAWTYHTGDVAISDGNGAEDQLTPLQIGNKVFICTPHNNLIALDADTGKELWKNAINAQSKVWQRCRGMAYFDATAAIAQPTQPNSSPITGGSVAAGANCQRRLLTNTIDGRLIAVDADTGEFCQGFGNNGQVNLMAGLGNVPDSYYQLSSAPLMAGTTVVVGGRVADNVQTDMPGGVIRGFDVITGEMRWAFDPGNPEDRQAPQGDSTYVRSTPNSWAPMSYDPAMNTVFLPMGSSSTDIYGVERNKLDHTYGASVLALDATTGNQKWVYQTVHNDLWDFDLPMQPSLIDFTKDDGQSVPAVVIGTKAGQIYVLDRATGKPLTQVDEVPVKPSNIPNEPYSPTQPKSVGMPQIGAQTLTESDMWGATPYDQLLCRIDFKKMRYDGLYTAPGTDLSLSFPGSLGGMNWGSISTDPVHGFIFVNDMRLGLWIQMIPSQNKGGAASGGEALNTGMGAVPLKGTPYAVNKNRFLSVAGIPCQAPPFGTLTAIDMKTRQVAWQVPVGTVEDTGPLGIRMHLPIKIGLPTLGGTLSTQGGLVFIAGTQDFYLRAYDSSNGNEIWKARLPVGSQGGPMTYVSPKTGKQYVVITAGGARQSTDRGDYVISYALP

SEQ ID NO: 116 - DNA, 2412 bp, Pseudomonas putida GB-1
  CDS (1)..(2412): transl_table=11
atgagcactgaaggtgccaaccaaggaagccgctggctaccgcgcctgattggcgcgctgctgttgctgatgggcctggccctgctggctggcggtatcaagctgagccagctgggcggatcgctgtactacctgatcgccggtatcggttttgccctctcgggcatcctgctgctggcccagcgccgcatcgccctgggcctgtatggcctggtgctgttgggcagcaccgtgtgggccctgctcgaggtaggcctggactggtggcaactggtaccgcgcctggctatctggttcgccatcggcgtggtgctgctgctgccgtgggcacgtcgcccgctgatcggcccagccagcaaagccaatacagcactgctcagcgtggcagtggtcgcttcgggcgcttgcgcgctgggcagccagttcacccaccccggtgaagtgttcggcgaactgggccgcgaaagcagcgaaatggccagcgccgccccggcgatgcccgacggcgaatggcaggcctatggccgcaccgaacatggcgaccgctactcgccactgcgccagatcaccccgcagaacgcctaccgcctggaagaagcctggcgtattcgcaccggcgacctgccgaccgaaaacgacccggtggagctgaccaaccagaacaccccgctgaaggtcaacggcatgctctacgcctgcaccgcgcacagccgcctgctggccctggacccggacaccggcgcggaaatctggcgctacgacccacaggtcaagagcccgaccggcacgttcaagggctttgcccacatgacctgccgtggtgtttcgtactatgacgaaaaccgctacgtcagtcgcgacggcagcccagcgccgaaaattaccgaggccggccaagccgtggcccaggcctgcccgcgccgcctgtacctgcctaccgcagatgcccgcctgatcgccatcaacgccgacaacggcaaggtctgcgaaggcttcgccaaccagggtgtgatcgatctcaccaccggcatcgggccgttcactgccggcggctattactccacctcgcctgccgcggtcacccgtgacctggtgatcatcggtggccacgtcaccgacaacgagtcgaccaacgagccgtccggggtgatccgcgcctacgacgtgcacgatggccacctggtgtggaactgggacagcaacaacccggacgacaccaagccattggctgccggcaaaatgtacagccgcaactcggccaacatgtggtcaatcgccagcgtcgacgaagaccttggcatgatctacctgccgctgggcaaccagaccccggaccagtggggcgccaaccgcactccaggtgccgagaagtacagcgccggcgtagtcgcccttgacctgaccaccggcaaggcgcgctggaactaccagttcacccatcacgacctgtgggacatggacgtcggcagccagccgaccctggtgcacctgaagaccgacgatggcgtgaaaccggcgatcatcgtaccgaccaagcaaggcagcctgtacgtgctcgaccgccgcgacggtacgccgatcgtgccgatccgcgaaatccctaccccacagggtgcggtgaaaggcgaccacacctcgccgactcaagcccgctccgacctcaacctgctcggcccagagctgaccgaacaggccatgtggggcgctacgccgttcgaccagatgctgtgccgcatccagttccgcgaactgcgctacgaaggccagtacaccccgccatccgaacagggttcgctgatttatccgggcaacgtgggtgtattcaactggggcagcgtgtcggtcgacccggtgcgccagttgctgttcacctcgcccaactacatggcattcgtgtcgaagatggtcccccgcgagcaggtagccgaaggcagcaagcgcgaaagcgagaccagcggcgtgcagcccaataccggcgcgccgtacgcggtgaccatgcacccgttcatgtcgccgctgggcgtaccgtgccaggccccggcctggggctatgtcgccgccatcgacctgttcaccaacaaggtggtgtggaagcacaagaacggcaccacccgcgacagcaccccggtaccgatcggcctgccggttggcgtgccgagcatgggcggttcgatcgtcactgccggtggcgtcggcttcctcagcggcaccctcgaccagtacctgcgtgcctatgacgtgaacaacggcaaggaactgtggagtgcccgcctgccagcgggtggccaggccactccgatgagctacaccggcaaggatggcaagcagtatgtgctggtgaccgccggcggccatggctcgctgggtaccaaaatgggcgattacatcatcgcttacaaactcgctgagtaa

SEQ ID NO: 117 - protein, 803 aa, Pseudomonas putida GB-1
MSTEGANQGSRWLPRLIGALLLLMGLALLAGGIKLSQLGGSLYYLIAGIGFALSGILLLAQRRIALGLYGLVLLGSTVWALLEVGLDWWQLVPRLAIWFAIGVVLLLPWARRPLIGPASKANTALLSVAVVASGACALGSQFTHPGEVFGELGRESSEMASAAPAMPDGEWQAYGRTEHGDRYSPLRQITPQNAYRLEEAWRIRTGDLPTENDPVELTNQNTPLKVNGMLYACTAHSRLLALDPDTGAEIWRYDPQVKSPTGTFKGFAHMTCRGVSYYDENRYVSRDGSPAPKITEAGQAVAQACPRRLYLPTADARLIAINADNGKVCEGFANQGVIDLTTGIGPFTAGGYYSTSPAAVTRDLVIIGGHVTDNESTNEPSGVIRAYDVHDGHLVWNWDSNNPDDTKPLAAGKMYSRNSANMWSIASVDEDLGMIYLPLGNQTPDQWGANRTPGAEKYSAGVVALDLTTGKARWNYQFTHHDLWDMDVGSQPTLVHLKTDDGVKPAIIVPTKQGSLYVLDRRDGTPIVPIREIPTPQGAVKGDHTSPTQARSDLNLLGPELTEQAMWGATPFDQMLCRIQFRELRYEGQYTPPSEQGSLIYPGNVGVFNWGSVSVDPVRQLLFTSPNYMAFVSKMVPREQVAEGSKRESETSGVQPNTGAPYAVTMHPFMSPLGVPCQAPAWGYVAAIDLFTNKVVWKHKNGTTRDSTPVPIGLPVGVPSMGGSIVTAGGVGFLSGTLDQYLRAYDVNNGKELWSARLPAGGQATPMSYTGKDGKQYVLVTAGGHGSLGTKMGDYIIAYKLAE

SEQ ID NO: 118 - DNA, 2340 bp, Marinobacter sp. ELB17
  CDS (1)..(2340): transl_table=11
atgatcctgctcgcgatattacttgttgtgttcggccttcccatgttggtagggggcgtctggcttattgccctcgggggaagctggtactacgctctggccgggacgacactgatagtgattgccttgctgataaagccccaacgcaccttcgcacagaccctttacgcattactgctggcagccaccgccgtttgggcctattgggaagcagggttcgactggtggcccttagcgtcgaggctgggggttttgctgctgctggccattccgctgctgtttcccggaccggcgggccgtcgacatggcgctatcacgctcgccattgtctggattggagtgggcctgttcaccgttgccagcattccttacgacgcccaccgcatcgagggagagctgaccacagatgctgtgatcccgaatccccggctcggggacgtaccgcagggcgactggctcagttatgggcgtagcaacctcggccagcgctattccccgctggaccagattacaccagaaaatgtccgtgggctggagctggcctggcaataccagaccggcgaccttaagggcccggacgatgtcggcgaaaccacctacgaagccacacctctgaaagtggacaatacgctatatctgtgtactccccataactggctggtggcactggatgcggataccggaaaagaacgctggatctacaacgcccgggtgccttccgagagccagcgccaacaccaaacctgtcgtggcgtgtcctacctccctccaggcacgggcctaggtgatattccggaggtaaaaacccttcagtcaccttccgaaaatcaggccagcagggaatgcgacgcccagcttttcctgccaacctctgatgcccggctgttggctctggacccggttaccggagcccgctgcagcaattttgctgacgacggatcgctgaatctgatgcacaacatgccccacaagcaagatggtttttattactccacctccccgccagtggttgccaacggcgtggtagtcgtcgccggggcggtcaatgacaactacgccatcaactcaccgtctggcgttatccgtgcctacgacgtcaagaccggtgagctggtctggaactgggaccctgcaaacccggaccagacgcaacctattggcgagaacgacacctactccaccagttcacccaacagctgggccgtggccagcgcggacgaggagctcggcctggtctatttccccatgggtaaccgcacgccggaccaattgggtatgtaccgcaccccggaggaagaaatctactcatcttcggtggtcgctctcaagctggataccggacaggtagcctgggtgcagcagtttgttcatcacgacctctgggacatggatactccggctcagcccagcctggtggatattgagactgagcagggcctgcaacctggactggtggtacccaccaaacaaggagatgtgtacgtactcaatcgggaaaccggcgagccactgattcccattacggaacagtcagccccccagggcactattgagggagactatgccgccgcgacccagccagtatctgccctgagctttcggcctccaaccctaaaagcctccgatatgtggggcgccagcgccgttgaccagatgatctgccgtataaggtttcagtctctgcgttacgaaggcatatataccccgccttcggtccagggcacccttgtctacccgggcaatttcggcgtgttcaactggggcggcattgctgttgatccggagcgccaggtaatgtttggcatgccactgtatatggcgttcattcagaggctggtgcccaaagacaataacacccccatgggccctaccaaccagggtgaacagggattgaacgaaaatgcgggggcggaatacgccgtcgaaatgaagcccctgatgtcgcccctgggtattccctgccaacgtccaccctggggctatgtggcgggcgcggacttgcgtaccggtgaaatcgtgtggaagcacaaaaatggcaccgttgaagatatggcacccattccgatacctctggagctgggtgtaccaggcatcggcggccccatcatcacccgcggtggagtggtattccttgcagccaccgtggataactaccttcgtgcctacaacctgacgaatggtgaagaactgtggcgggcacgtctgccggcaggtggtcaggccacccccatgacctatctgaacagccagggtgagcagatggtggtgcaggttgccggtgggcacggctctgttgggaccactattggggactatgtactggcttacaaactgaaataa

SEQ ID NO: 119 - protein, 779 aa, Marinobacter sp. ELB17
MILLAILLVVFGLPMLVGGVWLIALGGSWYYALAGTTLIVIALLIKPQRTFAQTLYALLLAATAVWAYWEAGFDWWPLASRLGVLLLLAIPLLFPGPAGRRHGAITLAIVWIGVGLFTVASIPYDAHRIEGELTTDAVIPNPRLGDVPQGDWLSYGRSNLGQRYSPLDQITPENVRGLELAWQYQTGDLKGPDDVGETTYEATPLKVDNTLYLCTPHNWLVALDADTGKERWIYNARVPSESQRQHQTCRGVSYLPPGTGLGDIPEVKTLQSPSENQASRECDAQLFLPTSDARLLALDPVTGARCSNFADDGSLNLMHNMPHKQDGFYYSTSPPVVANGVVVVAGAVNDNYAINSPSGVIRAYDVKTGELVWNWDPANPDQTQPIGENDTYSTSSPNSWAVASADEELGLVYFPMGNRTPDQLGMYRTPEEEIYSSSVVALKLDTGQVAWVQQFVHHDLWDMDTPAQPSLVDIETEQGLQPGLVVPTKQGDVYVLNRETGEPLIPITEQSAPQGTIEGDYAAATQPVSALSFRPPTLKASDMWGASAVDQMICRIRFQSLRYEGIYTPPSVQGTLVYPGNFGVFNWGGIAVDPERQVMFGMPLYMAFIQRLVPKDNNTPMGPTNQGEQGLNENAGAEYAVEMKPLMSPLGIPCQRPPWGYVAGADLRTGEIVWKHKNGTVEDMAPIPIPLELGVPGIGGPIITRGGVVFLAATVDNYLRAYNLTNGEELWRARLPAGGQATPMTYLNSQGEQMVVQVAGGHGSVGTTIGDYVLAYKLK

SEQ ID NO: 120 - DNA, 2361 bp, Pantoea citrea
  CDS (1)..(2361): transl_table=11
atgtctcgggtctctactatacttcatgggttaacacggatattttcgctattctgtgccgcatggctgctgattggcggcgtgtggctattatctgtcggagggagtgcttactaccttatctgcggtatagccatggcgatattttctatattgttatggaagcgcagaagcagtgcattttacctctattcgcttatcctgattctgtcagccctctgggcatggcgggaggcggggactgacttctggaacctggttccacgtctggatatctggatactgtttggtatctggttgatattgccgttcagttaccggcgttttaacactgccggtaaaaaaccattgctggcaatggtgattggcctcgggattaatgccctgctgctgctgggcgcgtcactgcacgacccacaggaaatcaacggtgtgcttaatgtcagtgataagccgccagccgaatctgcggcgtctgcagcagactggccggcctatggacgtactcaggaaggggtccgttattctccgctgacacaaatcaacgataaaaacgttcaacaattacaggttgcctggcagttccataccggtgaccataaaacagcgaatgacccgggtgagatcactaatgaagtgacaccgctgaaagtcggtaatatgctgtacctctgtacaccgcatcagatactgattgccctggatgctgccagtggcagagagaaatggcgttttgatccgcagctcaaatctgatccgacattccagcatattacctgccggggtgtttcctatcatgaaatcaaatctgttcagggcgactcatcagcgccggccgcctgttcacggcgtattttcctgccggttgatgacggtcgtctgttcgcggttgatgccttaaccggacaacgttgcagtaattttgctaataatggtgaactgaacctgcaacacctgcagccgaacgcttatccgggagggtatgagccaacctcaccgcccatcattactgataaagtggtgatcattgccggttctgtcactgataacttgtctacccgtgaaccatcaggggtcatccgcggtttcgatatcgacagcgggaaactcttatgggtatttgatccgggagcaaaagaccctaatgccgtgcctgctgacgggcagacatttgtggcgaactcaccaaactcctgggcgccggcggcttatgacgcgcagagggatattatttatctgcctatgggggtttcgaccccggatatctggggcggtgccgtaacgcgttgcaggaacgttttgccagcggtttactggctctgcatgcctcaactggcaagctggcatggttttaccagacggtacaccatgcaatcattctgggacatggatttaccctcacagccaaccctggcagatattaccgatgagcagggtaagaccgtgccggtggtctatgtgccggccaaaacgggtaatatttttgttctgaaccgtgacaccggaaaacccgtcgttcctgcccctgaaacaccggtaccgcagggaccggcgaaaggcgaccatctgtctccaacccagcctttttctgagctgactttccgtcctaagaataagctgcagggtagggatatgtggggcgcaaccatgtttgaccagctgatgtgccgggtgatgttccataaactgcgctatgaagggccgtttaccccgccgtctgagcagggtaccctggttttcccaggtgatttcgggatgtttgaatggggcggtatctctgttaacaccgatcagcagtttgcgattgctaatccgatggcgatgccttttatttctaaactgatcccacgcggaccaggcaatcccatagaacccggggctgatggtgccgccggttccggttcagagtccggggtacagcatatgtatggtgtgccttacggagttgaactgaatccgttcctgtcaccgttgggcttaccttgtctgcaaccttcatggggctttgtctcagcgatcaatttacgtaatcaccagatcatctggaaaaaacggattggtactgttcgtgacagtgcgccggtacctctaccctttaaaatgggtgttccaatgttgggcggtccggtgacaacggcaggtaatatcttctttgttgctggcacactggacaactacctgcgggcgtacagtgtccgtgacggcaaactgctgtggcaggctcgtctgccggcaggtggacaagcgacaccaatgacgtatgaggttgatggtaagcaatatgtcgtgattatggccggcggacatggttcttttgggacccggctgggcgattcactgatcgcttataaactaccgtaa

SEQ ID NO: 121 - protein, 786 aa, Pantoea citrea
MSRVSTILHGLTRIFSLFCAAWLLIGGVWLLSVGGSAYYLICGIAMAIFSILLWKRRSSAFYLYSLILILSALWAWREAGTDFWNLVPRLDIWILFGIWLILPFSYRRFNTAGKKPLLAMVIGLGINALLLLGASLHDPQEINGVLNVSDKPPAESAASAADWPAYGRTQEGVRYSPLTQINDKNVQQLQVAWQFHTGDHKTANDPGEITNEVTPLKVGNMLYLCTPHQILIALDAASGREKWRFDPQLKSDPTFQHITCRGVSYHEIKSVQGDSSAPAACSRRIFLPVDDGRLFAVDALTGQRCSNFANNGELNLQHLQPNAYPGGYEPTSPPIITDKVVIIAGSVTDNLSTREPSGVIRGFDIDSGKLLWVFDPGAKDPNAVPADGQTFVANSPNSWAPAAYDAQRDIIYLPMGVSTPDIWGGAVTRCRNVLPAVYWLCMPQLASWHGFTRRYTMQSFWDMDLPSQPTLADITDEQGKTVPVVYVPAKTGNIFVLNRDTGKPVVPAPETPVPQGPAKGDHLSPTQPFSELTFRPKNKLQGRDMWGATMFDQLMCRVMFHKLRYEGPFTPPSEQGTLVFPGDFGMFEWGGISVNTDQQFAIANPMAMPFISKLIPRGPGNPIEPGADGAAGSGSESGVQHMYGVPYGVELNPFLSPLGLPCLQPSWGFVSAINLRNHQIIWKKRIGTVRDSAPVPLPFKMGVPMLGGPVTTAGNIFFVAGTLDNYLRAYSVRDGKLLWQARLPAGGQATPMTYEVDGKQYVVIMAGGHGSFGTRLGDSLIAYKLP

SEQ ID NO: 122 - DNA, 2391 bp, Enterobacter asburiae
  CDS (1)..(2391): transl_table=11
atggcaattaacaatacaggctcgcgacgattactcgtcacgctaacagccctttttgcagcgctttgcgggctgtatctactcattggcggaggctggctggtcgcgattggcggctcctggtactaccctatcgctggccttgtgatgctcggcgtcgcctggatgctgtggcgcagtaaacgcgccgcgctttggctatacgcagccctgctgctcggcaccatgatttggggcgtctgggaagttggtttcgacttctgggcgctgactccgcgcagcgacattctggtcttcttcggcatctggctgatcctgccgtttgtctggcgtcgcctggtcattcctgccagcggcgcagttgccgcactggtggtcgcactgctgattagcggtggtatcctgacctgggccggatttaacgatccgcaggagatcaacggcaccttaagcgccgatgccacacctgctgaagctatctcccccgtagccgatcaggactggcctgcctatggtcgtaatcaggaaggtcaacgcttttcgccgctgaaacaaattaacgccgataacgtccataatctgaaagaagcctgggtgttccgtactggcgatgtgaagcagccgaacgatccgggtgaaatcaccaatgaagtgacgccgattaaagtgggcgacaccctttacctgtgtaccgctcaccagcgcctgtttgcgcttgatgccgccagcggcaaagagaaatggcattacgatcctgagctgaaaaccaacgagtctttccagcacgtaacctgccgtggtgtctcttatcatgaagccaaagcagaaaccgcttcgccggaagtgatggcggattgcccgcgtcgtatcattcttccggtcaatgatggtcgactgattgcgattaacgctgaaaacggcaaactgtgcgaaaccttcgccaataaaggcgtgctcaatctgcaaagcaatatgccagacaccaaaccgggtctgtatgaaccgacttcgccaccgattatcaccgataaaaccatcgtgatggccggttcagttaccgataacttctcaacccgcgaaacgtctggcgtgatccgtggttttgatgtcaacaccggggagctgctgtgggccttcgacccgggcgcgaaagatcctaacgcgatcccatcggatgaacacacctttacctttaactcaccgaactcctgggcaccggcagcgtatgacgcgaagctggacctggtctacctgccgatgggcgtgaccacgccggatatctggggcggtaaccgtacgccggagcaggaacgttacgccagctccatcgtggcgctgaacgcaacgaccggtaaactggcatggagctaccagaccgttcaccacgatctgtgggatatggatatgccgtcccagccgacgctggcggacattaccgttaacggtaaaaccgtaccggtgatttacgccccggcgaaaaccggtaacatcttcgtgcttgatcgtagcaacggtaagctggttgttcctgcgccggaaaaaccggttccgcagggtgcggccaaaggcgactacgtcaccaaaacgcagccgttctctgacctgagcttccgtccgaagaaagatctcagcggtgcagacatgtggggtgccaccatgtttgaccagctggtatgccgcgtgatgttccaccagctgcgctacgaagggattttcacccccccgtcagagcagggtacgctggtcttcccgggtgacctggggatgttcgaatggggtgggatctccgttgaccctaaccgtcaggtcgccatcgctaacccaatggcgctgccgttcgtttcccgcctgatccctcgtggtccgggtaacccaatggagcagccgaaagatgcgaaaggcagcggtaccgaagccggtatccagccgcagtatggcgttccttatggtgtgaccctgaatccgttcctttctccgttcggtctgccgtgtaaacagcctgcctggggttacatctccggtctggatctgaagaccaacaagatcgtctggaagaaacgtattggtacgccacaggacagcatgccgttcccgatgcctgttccagtgcctttcaatatgggtatgccaatgctgggtggcccaatctccaccgccggtaacgtgctgttcatcgcggcaaccgcagataactacctgcgcgcgtacaacatgaccaacggtgagaaactgtggcaaggccgtctgccagccggtggacaggcaacgccgatgacctatgaagtgaatggcaagcagtacgttgtcatctctgcgggtggtcacggttcgtttggcacgaagatgggcgactatattgtggcttatgcgctgccggatgatgtgaagtaa

SEQ ID NO: 123 - protein, 796 aa, Enterobacter asburiae
MAINNTGSRRLLVTLTALFAALCGLYLLIGGGWLVAIGGSWYYPIAGLVMLGVAWMLWRSKRAALWLYAALLLGTMIWGVWEVGFDFWALTPRSDILVFFGIWLILPFVWRRLVIPASGAVAALVVALLISGGILTWAGFNDPQEINGTLSADATPAEAISPVADQDWPAYGRNQEGQRFSPLKQINADNVHNLKEAWVFRTGDVKQPNDPGEITNEVTPIKVGDTLYLCTAHQRLFALDAASGKEKWHYDPELKTNESFQHVTCRGVSYHEAKAETASPEVMADCPRRIILPVNDGRLIAINAENGKLCETFANKGVLNLQSNMPDTKPGLYEPTSPPIITDKTIVMAGSVTDNFSTRETSGVIRGFDVNTGELLWAFDPGAKDPNAIPSDEHTFTFNSPNSWAPAAYDAKLDLVYLPMGVTTPDIWGGNRTPEQERYASSIVALNATTGKLAWSYQTVHHDLWDMDMPSQPTLADITVNGKTVPVIYAPAKTGNIFVLDRSNGKLVVPAPEKPVPQGAAKGDYVTKTQPFSDLSFRPKKDLSGADMWGATMFDQLVCRVMFHQLRYEGIFTPPSEQGTLVFPGDLGMFEWGGISVDPNRQVAIANPMALPFVSRLIPRGPGNPMEQPKDAKGSGTEAGIQPQYGVPYGVTLNPFLSPFGLPCKQPAWGYISGLDLKTNKIVWKKRIGTPQDSMPFPMPVPVPFNMGMPMLGGPISTAGNVLFIAATADNYLRAYNMTNGEKLWQGRLPAGGQATPMTYEVNGKQYVVISAGGHGSFGTKMGDYIVAYALPDDVK

SEQ ID NO: 124 - DNA, 2767 bp, Pantoea citrea
  CDS (263)..(2635): transl_table=11
ctctaaaaattggttttctacaatatgggtatatccatagttaaagtaatattctgaattttgccgcgaatctatggatttttttcataaaattttgcgaacaaatgaacacatttgttggtaccgtgtcatgatttctatgaacaaatgttattgtcaatggatatggatcacaaaaaacgatattaaatacaactaaaaaggactaaccttatgcggctctttacatatctataaagttgttgattctaaggttaattcaatgtcacaggaatccagaggcctgcgcctcatcacactagcaatatcagtgttctgcaccttgtggctgataatcggcggtggctggttactggcaattggcggcagcgcatactatctcatcagcggcatcgttatggcggtgttcactgtaatgttgttaaagaaaagaagctgtgctttttatctttactcactcattctgctgggcacagctatctgggcctggtgcgaatccggccttgatttctgggctctggctccgcgtctcgatatctgggtactgtttggtatctggatgattttgccgtttgtttatcgccaactggcggctcccaaccgtaaagctactgcgctgatggtgattgctatcgtcatcaacctggccatggtcgttggcgcctttttcggcaaagacccgcaggcagtctacggtgacctgaatgttcaggctcctgcaactcagccagtgtctgccggtaaagactggaccgcttatggtggtactcaggccggtgaccgttactcttcattaagtcagattaacgaaagcaatgtcaaaaatctgcaggtggcatggacctaccagtctggtgacgtaaaacgccctgatgatccgggtgagatcactaacgaatcaactccactgaaagtaggtaatctcctttatacctgtacagcgcaccagattctggtcgcgattgatgctgcaacaggtaaagaaaaatggcgttttgaccctaaaatcaaatatgaccctaccttccagcacatgacctgtcgtggtgtttcctatcatgactttaatacggcaacagatcctcagagtgctccggtttctccggcggcctgttcacgtcgtatctatctgccggttaacgatggtcgtctgattgcggtggatgctgaaaatggtcaactgtgtaaagactttggtaataatggtgagctggatctgcagcatcagcagccgaatgctttcccgggcggctatgaaccaacatcacctccggtaattaccgataaagtaattgtgattgccggggccgttaccgataactactcaacccgtgagccgtcaggtgttatccgtggttttgacgtgaaaaccggtaaactgctgtgggcattcgatccgggtgccaaagatccgaacgcaattcctgcggacggtcagcactgttcagcgaactcaccaaactcctgggcaccagctgcttacgatccgaaactggatttggtatatctgccgatgggtgtgaccacgccggatatctggggtggaaaccgtactcctgagcaggaacattatgcgagtggtatcctggcactgaatgccaccacaggtaaagaagcctggttctaccagactgtccaccacgatctgtgggacatggatattccggcgcagccttcactggcagatattaccgataaagacggcaacaaagttcctgtcatctacgttccgaccaaagtaggtaacatctttgttctgaaccgtgcaaccggtcagctggtggtaccggctcctgagcgtgcggtaccgcaaggtgctgctaaaggcgaccatacctctgcgactcagccgttccctgaactgaccttccgtccggaagcgaaactgaccgacagtaagatgtggggcggtacgatgtttgaccagatgatctgtcgtatcatgttcaaacgtctgcattataacgggactttcactccaccttcagagcagggcaccctggtattcccgggtaacctgggtatgtttgaatggggtggtatttcggtcaacagtggtagcgagtttgccattgctaacccaatgcaactgccgtttgtttcaaaactgatcccacgtggtccaaacaacccaatggaaccgggtaaaaacggtgccggtggttccggtggtgaagccggtctgcaacacatgtatggcgtgccttttggtgtggaactgaatccgttcctgtcaccattcggtctgccatgcatggaaccttcatggggctttgtttcagccgttaacctgaaaactaaccagattgtgtggaaaaaacgtattggtactatccgtgacagcggtggcccgattccgttaccaccgattactgtaggtactccgatgctgggtgctcctatcactacagccggtaatatcttctttatcgccgctactctggatgactacatccgtgcctatagtgtgcgtgacggtaaactgctgtggcaggcacgtctgccggcgggtggtcaggcaacaccaatgacctatgaagtagacggtaagcagtatctggtaattgttgccggcggacacggttcgttcggtacgaaaatgggcgattacattattgcttataaattgccttaacaggggcggttccggaagcggtatccagcttccgggttaaccccctggtaatatcaatccccgccggtagccagctaccggcggggttttttttatgttccgagtggggtattcgcttcgggcggggcggaa

SEQ ID NO: 125 - protein, 790 aa, Pantoea citrea
MSQESRGLRLITLAISVFCTLWLIIGGGWLLAIGGSAYYLISGIVMAVFTVMLLKKRSCAFYLYSLILLGTAIWAWCESGLDFWALAPRLDIWVLFGIWMILPFVYRQLAAPNRKATALMVIAIVINLAMVVGAFFGKDPQAVYGDLNVQAPATQPVSAGKDWTAYGGTQAGDRYSSLSQINESNVKNLQVAWTYQSGDVKRPDDPGEITNESTPLKVGNLLYTCTAHQILVAIDAATGKEKWRFDPKIKYDPTFQHMTCRGVSYHDFNTATDPQSAPVSPAACSRRIYLPVNDGRLIAVDAENGQLCKDFGNNGELDLQHQQPNAFPGGYEPTSPPVITDKVIVIAGAVTDNYSTREPSGVIRGFDVKTGKLLWAFDPGAKDPNAIPADGQHCSANSPNSWAPAAYDPKLDLVYLPMGVTTPDIWGGNRTPEQEHYASGILALNATTGKEAWFYQTVHHDLWDMDIPAQPSLADITDKDGNKVPVIYVPTKVGNIFVLNRATGQLVVPAPERAVPQGAAKGDHTSATQPFPELTFRPEAKLTDSKMWGGTMFDQMICRIMFKRLHYNGTFTPPSEQGTLVFPGNLGMFEWGGISVNSGSEFAIANPMQLPFVSKLIPRGPNNPMEPGKNGAGGSGGEAGLQHMYGVPFGVELNPFLSPFGLPCMEPSWGFVSAVNLKTNQIVWKKRIGTIRDSGGPIPLPPITVGTPMLGAPITTAGNIFFIAATLDDYIRAYSVRDGKLLWQARLPAGGQATPMTYEVDGKQYLVIVAGGHGSFGTKMGDYIIAYKLP

SEQ ID NO: 126 - DNA, 2406 bp, Acinetobacter calcoaceticus
  CDS (1)..(2406): transl_table=11
atgaatcaacctacttcaagatcaggtttaacgacttttaccgtaattattattgggttactggcgttattcctgttaattggaggtatttggctcgctacactaggcggttcaatttactacattatagctggagtattactcctcattgttgcatggcaactctacaagcgtgcttctactgctttgtggttttatgctgcattaatgctaggtaccattatctggagtgtctgggaagttggaacagacttttgggcgcttgcaccacgtttagatattttaggtattcttggtttatggttattggttccggctgtaactcgtggaatcaacaaccttggatcaagtaaagttgccttatcttcaactttagcaattgcaatcgtgttgatggtttattctatcttcaatgatccgcaagaaattaatggtgaaatcaaaacacctcaaccagaaacagctcaagccgtgcctggtgttgctgaaagtgattggccagcttatggtcgtactcaagcaggcgtgcgttattctccattgaaacagatcaatgatcaaaacgtaaaagacttgaaagttgcttggactttacgtactggcgatcttaagacagataacgactctggcgaaacgactaatcaggttacaccgattaaaatcggtaataacatgtttatctgtacagctcaccagcagttaattgctattgatcctgctacaggtaaagaaaaatggcgttttgatccgaaacttaaaacggataaatcgttccagcatctaacttgtcgtggtgtgatgtactacgatgcaaacaatacaactgagtttgcaacgagtcttcaaagcaagaaatctagctctacacaatgtccacgtaaggtatttgtaccagtcaacgatggccgtttagtggctgtaaatgctgacactggtaaagcatgtactgactttggtcaaaatggtcaagtgaacttacaagagttcatgccatatgcttatccaggcggttataacccgacatctcctggtatcgtgactggttcaactgttgttattgctggttctgtaacagataactactcaaataaagagccatctggtgtgattcgtggatacgacgttaacactggtaaacttctttgggtatttgacactggcgcagcggatccaaatgcaatgccgggcgaaggtactacttttgttcacaactcaccaaatgcgtgggcacctttagcatacgatgccaaacttgacatcgtttatgtaccaacaggtgtaggtacaccagacatctggggtggtgaccgtaccgagctgaaagagcgttatgcaaactcaatgttagcgattaatgcttctactggtaaattagtgtggaacttccagacaacccatcacgatttatgggatatggatgtaccatcacaaccatctttagctgatatcaaaaacaaagctggccaaactgttcctgcaatctatgtattgacgaaaacaggtaatgcctttgtgcttgatcgccgtaatggtcaaccgattgttcctgtaactgagaaaccagttccacaaacagttaaacgtggaccacaaactaaaggtgagttctattcaaaaactcagccattctctgacttgaacttggcgccacaagataaattgactgataaagacatgtggggtgccactatgcttgatcagctcatgtgtcgtgtatctttcaaacgtctaaattacgatggtatttatacgccaccatctgaaaacggtactttagttttccctggtaacttaggtgtatttgaatggggcggtatgtcagttaaccctgatcgtcaggttgctgtaatgaacccgattggtctgccattcgtcagtcgtttaattcctgctgatccaaaccgtgcacaaactgcaaaaggtgcgggaactgagcagggcgtacaaccgatgtacggcgtaccatatggtgttgaaattagcgcattcttatctccgcttggtttaccttgtaaacaaccggcttggggctatgtagctggcgttgatttgaaaactcatgaagtggtatggaaaaaacgtattggtacaatccgtgacagtttaccgaacttgttccagttgccagctgtgaaaattggtgtgcctggtttaggtggttcaatttctactgccggtaatgtcatgtttgttggtgcaactcaagataactacttacgtgcgtttaacgttactaacggtaagaaactttgggaagcgcgtttaccagcaggtggacaagcaacaccaatgacttatgaaatcaatggtaagcaatatgttgtaatcatggctggtggtcatggttcatttggtacgaaaatgggcgactatttagtggcttatgccttaccagataacaaataa

SEQ ID NO: 127 - protein, 801 aa, Acinetobacter calcoaceticus
MNQPTSRSGLTTFTVIIIGLLALFLLIGGIWLATLGGSIYYIIAGVLLLIVAWQLYKRASTALWFYAALMLGTIIWSVWEVGTDFWALAPRLDILGILGLWLLVPAVTRGINNLGSSKVALSSTLAIAIVLMVYSIFNDPQEINGEIKTPQPETAQAVPGVAESDWPAYGRTQAGVRYSPLKQINDQNVKDLKVAWTLRTGDLKTDNDSGETTNQVTPIKIGNNMFICTAHQQLIAIDPATGKEKWRFDPKLKTDKSFQHLTCRGVMYYDANNTTEFATSLQSKKSSSTQCPRKVFVPVNDGRLVAVNADTGKACTDFGQNGQVNLQEFMPYAYPGGYNPTSPGIVTGSTVVIAGSVTDNYSNKEPSGVIRGYDVNTGKLLWVFDTGAADPNAMPGEGTTFVHNSPNAWAPLAYDAKLDIVYVPTGVGTPDIWGGDRTELKERYANSMLAINASTGKLVWNFQTTHHDLWDMDVPSQPSLADIKNKAGQTVPAIYVLTKTGNAFVLDRRNGQPIVPVTEKPVPQTVKRGPQTKGEFYSKTQPFSDLNLAPQDKLTDKDMWGATMLDQLMCRVSFKRLNYDGIYTPPSENGTLVFPGNLGVFEWGGMSVNPDRQVAVMNPIGLPFVSRLIPADPNRAQTAKGAGTEQGVQPMYGVPYGVEISAFLSPLGLPCKQPAWGYVAGVDLKTHEVVWKKRIGTIRDSLPNLFQLPAVKIGVPGLGGSISTAGNVMFVGATQDNYLRAFNVTNGKKLWEARLPAGGQATPMTYEINGKQYVVIMAGGHGSFGTKMGDYLVAYALPDNK

SEQ ID NO: 128 - DNA, 2427 bp, Gluconobacter oxydans
  CDS (1)..(2427): transl_table=11
atgagcacaacatcccggccagggctctgggccctgattacggccgcggtattcgcgctttgcggcgcgatccttaccgttggcggcgcatgggtcgctgccatcggcggccctctctattatgtcatccttggcctggcacttctcgccacggctttcctctcattcaggcgcaacccggctgccctctacctgttcgcagtcgtcgtcttcggaacggtcatctgggaactcaccgttgtcggtctcgacatctgggccctgatcccgcgctcggacatcgtcatcatcctcggcatctggctgctgttgccgttcgtctcccgccagatcggcggcacgcggacgaccgtcctgccgctcgccggtgccgttggcgttgcggttctggcgctgttcgccagcctcttcaccgacccgcatgacatcagtggcgacctgccgacgcagatcgcaaacgcctcccccgccgacccggacaacgtcccggccagcgagtggcacgcctatggtcgtacgcaggccggtgaccgctggtccccgctgaaccagatcaacgcgtccaacgtcagcaacctcaaggtcgcatggcatatccacaccaaggatatgatgaactccaacgacccgggcgaagcgacgaacgaagcgaccccgatcgagttcaacaacacgctttatatgtgctcgctgcaccagaagctgtttgcggttgatggtgccaccggtaacgtcaagtgggtctacgatccgaagctccagatcaaccctggcttccagcatctgacctgccgtggcgtcagcttccacgaaacgccggccaatgccacggattccgatggcaatcctgctccgacggactgcgccaagcgcatcatcctgccggtcaatgatggccgtctggttgaagtcgatgccgacacgggcaagacctgctccggcttcggcaacaatggcgagatcgatctgcgcgttccgaaccagccttacacgacgcccggccagtacgagccgacgtccccgccggtcatcacggacaagctgatcatcgccaacagcgccatcaccgataacggttcggtcaagcaggcttcgggcgccacgcaggcattcgacgtctacaccggcaagcgtgtctgggtgttcgatgcgtccaacccggacccgaaccagcttccggatgacagccaccctgtcttccacccgaactccccgaactcctggatcgtgtcgtcttacgacaggaacctgaacctcgtgtacatcccgatgggcgtgggtactcccgatcagtggggcggtgaccgcacgaaggattccgagcgtttcgctccgggtatcgttgctctgaacgcagacacgggcaagctcgcctggttctaccagaccgttcatcacgatctgtgggacatggacgttccgtcacagccgagcctcgtggacgtaacgcagaaggacggcacgcttgttccggccatctacgctccgaccaagaccggcgacatcttcgtcctcgaccgtcgtaccggcaaggaaatcgtcccggctccggaaaccccggttccccagggcgccgctccgggcgatcacaccagcccgacccagccgatgtcgcagctgaccctgcgtccgaagaacccgctgaacgactccgatatctggggcggcacgatcttcgaccagatgttctgcagcatctatttccacaccctgcgctacgaaggccccttcacgccgccgtcgctcaagggctcgctcatcttcccgggcgatctgggaatgttcgagtggggtggtctggccgtcgatccgcagcgtcaggtggctttcgccaacccgatctccctgccgttcgtctcccagcttgttccccgtggaccgggcaacccgctctggcctgaaaaggacgccaagggtacgggtggtgaaaccggcctgcagcacaactatggcattccgtatgccgtcaacctgcatccgttcctggatccggtgctgctgccgttcggcatcaagatgccctgccgtacgccgccctggggctatgtcgccggtattgacctgaagaccaacaaggtcgtctggcagcaccgcaacggcaccctgcgtgactcgatgtatggcagctccctgccgatcccgctgccgccgatcaagatcggtgtcccgagcctcggtggcccgctctccacggctggcaacctcggcttcctgacggcgtccatggattactacatccgtgcgtacaacctgacgacgggcaaggtgctgtggcaggaccgtctgccggctggcgcccaggcaacgccgatcacctatgccatcaacggcaagcagtacatcgtgacctatgcaggcggacacaactcgttcccgacccgcatgggcgacgacatcatcgcctacgccctgcccgatcagaaatga

SEQ ID NO: 129 - protein, 808 aa, Gluconobacter oxydans
MSTTSRPGLWALITAAVFALCGAILTVGGAWVAAIGGPLYYVILGLALLATAFLSFRRNPAALYLFAVVVFGTVIWELTVVGLDIWALIPRSDIVIILGIWLLLPFVSRQIGGTRTTVLPLAGAVGVAVLALFASLFTDPHDISGDLPTQIANASPADPDNVPASEWHAYGRTQAGDRWSPLNQINASNVSNLKVAWHIHTKDMMNSNDPGEATNEATPIEFNNTLYMCSLHQKLFAVDGATGNVKWVYDPKLQINPGFQHLTCRGVSFHETPANATDSDGNPAPTDCAKRIILPVNDGRLVEVDADTGKTCSGFGNNGEIDLRVPNQPYTTPGQYEPTSPPVITDKLIIANSAITDNGSVKQASGATQAFDVYTGKRVWVFDASNPDPNQLPDDSHPVFHPNSPNSWIVSSYDRNLNLVYIPMGVGTPDQWGGDRTKDSERFAPGIVALNADTGKLAWFYQTVHHDLWDMDVPSQPSLVDVTQKDGTLVPAIYAPTKTGDIFVLDRRTGKEIVPAPETPVPQGAAPGDHTSPTQPMSQLTLRPKNPLNDSDIWGGTIFDQMFCSIYFHTLRYEGPFTPPSLKGSLIFPGDLGMFEWGGLAVDPQRQVAFANPISLPFVSQLVPRGPGNPLWPEKDAKGTGGETGLQHNYGIPYAVNLHPFLDPVLLPFGIKMPCRTPPWGYVAGIDLKTNKVVWQHRNGTLRDSMYGSSLPIPLPPIKIGVPSLGGPLSTAGNLGFLTASMDYYIRAYNLTTGKVLWQDRLPAGAQATPITYAINGKQYIVTYAGGHNSFPTRMGDDIIAYALPDQK

SEQ ID NO: 130 - DNA, 24 bp, Artificial sequence
  primer
atggcaattaacaatacaggctcg

SEQ ID NO: 131 - DNA, 23 bp, Artificial sequence
  primer
ttacttcacatcatccggcagcg

SEQ ID NO: 132 - protein, 914 aa, Artificial sequence
  consensus sequence
  Variant (3)..(3): Xaa in position 3 is any amino acid
  Variant (5)..(6): Xaa in position 5 to 6 is any amino acid
  Variant (9)..(10): Xaa in position 9 to 10 is any amino acid
  Variant (12)..(14): Xaa in position 12 to 14 is any amino acid
  Variant (18)..(18): Xaa in position 18 is any amino acid
  Variant (21)..(23): Xaa in position 21 to 23 is any amino acid
  Variant (25)..(33): Xaa in position 25 to 33 is any amino acid
  Variant (34)..(43): Xaa in position 34 to 43 is any or no amino acid
  Variant (46)..(54): Xaa in position 46 to 54 is any amino acid
  Variant (56)..(58): Xaa in position 56 to 58 is any amino acid
  Variant (60)..(60): Xaa in position 60 is any amino acid
  Variant (62)..(64): Xaa in position 62 to 64 is any amino acid
  Variant (66)..(66): Xaa in position 66 is any amino acid
  Variant (68)..(69): Xaa in position 68 to 69 is any amino acid
  Variant (71)..(77): Xaa in position 71 to 77 is any amino acid
  Variant (79)..(140): Xaa in position 79 to 140 is any amino acid
  Variant (141)..(174): Xaa in position 141 to 174 is any or no amino acid
  Variant (176)..(177): Xaa in position 176 to 177 is any amino acid
  Variant (180)..(183): Xaa in position 180 to 183 is any amino acid
  Variant (185)..(185): Xaa in position 185 is any amino acid
  Variant (187)..(189): Xaa in position 187 to 189 is any amino acid
  Variant (191)..(191): Xaa in position 191 is any amino acid
  Variant (194)..(196): Xaa in position 194 to 196 is any amino acid
  Variant (199)..(200): Xaa in position 199 to 200 is any amino acid
  Variant (202)..(203): Xaa in position 202 to 203 is any amino acid
  Variant (206)..(208): Xaa in position 206 to 208 is any amino acid
  Variant (212)..(219): Xaa in position 212 to 219 is any amino acid
  Variant (220)..(226): Xaa in position 220 to 226 is any or no amino acid
  Variant (229)..(235): Xaa in position 229 to 235 is any amino acid
  Variant (237)..(237): Xaa in position 237 is any amino acid
  Variant (240)..(240): Xaa in position 240 is any amino acid
  Variant (242)..(245): Xaa in position 242 to 245 is any amino acid
  Variant (249)..(251): Xaa in position 249 to 251 is any amino acid
  Variant (253)..(255): Xaa in position 253 to 255 is any amino acid
  Variant (257)..(258): Xaa in position 257 to 258 is any amino acid
  Variant (261)..(269): Xaa in position 261 to 269 is any amino acid
  Variant (270)..(277): Xaa in position 270 to 277 is any or no amino acid
  Variant (282)..(282): Xaa in position 282 is any amino acid
  Variant (284)..(292): Xaa in position 284 to 292 is any amino acid
  Variant (293)..(365): Xaa in position 293 to 365 is any or no amino acid
  Variant (367)..(368): Xaa in position 367 to 368 is any amino acid
  Variant (370)..(372): Xaa in position 370 to 372 is any amino acid
  Variant (374)..(375): Xaa in position 374 to 375 is any amino acid
  Variant (377)..(377): Xaa in position 377 is any amino acid
  Variant (380)..(380): Xaa in position 380 is any amino acid
  Variant (382)..(383): Xaa in position 382 to 383 is any amino acid
  Variant (385)..(386): Xaa in position 385 to 386 is any amino acid
  Variant (388)..(389): Xaa in position 388 to 389 is any amino acid
  Variant (391)..(392): Xaa in position 391 to 392 is any amino acid
  Variant (394)..(396): Xaa in position 394 to 396 is any amino acid
  Variant (398)..(400): Xaa in position 398 to 400 is any amino acid
  Variant (402)..(410): Xaa in position 402 to 410 is any amino acid
  Variant (411)..(411): Xaa in position 411 is any or no amino acid
  Variant (413)..(413): Xaa in position 413 is any amino acid
  Variant (415)..(416): Xaa in position 415 to 416 is any amino acid
  Variant (419)..(419): Xaa in position 419 is any amino acid
  Variant (421)..(430): Xaa in position 421 to 430 is any amino acid
  Variant (432)..(432): Xaa in position 432 is any amino acid
  Variant (434)..(434): Xaa in position 434 is any amino acid
  Variant (437)..(442): Xaa in position 437 to 442 is any amino acid
  Variant (443)..(443): Xaa in position 443 is any or no amino acid
  Variant (449)..(450): Xaa in position 449 to 450 is any amino acid
  Variant (453)..(454): Xaa in position 453 to 454 is any amino acid
  Variant (456)..(456): Xaa in position 456 is any amino acid
  Variant (458)..(458): Xaa in position 458 is any amino acid
  Variant (460)..(461): Xaa in position 460 to 461 is any amino acid
  Variant (463)..(482): Xaa in position 463 to 482 is any amino acid
  Variant (483)..(485): Xaa in position 483 to 485 is any or no amino acid
  Variant (488)..(488): Xaa in position 488 is any amino acid
  Variant (490)..(494): Xaa in position 490 to 494 is any amino acid
  Variant (496)..(497): Xaa in position 496 to 497 is any amino acid
  Variant (499)..(501): Xaa in position 499 to 501 is any amino acid
  Variant (503)..(503): Xaa in position 503 is any amino acid
  Variant (505)..(505): Xaa in position 505 is any amino acid
  Variant (507)..(509): Xaa in position 507 to 509 is any amino acid
  Variant (512)..(513): Xaa in position 512 to 513 is any amino acid
  Variant (515)..(516): Xaa in position 515 to 516 is any amino acid
  Variant (518)..(529): Xaa in position 518 to 529 is any amino acid
  Variant (530)..(531): Xaa in position 530 to 531 is any or no amino acid
  Variant (534)..(536): Xaa in position 534 to 536 is any amino acid
  Variant (539)..(541): Xaa in position 539 to 541 is any amino acid
  Variant (543)..(544): Xaa in position 543 to 544 is any amino acid
  Variant (546)..(547): Xaa in position 546 to 547 is any amino acid
  Variant (554)..(554): Xaa in position 554 is any amino acid
  Variant (556)..(558): Xaa in position 556 to 558 is any amino acid
  Variant (561)..(561): Xaa in position 561 is any amino acid
  Variant (563)..(563): Xaa in position 563 is any amino acid
  Variant (565)..(568): Xaa in position 565 to 568 is any amino acid
  Variant (569)..(569): Xaa in position 569 is any or no amino acid
  Variant (571)..(572): Xaa in position 571 to 572 is any amino acid
  Variant (573)..(573): Xaa in position 573 is any or no amino acid
  Variant (575)..(580): Xaa in position 575 to 580 is any amino acid
  Variant (582)..(582): Xaa in position 582 is any amino acid
  Variant (584)..(586): Xaa in position 584 to 586 is any amino acid
  Variant (591)..(592): Xaa in position 591 to 592 is any amino acid
  Variant (594)..(600): Xaa in position 594 to 600 is any amino acid
  Variant (602)..(602): Xaa in position 602 is any amino acid
  Variant (604)..(604): Xaa in position 604 is any amino acid
  Variant (606)..(610): Xaa in position 606 to 610 is any amino acid
  Variant (611)..(615): Xaa in position 611 to 615 is any or no amino acid
  Variant (617)..(621): Xaa in position 617 to 621 is any amino acid
  Variant (625)..(625): Xaa in position 625 is any amino acid
  Variant (627)..(634): Xaa in position 627 to 634 is any amino acid
  Variant (635)..(642): Xaa in position 635 to 642 is any or no amino acid
  Variant (644)..(647): Xaa in position 644 to 647 is any amino acid
  Variant (651)..(651): Xaa in position 651 is any amino acid
  Variant (653)..(654): Xaa in position 653 to 654 is any amino acid
  Variant (657)..(658): Xaa in position 657 to 658 is any amino acid
  Variant (661)..(662): Xaa in position 661 to 662 is any amino acid
  Variant (664)..(667): Xaa in position 664 to 667 is any amino acid
  Variant (669)..(669): Xaa in position 669 is any amino acid
  Variant (671)..(672): Xaa in position 671 to 672 is any amino acid
  Variant (673)..(673): Xaa in position 673 is any or no amino acid
  Variant (677)..(684): Xaa in position 677 to 684 is any amino acid
  Variant (685)..(685): Xaa in position 685 is any or no amino acid
  Variant (688)..(689): Xaa in position 688 to 689 is any amino acid
  Variant (691)..(693): Xaa in position 691 to 693 is any amino acid
  Variant (696)..(698): Xaa in position 696 to 698 is any amino acid
  Variant (702)..(720): Xaa in position 702 to 720 is any amino acid
  Variant (722)..(740): Xaa in position 722 to 740 is any amino acid
  Variant (741)..(751): Xaa in position 741 to 751 is any or no amino acid
  Variant (753)..(753): Xaa in position 753 is any amino acid
  Variant (756)..(756): Xaa in position 756 is any amino acid
  Variant (758)..(761): Xaa in position 758 to 761 is any amino acid
  Variant (762)..(763): Xaa in position 762 to 763 is any or no amino acid
  Variant (765)..(765): Xaa in position 765 is any amino acid
  Variant (767)..(768): Xaa in position 767 to 768 is any amino acid
  Variant (769)..(774): Xaa in position 769 to 774 is any or no amino acid
  Variant (776)..(776): Xaa in position 776 is any amino acid
  Variant (779)..(780): Xaa in position 779 to 780 is any amino acid
  Variant (782)..(783): Xaa in position 782 to 783 is any amino acid
  Variant (785)..(789): Xaa in position 785 to 789 is any amino acid
  Variant (792)..(792): Xaa in position 792 is any amino acid
  Variant (794)..(797): Xaa in position 794 to 797 is any amino acid
  Variant (799)..(802): Xaa in position 799 to 802 is any amino acid
  Variant (805)..(806): Xaa in position 805 to 806 is any amino acid
  Variant (808)..(809): Xaa in position 808 to 809 is any amino acid
  Variant (810)..(815): Xaa in position 810 to 815 is any or no amino acid
  Variant (817)..(823): Xaa in position 817 to 823 is any amino acid
  Variant (824)..(827): Xaa in position 824 to 827 is any or no amino acid
  Variant (829)..(829): Xaa in position 829 is any amino acid
  Variant (831)..(832): Xaa in position 831 to 832 is any amino acid
  Variant (835)..(837): Xaa in position 835 to 837 is any amino acid
  Variant (839)..(839): Xaa in position 839 is any amino acid
  Variant (841)..(843): Xaa in position 841 to 843 is any amino acid
  Variant (845)..(849): Xaa in position 845 to 849 is any amino acid
  Variant (851)..(851): Xaa in position 851 is any amino acid
  Variant (853)..(853): Xaa in position 853 is any amino acid
  Variant (856)..(860): Xaa in position 856 to 860 is any amino acid
  Variant (862)..(863): Xaa in position 862 to 863 is any amino acid
  Variant (866)..(867): Xaa in position 866 to 867 is any amino acid
  Variant (873)..(873): Xaa in position 873 is any amino acid
  Variant (875)..(876): Xaa in position 875 to 876 is any amino acid
  Variant (879)..(879): Xaa in position 879 is any amino acid
  Variant (881)..(883): Xaa in position 881 to 883 is any amino acid
  Variant (884)..(885): Xaa in position 884 to 885 is any or no amino acid
  Variant (887)..(887): Xaa in position 887 is any amino acid
  Variant (890)..(893): Xaa in position 890 to 893 is any amino acid
  Variant (898)..(901): Xaa in position 898 to 901 is any amino acid
  Variant (903)..(903): Xaa in position 903 is any amino acid
  Variant (904)..(904): Xaa in position 904 is any or no amino acid
  Variant (908)..(909): Xaa in position 908 to 909 is any amino acid
  Variant (912)..(912): Xaa in position 912 is any amino acid
GLXLXXGGXXLXXXGGSXYYXXXGXXXXXXXXXXXXXXXXXXXLYXXXXXXXXXWXXXEXGXXXWXLXXRXXXXXXXGXXXXXXXXXXXXXXXXXXXXXXXXXXXXXXXXXXXXXXXXXXXXXXXXXXXXXXXXXXXXXXXXXXXXXXXXXXXXXXXXXXXXXXXXXXXXXXXXWXXYGXXXXGXRXXXLXQIXXXNVXXLXXAWXXXTGDXXXXXXXXXXXXXXXTPXXXXXXXYXCTXHXXXXALDXXXGXXXWXXDPXXXXXXXXXXXXXXXXXCRGVXYXXXXXXXXXXXXXXXXXXXXXXXXXXXXXXXXXXXXXXXXXXXXXXXXXXXXXXXXXXXXXXXXXXXXXXXXXXXXXXXXXXCXXRXXXPXXDXRLXAXXAXXGXXCXXFXXXGXXXLXXXXXXXXXXGXYXXTSXPXXXXXXXXXXGXVXDNXXXXXXXSGVIRXXDVXXGXLXWXXDXXXXXXXXXXXXXXXXXXXXXXXPNXWXXXXXDXXLXXXYXPXGXXXPDXXGXXRXXXXXXXXXXXXXXALXXXTGXXXWXXQXXHHDLWDXDXXXQPXLXDXXXXXGXXXPXXXXXXKXGXXXVLDRXXGXXXXXXXEXPXPXXXXXXXXXXGXXXXXTQPXSXXXXXXXXXXXXXXXXLXXXXMWGXTXXDQXXCRXXFXXXXYXGXXXTPPXXXXXXXXXPGXXGXXXWGXXXVDPXXXXXXXXXXXXXXXXXXXPXXXXXXXXXXXXXXXXXXXXXXXXXXXXXXGXPYXVXXXXXXFXSXXXXXXXXGXPCXXPXXGXXXXXDLXTXXXXWXXXXGTXXDXXXXXXXXPXXXXXXXXXXXGXPXXGGXXXTXGXXXFXXXXXDXYXRAXXXXXGXXLWXXRLPAGXQXXPMXYXXXXXGXQYXXXXAGGHXXXXTXXGDYXXAYXLP

SEQ ID NO: 133 - protein, 29 aa, Artificial sequence
  protein pattern
  Variant (4)..(4): Xaa in position 4 is any amino acid
  Variant (5)..(5): Xaa in position 5 is Ser or Thr
  Variant (6)..(7): Xaa in position 6 to 7 is any amino acid
  Variant (10)..(10): Xaa in position 10 is Leu or Met
  Variant (11)..(11): Xaa in position 11 is any amino acid
  Variant (14)..(14): Xaa in position 14 is Ile or Val
  Variant (15)..(15): Xaa in position 15 is any amino acid
  Variant (17)..(20): Xaa in position 17 to 20 is any amino acid
  Variant (22)..(22): Xaa in position 22 is any amino acid
  Variant (24)..(24): Xaa in position 24 is any amino acid
  Variant (25)..(25): Xaa in position 25 is Phe or Tyr
  Variant (27)..(27): Xaa in position 27 is any or no amino acid
  Variant (29)..(29): Xaa in position 29 is Gly, Pro or Ser
MWGXXXXDQXXCRXXFXXXXYXGXXTXPX

SEQ ID NO: 134 - protein, 30 aa, Artificial sequence
  protein pattern
  Variant (3)..(5): Xaa in position 3 to 5 is any amino acid
  Variant (7)..(8): Xaa in position 7 to 8 is any amino acid
  Variant (10)..(10): Xaa in position 10 is any or no amino acid
  Variant (12)..(12): Xaa in position 12 is any or no amino acid
  Variant (14)..(14): Xaa in position 14 is any amino acid
  Variant (16)..(16): Xaa in position 16 is Ala, Ile or Leu
  Variant (19)..(19): Xaa in position 19 is any amino acid
  Variant (21)..(21): Xaa in position 21 is any amino acid
  Variant (22)..(22): Xaa in position 22 is Gly or Pro
  Variant (23)..(23): Xaa in position 23 is any amino acid
  Variant (26)..(26): Xaa in position 26 is any amino acid
  Variant (27)..(27): Xaa in position 27 is Phe or Leu
  Variant (28)..(28): Xaa in position 28 is any amino acid
  Variant (29)..(29): Xaa in position 29 is Asp or His
  Variant (30)..(30): Xaa in position 30 is Phe, Ile, Leu, Met or Val
TGXXXWXXQXTXHXDXWDXDXXXQPXXXXX

SEQ ID NO: 135 - protein, 54 aa, Artificial sequence
  protein pattern
  Variant (2)..(2): Xaa in position 2 is any amino acid
  Variant (4)..(5): Xaa in position 4 to 5 is any amino acid
  Variant (8)..(8): Xaa in position 8 is Pro, Ser or Thr
  Variant (9)..(9): Xaa in position 9 is Phe, Ile, Leu, Met or Val
  Variant (10)..(10): Xaa in position 10 is any amino acid
  Variant (12)..(12): Xaa in position 12 is any amino acid
  Variant (13)..(13): Xaa in position 13 is any or no amino acid
  Variant (15)..(16): Xaa in position 15 to 16 is any amino acid
  Variant (17)..(17): Xaa in position 17 is any or no amino acid
  Variant (19)..(19): Xaa in position 19 is Phe, Ile, Leu, Met or Val
  Variant (20)..(20): Xaa in position 20 is Ala, Gly, Ser or Thr
  Variant (21)..(21): Xaa in position 21 is Ala or Gly
  Variant (22)..(22): Xaa in position 22 is Ala, Ser or Thr
  Variant (23)..(23): Xaa in position 23 is any amino acid
  Variant (25)..(26): Xaa in position 25 to 26 is any amino acid
  Variant (27)..(27): Xaa in position 27 is Phe, Ile, Leu or Val
  Variant (29)..(29): Xaa in position 29 is Ala or Gly
  Variant (30)..(30): Xaa in position 30 is any amino acid
  Variant (31)..(31): Xaa in position 31 is Asp, Asn or Ser
  Variant (32)..(33): Xaa in position 32 to 33 is any amino acid
  Variant (34)..(34): Xaa in position 34 is Asp, Asn, Ser or Thr
  Variant (36)..(37): Xaa in position 36 to 37 is any amino acid
  Variant (38)..(38): Xaa in position 38 is Ile, Leu or Val
  Variant (40)..(40): Xaa in position 40 is any amino acid
  Variant (41)..(41): Xaa in position 41 is Ala, Asp, Glu, Gly or Ser
  Variant (42)..(42): Xaa in position 42 is Lys or Arg
  Variant (45)..(45): Xaa in position 45 is Ala or Val
  Variant (47)..(47): Xaa in position 47 is Ala, Gly or Ser
  Variant (49)..(49): Xaa in position 49 is Ala, Gly, Ser or Thr
  Variant (50)..(50): Xaa in position 50 is Gly, Asn or Thr
  Variant (52)..(52): Xaa in position 52 is any amino acid
  Variant (53)..(53): Xaa in position 53 is Ser, Thr or Val
GXPXXGGXXXTXXGXXXFXXXXXDXXXRXXXXXXGXXXWXXXLPXGXQXXPXXY

SEQ ID NO: 136 - protein, 39 aa, Artificial sequence
  protein pattern
  Variant (2)..(4): Xaa in position 2 to 4 is any amino acid
  Variant (5)..(6): Xaa in position 5 to 6 is any or no amino acid
  Variant (9)..(9): Xaa in position 9 is Ile or Leu
  Variant (10)..(10): Xaa in position 10 is any amino acid
  Variant (11)..(11): Xaa in position 11 is Ala, Ile or Val
  Variant (12)..(12): Xaa in position 12 is any amino acid
  Variant (13)..(13): Xaa in position 13 is Asp, Gly, Asn or Ser
  Variant (14)..(14): Xaa in position 14 is any amino acid
  Variant (15)..(15): Xaa in position 15 is Leu, Met or Val
  Variant (16)..(16): Xaa in position 16 is Phe or Tyr
  Variant (17)..(17): Xaa in position 17 is any amino acid
  Variant (20)..(20): Xaa in position 20 is Ala, Pro or Thr
  Variant (21)..(21): Xaa in position 21 is Phe, His or Tyr
  Variant (22)..(22): Xaa in position 22 is Asp, Gly, Asn, Gln or Ser
  Variant (23)..(23): Xaa in position 23 is any amino acid
  Variant (24)..(24): Xaa in position 24 is Ala, Ile, Leu or Val
  Variant (25)..(25): Xaa in position 25 is Phe, Ile, Leu, Met or Val
  Variant (27)..(27): Xaa in position 27 is Ile, Leu or Val
  Variant (29)..(29): Xaa in position 29 is Ala or Pro
  Variant (30)..(30): Xaa in position 30 is any amino acid
  Variant (31)..(31): Xaa in position 31 is Ser or Thr
  Variant (33)..(33): Xaa in position 33 is any amino acid
  Variant (34)..(34): Xaa in position 34 is Glu, Gln or Thr
  Variant (35)..(35): Xaa in position 35 is any amino acid
  Variant (37)..(38): Xaa in position 37 to 38 is any amino acid
  Variant (39)..(39): Xaa in position 39 is Ala, Asp, Glu or Asn
EXXXXXTPXXXXXXXXXCTXXXXXXAXDXXXGXXXWXXX

SEQ ID NO: 137 - protein, 40 aa, Artificial sequence
  protein pattern
  Variant (2)..(3): Xaa in position 2 to 3 is any or no amino acid
  Variant (5)..(6): Xaa in position 5 to 6 is any amino acid
  Variant (7)..(7): Xaa in position 7 is Trp or Tyr
  Variant (9)..(9): Xaa in position 9 is any amino acid
  Variant (10)..(10): Xaa in position 10 is Asn, Ser or Thr
  Variant (11)..(12): Xaa in position 11 to 12 is any amino acid
  Variant (14)..(14): Xaa in position 14 is any amino acid
  Variant (16)..(16): Xaa in position 16 is Phe or Tyr
  Variant (17)..(17): Xaa in position 17 is Ala or Ser
  Variant (18)..(18): Xaa in position 18 is Ala, Pro or Ser
  Variant (19)..(19): Xaa in position 19 is Phe or Leu
  Variant (20)..(20): Xaa in position 20 is any amino acid
  Variant (22)..(22): Xaa in position 22 is Ile or Val
  Variant (23)..(25): Xaa in position 23 to 25 is any amino acid
  Variant (27)..(27): Xaa in position 27 is Ala, Ile or Val
  Variant (28)..(29): Xaa in position 28 to 29 is any amino acid
  Variant (31)..(32): Xaa in position 31 to 32 is any amino acid
  Variant (35)..(37): Xaa in position 35 to 37 is any amino acid
  Variant (38)..(38): Xaa in position 38 is Ser or Thr
  Variant (40)..(40): Xaa in position 40 is Asp or Lys
DXXWXXXGXXXXGXRXXXXXQXXXXNXXXLXXAWXXXXGX

SEQ ID NO: 138 - protein, 37 aa, Artificial sequence
  protein pattern
  Variant (2)..(2): Xaa in position 2 is any amino acid
  Variant (3)..(3): Xaa in position 3 is any or no amino acid
  Variant (5)..(5): Xaa in position 5 is Ala, Glu, Asn or Thr
  Variant (8)..(8): Xaa in position 8 is any amino acid
  Variant (9)..(9): Xaa in position 9 is Ala, Glu, Gln or Ser
  Variant (10)..(12): Xaa in position 10 to 12 is any amino acid
  Variant (13)..(13): Xaa in position 13 is Pro, Gln or Thr
  Variant (14)..(14): Xaa in position 14 is Gly, Pro or Ser
  Variant (17)..(17): Xaa in position 17 is Ile or Val
  Variant (19)..(19): Xaa in position 19 is Ala, Gly or Thr
  Variant (20)..(20): Xaa in position 20 is Phe or Tyr
  Variant (21)..(21): Xaa in position 21 is Asp or Asn
  Variant (22)..(22): Xaa in position 22 is Ala, Ile, Leu or Val
  Variant (23)..(23): Xaa in position 23 is any amino acid
  Variant (24)..(24): Xaa in position 24 is Asp, Ser or Thr
  Variant (26)..(26): Xaa in position 26 is any amino acid
  Variant (27)..(27): Xaa in position 27 is Leu or Met
  Variant (28)..(28): Xaa in position 28 is any amino acid
  Variant (30)..(30): Xaa in position 30 is any amino acid
  Variant (31)..(31): Xaa in position 31 is Phe or Trp
  Variant (33)..(34): Xaa in position 33 to 34 is any amino acid
  Variant (35)..(35): Xaa in position 35 is Ala or Asn
  Variant (36)..(36): Xaa in position 36 is any amino acid
  Variant (37)..(37): Xaa in position 37 is Ala, Asp, Glu, Asn, Gln or Thr
GXXVXDNXXXXXXXGVXRXXXXXXGXXXWXXDXXXXX

SEQ ID NO: 139 - protein, 29 aa, Artificial sequence
  protein pattern
  Variant (3)..(3): Xaa in position 3 is any or no amino acid
  Variant (5)..(5): Xaa in position 5 is any or no amino acid
  Variant (7)..(7): Xaa in position 7 is Ala, Gly, Pro or Ser
  Variant (8)..(8): Xaa in position 8 is Phe, Trp or Tyr
  Variant (10)..(10): Xaa in position 10 is any amino acid
  Variant (11)..(11): Xaa in position 11 is Ile, Leu, Met or Val
  Variant (12)..(12): Xaa in position 12 is Ala, Ser or Thr
  Variant (13)..(13): Xaa in position 13 is Ala or Gly
  Variant (14)..(14): Xaa in position 14 is Ala, Ile, Leu or Val
  Variant (16)..(16): Xaa in position 16 is Leu or Met
  Variant (17)..(17): Xaa in position 17 is any amino acid
  Variant (18)..(18): Xaa in position 18 is Asn, Ser or Thr
  Variant (19)..(22): Xaa in position 19 to 22 is any amino acid
  Variant (23)..(23): Xaa in position 23 is Trp or Tyr
  Variant (24)..(27): Xaa in position 24 to 27 is any amino acid
PCXQXPXXGXXXXXDXXXXXXXXXXXXGT

SEQ ID NO: 140 - protein, 35 aa, Artificial sequence
  protein pattern
  Variant (2)..(2): Xaa in position 2 is any amino acid
  Variant (3)..(3): Xaa in position 3 is any or no amino acid
  Variant (5)..(5): Xaa in position 5 is any amino acid
  Variant (7)..(9): Xaa in position 7 to 9 is any amino acid
  Variant (10)..(10): Xaa in position 10 is Ala, Ser or Val
  Variant (11)..(11): Xaa in position 11 is any amino acid
  Variant (13)..(15): Xaa in position 13 to 15 is any amino acid
  Variant (16)..(16): Xaa in position 16 is Asp, Gly or Asn
  Variant (17)..(17): Xaa in position 17 is any amino acid
  Variant (18)..(18): Xaa in position 18 is Ile, Leu or Val
  Variant (19)..(19): Xaa in position 19 is Phe or Tyr
  Variant (20)..(20): Xaa in position 20 is Phe, Ile, Leu, Met or Val
  Variant (22)..(22): Xaa in position 22 is any amino acid
  Variant (24)..(24): Xaa in position 24 is Asn, Ser or Val
  Variant (25)..(26): Xaa in position 25 to 26 is any amino acid
  Variant (27)..(27): Xaa in position 27 is Gly, Pro, Thr or Val
  Variant (29)..(30): Xaa in position 29 to 30 is any amino acid
  Variant (32)..(33): Xaa in position 32 to 33 is any amino acid
  Variant (35)..(35): Xaa in position 35 is Asn, Ser or Thr
SXXNXWXXXXXDXXXXXXXXPXGXXXXDXXGXXRX

SEQ ID NO: 141 - protein, 35 aa, Artificial sequence
  protein pattern
  Variant (3)..(4): Xaa in position 3 to 4 is any amino acid
  Variant (6)..(7): Xaa in position 6 to 7 is any amino acid
  Variant (8)..(8): Xaa in position 8 is Asp, Glu or Asn
  Variant (11)..(11): Xaa in position 11 is Gly or Ser
  Variant (12)..(12): Xaa in position 12 is Ile, Leu, Met or Val
  Variant (13)..(13): Xaa in position 13 is Ala or Ser
  Variant (15)..(15): Xaa in position 15 is Asp or Asn
  Variant (16)..(17): Xaa in position 16 to 17 is any amino acid
  Variant (18)..(18): Xaa in position 18 is Asn, Gln, Arg or Ser
  Variant (19)..(19): Xaa in position 19 is Asp, Glu, Gly, Asn, Gln or Ser
  Variant (20)..(21): Xaa in position 20 to 21 is any amino acid
  Variant (22)..(22): Xaa in position 22 is Phe, Ile or Val
  Variant (23)..(27): Xaa in position 23 to 27 is any amino acid
  Variant (28)..(28): Xaa in position 28 is Leu, Met or Val
  Variant (29)..(29): Xaa in position 29 is Ala, Gly or Pro
  Variant (30)..(34): Xaa in position 30 to 34 is any amino acid
  Variant (35)..(35): Xaa in position 35 is Ile, Leu, Met or Val
PGXXGXXXWGXXXVXXXXXXXXXXXXXXXXXXXXX

SEQ ID NO: 142 - protein, 36 aa, Artificial sequence
  protein pattern
  Variant (2)..(3): Xaa in position 2 to 3 is any amino acid
  Variant (4)..(4): Xaa in position 4 is Lys or Arg
  Variant (5)..(5): Xaa in position 5 is Ile, Leu or Val
  Variant (6)..(7): Xaa in position 6 to 7 is any amino acid
  Variant (8)..(8): Xaa in position 8 is Ala, Asn or Pro
  Variant (9)..(10): Xaa in position 9 to 10 is any amino acid
  Variant (12)..(12): Xaa in position 12 is Ala, Gly or Thr
  Variant (15)..(15): Xaa in position 15 is any amino acid
  Variant (17)..(17): Xaa in position 17 is Ile, Leu or Val
  Variant (18)..(18): Xaa in position 18 is Asp or Asn
  Variant (20)..(20): Xaa in position 20 is any amino acid
  Variant (21)..(21): Xaa in position 21 is Asp, Asn, Ser or Thr
  Variant (23)..(24): Xaa in position 23 to 24 is any amino acid
  Variant (26)..(27): Xaa in position 26 to 27 is any amino acid
  Variant (29)..(29): Xaa in position 29 is Ala or Gly
  Variant (30)..(31): Xaa in position 30 to 31 is any amino acid
  Variant (33)..(33): Xaa in position 33 is any amino acid
  Variant (34)..(35): Xaa in position 34 to 35 is any or no amino acid
CXXXXXXXXXDXRLXAXXAXXGXXCXXFXXXGXXXL

SEQ ID NO: 143 - protein, 31 aa, Artificial sequence
  protein pattern
  Variant (2)..(2): Xaa in position 2 is any amino acid
  Variant (3)..(7): Xaa in position 3 to 7 is any or no amino acid
  Variant (9)..(9): Xaa in position 9 is Ala, Gln or Thr
  Variant (11)..(11): Xaa in position 11 is Asp, Glu, Asn, Gln or Ser
  Variant (12)..(12): Xaa in position 12 is Ala, Ile, Leu or Val
  Variant (13)..(13): Xaa in position 13 is Phe or Tyr
  Variant (16)..(16): Xaa in position 16 is Asp or Asn
  Variant (18)..(18): Xaa in position 18 is any amino acid
  Variant (19)..(19): Xaa in position 19 is Asp, Asn, Ser or Thr
  Variant (21)..(22): Xaa in position 21 to 22 is any amino acid
  Variant (23)..(23): Xaa in position 23 is Ile, Leu or Val
  Variant (24)..(25): Xaa in position 24 to 25 is any amino acid
  Variant (26)..(26): Xaa in position 26 is Ala, Ile or Val
  Variant (27)..(27): Xaa in position 27 is any amino acid
  Variant (29)..(29): Xaa in position 29 is any amino acid
  Variant (30)..(30): Xaa in position 30 is Ala, Asp, Pro or Ser
  Variant (31)..(31): Xaa in position 31 is Ala, Thr or Val
PXXXXXXKXGXXXVLXRXXGXXXXXXXEXXX

SEQ ID NO: 144 - protein, 19 aa, Artificial sequence
  protein pattern
  Variant (2)..(2): Xaa in position 2 is any amino acid
  Variant (3)..(3): Xaa in position 3 is any or no amino acid
  Variant (5)..(5): Xaa in position 5 is Ala, Gly or Ser
  Variant (6)..(7): Xaa in position 6 to 7 is any amino acid
  Variant (8)..(8): Xaa in position 8 is Asp or Glu
  Variant (9)..(9): Xaa in position 9 is any amino acid
  Variant (11)..(13): Xaa in position 11 to 13 is any amino acid
  Variant (15)..(15): Xaa in position 15 is any amino acid
  Variant (17)..(17): Xaa in position 17 is any amino acid
  Variant (18)..(18): Xaa in position 18 is Pro or Ser
TXXWXXXXXGXXXWXLXXR

SEQ ID NO: 145 - protein, 17 aa, Artificial sequence
  protein pattern
  Variant (2)..(3): Xaa in position 2 to 3 is any amino acid
  Variant (4)..(4): Xaa in position 4 is any or no amino acid
  Variant (8)..(8): Xaa in position 8 is any amino acid
  Variant (9)..(10): Xaa in position 9 to 10 is Phe or Tyr
  Variant (11)..(11): Xaa in position 11 is Ile, Leu, Pro or Val
  Variant (12)..(12): Xaa in position 12 is Phe, Ile, Leu or Val
  Variant (13)..(13): Xaa in position 13 is any amino acid
  Variant (15)..(15): Xaa in position 15 is Ala, Ile, Leu or Val
  Variant (16)..(16): Xaa in position 16 is any amino acid
  Variant (17)..(17): Xaa in position 17 is Phe, Ile, Leu, Met or Val
LXXXGGSXXXXXXGXXX

SEQ ID NO: 146 - DNA, 723 bp, Escherichia coli
  CDS (1)..(723): transl_table=11
atgggacacaagcccttataccggcagattgccgatcgcattcgtgaacaaattgcgcgtggcgagcttaaacctggcgatgcgttacccactgaatcagcgctacaaacagagtttggcgtcagccgggttacggtgcgtcaggctttgcgccagctagtcgagcagcagatcctcgaaagcattcagggcagcgggacttacgtcaaagaagagcgggtcaattacgatatttttcagttaaccagttttgatgaaaaactgtcggaccgtcacgtcgatacacacagtgaagttctgatattcgaagtgattccggctgacgattttcttcagcaacagctacaaatcaccccgcaggatcgtgtgtggcatgtgaagcgcgtgcgctatcgcaagcaaaagccaatggcgctggaagaaacctggatgccgcttgcgttgttcccggatctcacctggcaggtcatggaaaattcgaaatatcactttatcgaagaagtgaagaaaatggttatcgatcgtagcgaacaggaaatcattcctctgatgccaaccgaagagatgagccgtctgcttaatatcagccagacaaagccgattcttgaaaaagtatcgcgtggatatttagttgatggtcgggtgtttgaatatagccgcaacgcttttaataccgatgactataaatttaccctgatagcgcagcgaaaatcatcgcgataa

SEQ ID NO: 147 - protein, 240 aa, Escherichia coli
MGHKPLYRQIADRIREQIARGELKPGDALPTESALQTEFGVSRVTVRQALRQLVEQQILESIQGSGTYVKEERVNYDIFQLTSFDEKLSDRHVDTHSEVLIFEVIPADDFLQQQLQITPQDRVWHVKRVRYRKQKPMALEETWMPLALFPDLTWQVMENSKYHFIEEVKKMVIDRSEQEIIPLMPTEEMSRLLNISQTKPILEKVSRGYLVDGRVFEYSRNAFNTDDYKFTLIAQRKSSR

SEQ ID NO: 148 - DNA, 723 bp, Shigella flexneri
  CDS (1)..(723): transl_table=11
atgggacacaaacccttataccgacagattgctgatcgcattcgtgagcaaattgcgcgtggcgagcttaaacctggcgatgcgttacctaccgaatcggcattacaaacagagtttggcgtcagccgggttacggtgcgtcaggctttgcgccagttagtcgagcaacagatcctcgaaagcattcagggcagcgggacttacgtcaaagaagagcgggtcaattacgatatttttcagttaaccagttttgatgaaaaactgtcggaccgtcacgtcgatacacacagtgaagttctgatatttgaagtgattccggctgacgattttcttcagcaacagctacaaatcaccgtgcaggatcgtgtgtggcatgtgaagcgcgtgcgctatcgcaagcaaaagccaatggcgctggaagaaacctggatgccgcttgcgttgttcccggatctcacctggcaggtcatggaaaattcgaaatatcactttattgaagaagtgaagaagatggttatcgatcgtagcgaacaggaaatcattcctctgatgccaaccgaagagatgagccgtctgcttaatatcagccagacaaagccgattcttgaaaaagtatcgcgtggatatttagttgatggtcgggtgtttgaatatagccgcaacgcttttaataccgatgactataaatttaccctgatagcgcagcgaaaatcatcgcgataa

SEQ ID NO: 149 - protein, 240 aa, Shigella flexneri
MGHKPLYRQIADRIREQIARGELKPGDALPTESALQTEFGVSRVTVRQALRQLVEQQILESIQGSGTYVKEERVNYDIFQLTSFDEKLSDRHVDTHSEVLIFEVIPADDFLQQQLQITVQDRVWHVKRVRYRKQKPMALEETWMPLALFPDLTWQVMENSKYHFIEEVKKMVIDRSEQEIIPLMPTEEMSRLLNISQTKPILEKVSRGYLVDGRVFEYSRNAFNTDDYKFTLIAQRKSSR

SEQ ID NO: 150 - DNA, 723 bp, Bacillus halodurans C-125
  CDS (1)..(723): transl_table=11
gtgattaataaaaactctcctttaccgatttattatcagattgaagaacaaattaagcagcaaatcgaatcaggggtgctcaaacccggggatatgctcaaatccgagcgggagtatgcggagtattatgatgtcagtagaatgacggtaaggcaagcgattaacaaccttgtgaatcaaggatacatatataagaaaaaaggtagcggtacttatgttcaagagaaaaaaattgagcaggcgttaaacgggctgacgagttttacagaagatatgagaaaaagaggaatggagcctagcagtcgcttgctcaaatttgaactgattccagcaacggcaaaaatcgcaaaggaattaaacttgaaagagaacacgcccgttacagagattaaacgaatccgttatggtgatggggtaccaattgccattgaacgcaacctgttgcctgcgaacttagtgaagggattaaatgaggaaatcataaaccaatccttatatcaatacattgaggaagagttgaatttgcggatcgccgatgccctacaagtgattgaagcctcgactgctagcaaaacagaagccgatctattagagattcaaaaaggtagcccgattttgttaattgagcgtaaaacgtttttagccgatgggactgtattagagctagtgaaatccgcttaccgagccgatcggtataaatttatgattacgatgcaacgataa

SEQ ID NO: 151 - protein, 240 aa, Bacillus halodurans C-125
MINKNSPLPIYYQIEEQIKQQIESGVLKPGDMLKSEREYAEYYDVSRMTVRQAINNLVNQGYIYKKKGSGTYVQEKKIEQALNGLTSFTEDMRKRGMEPSSRLLKFELIPATAKIAKELNLKENTPVTEIKRIRYGDGVPIAIERNLLPANLVKGLNEEIINQSLYQYIEEELNLRIADALQVIEASTASKTEADLLEIQKGSPILLIERKTFLADGTVLELVKSAYRADRYKFMITMQR

SEQ ID NO: 152 - DNA, 945 bp, Shigella flexneri 2a str. 2457T
  CDS (1)..(945): transl_table=11
atgggacacaaacccttataccgacagattgctgatcgcattcgtgagcaaattgcgcgtggcgagcttaaacctggcgatgcgttacctaccgaatcggcattacaaacagagtttggcgtcagccgggttacggtgcgtcaggctttgcgccagttagtcgagcaacagatcctcgaaagcattcagggcagcgggacttacgtcaaagaagagcgggtcaattacgatatttttcagttaaccagttttgatgaaaaactgtcggaccgtcacgtcgatacacacagtgaagttctgatatttgaagtgattccggctgacgattttcttcagcaacagctacaaatcaccgtgcaggatcgtgtgtggcatgtgaagcgcgtgcgctatcgcaagcaaaagccaatggcgctggaagaaacctggatgccgcttgcgttgttcccggatctcacctggcaggtcatggaaaattcgaaatatcactttattgaagaagtgaagaagatggttatcgatcgtagcgaacaggaaatcattcctctgatgccaaccgaagagatgagccgtctgcttaatatcagccagacaaagccgattcttgaaaaagtatcgcgtggatatttagttgatggtcgggtgtttgaatatagccgcaacgcttttaataccgatgactataaatttaccctgatagcgcagccgaaaatcatcgcgataagcacaaaaaggccatcatacgatggccaaccatgtggaaaccgacagcccttcgccattcctgtagagggaagcggcgagggctatttcttattacagatatttatttcagaacagttttcagtgcttcaccgatatccgccaggctgcgaacggttttcacgcctgcggcttccagagcagcgaatttctcatccgcagtccctttcccaccggcaatga

SEQ ID NO: 153 - protein, 314 aa, Shigella flexneri 2a str. 2457T
MGHKPLYRQIADRIREQIARGELKPGDALPTESALQTEFGVSRVTVRQALRQLVEQQILESIQGSGTYVKEERVNYDIFQLTSFDEKLSDRHVDTHSEVLIFEVIPADDFLQQQLQITVQDRVWHVKRVRYRKQKPMALEETWMPLALFPDLTWQVMENSKYHFIEEVKKMVIDRSEQEIIPLMPTEEMSRLLNISQTKPILEKVSRGYLVDGRVFEYSRNAFNTDDYKFTLIAQPKIIAISTKRPSYDGQPCGNRQPFAIPVEGSGEGYFLLQIFISEQFSVLHRYPPGCERFSRLRLPEQRISHPQSLSHRQ

SEQ ID NO: 154 - DNA, 714 bp, Bacillus clausii KSM-K16
  CDS (1)..(714): transl_table=11
ttggctattcactctcctctatataaacaagtagcggaaaaaattaaaaaggatatttttgcattaaaattaaaaaaagatgaagccattccttccgagaataaattggtagagaagtatcaagtcagcagagttacaatacggcaggcgattaaacttctggtcgaggaggggattttatacagcatcaggggttccggcacatatgtaaaaacggggaaaatcgagcaggacatctatcgcttacaaggctttaccgaagagatgatttatttaaacaaacagcctgctaacgaaattcttgatttttccatgcaagaaccaactgggaaagtgagagaaacattacaactggaagacggagaaaaggtattttttattcgaagattgcggctagctgatggcgaacctctcattttggaggagacgtatatgccagtttcgctgtttcctgacctatccgtcgaagtaatgacccgttctaaatatgcctacgtggaaaagaaagggtaccgtattaaggaaagacagggggagatcttcccgttgctgccggatgaacagcttaagcaaacgttgaagctggaagaaggagagctcgtattgttcatggatctatgggcttatttcgaaaacgatacgatttttgaatacacgaaattatactttaggagtgagaaatacacgtttaagttcacttcaaaacgaatctga

SEQ ID NO: 155 - protein, 237 aa, Bacillus clausii KSM-K16
MAIHSPLYKQVAEKIKKDIFALKLKKDEAIPSENKLVEKYQVSRVTIRQAIKLLVEEGILYSIRGSGTYVKTGKIEQDIYRLQGFTEEMIYLNKQPANEILDFSMQEPTGKVRETLQLEDGEKVFFIRRLRLADGEPLILEETYMPVSLFPDLSVEVMTRSKYAYVEKKGYRIKERQGEIFPLLPDEQLKQTLKLEEGELVLFMDLWAYFENDTIFEYTKLYFRSEKYTFKFTSKRI

SEQ ID NO: 156 - DNA, 708 bp, Vibrio sp. Ex25
  CDS (1)..(708): transl_table=11
atgaaacccaaatacatagacattgcggaacgattagaaaaaaagatcaaagatggggaactacaacctaaatcgatgcttccaaaagagagtgatttgcaagaagagttttccgtaagccgcgtaaccatcagaaaaagcttacaaattctggtcgacaataatttaattagtcggacaagaggtagtggaacttatgtaaacgatctaaaagcccaacatgatgccttacatttgctgggttttatcgaggaagtcagtaaacaggggaaaactcctagctctcaagtcataaagttcgaacttaaaaagccgaatgagcaggttgctaagcagttaaatctctcgcccaatgatgatacatatgaaatacatagactcagatgtattaatgatgagcctgaaatttacgaagtcactcatatgccagcagtgttatttccagacttgagcatagccataatgaatggttctaaatatgagtacattgaaaatagcaaaggattgaaaattgcgaaaagcagtcagtctgtcaaaccgtatttgttagatgcagagacggcctcatacctgaatgaatcagaagcttcccctattctaaaagttgagtccactggttacctagaagatggtcgtgcatttgaatataccgtcaattacttccgacttcatcaatacagcttcgagtttatttcaactaggacgtag

SEQ ID NO: 157 - protein, 235 aa, Vibrio sp. Ex25
MKPKYIDIAERLEKKIKDGELQPKSMLPKESDLQEEFSVSRVTIRKSLQILVDNNLISRTRGSGTYVNDLKAQHDALHLLGFIEEVSKQGKTPSSQVIKFELKKPNEQVAKQLNLSPNDDTYEIHRLRCINDEPEIYEVTHMPAVLFPDLSIAIMNGSKYEYIENSKGLKIAKSSQSVKPYLLDAETASYLNESEASPILKVESTGYLEDGRAFEYTVNYFRLHQYSFEFISTRT

SEQ ID NO: 158 - DNA, 23 bp, Artificial sequence
  primer
atgggacacaagcccttataccg

SEQ ID NO: 159 - DNA, 23 bp, Artificial sequence
  primer
ttatcgcgatgattttcgctgcg

SEQ ID NO: 160 - protein, 232 aa, Artificial sequence
  consensus sequence
  Variant (2)..(2): Xaa in position 2 is any amino acid
  Variant (4)..(4): Xaa in position 4 is any amino acid
  Variant (8)..(9): Xaa in position 8 to 9 is any amino acid
  Variant (11)..(13): Xaa in position 11 to 13 is any amino acid
  Variant (15)..(16): Xaa in position 15 to 16 is any amino acid
  Variant (18)..(18): Xaa in position 18 is any amino acid
  Variant (22)..(24): Xaa in position 22 to 24 is any amino acid
  Variant (27)..(27): Xaa in position 27 is any amino acid
  Variant (29)..(30): Xaa in position 29 to 30 is any amino acid
  Variant (32)..(36): Xaa in position 32 to 36 is any amino acid
  Variant (42)..(42): Xaa in position 42 is any amino acid
  Variant (46)..(48): Xaa in position 46 to 48 is any amino acid
  Variant (51)..(59): Xaa in position 51 to 59 is any amino acid
  Variant (66)..(72): Xaa in position 66 to 72 is any amino acid
  Variant (74)..(76): Xaa in position 74 to 76 is any amino acid
  Variant (78)..(79): Xaa in position 78 to 79 is any amino acid
  Variant (81)..(81): Xaa in position 81 is any amino acid
  Variant (83)..(92): Xaa in position 83 to 92 is any amino acid
  Variant (94)..(95): Xaa in position 94 to 95 is any amino acid
  Variant (97)..(97): Xaa in position 97 is any amino acid
  Variant (100)..(110): Xaa in position 100 to 110 is any amino acid
  Variant (112)..(118): Xaa in position 112 to 118 is any amino acid
  Variant (120)..(123): Xaa in position 120 to 123 is any amino acid
  Variant (125)..(125): Xaa in position 125 is any amino acid
  Variant (127)..(131): Xaa in position 127 to 131 is any amino acid
  Variant (133)..(135): Xaa in position 133 to 135 is any amino acid
  Variant (137)..(137): Xaa in position 137 is any amino acid
  Variant (139)..(139): Xaa in position 139 is any amino acid
  Variant (142)..(143): Xaa in position 142 to 143 is any amino acid
  Variant (149)..(152): Xaa in position 149 to 152 is any amino acid
  Variant (154)..(155): Xaa in position 154 to 155 is any amino acid
  Variant (159)..(160): Xaa in position 159 to 160 is any amino acid
  Variant (163)..(163): Xaa in position 163 is any amino acid
  Variant (164)..(164): Xaa in position 164 is any or no amino acid
  Variant (166)..(168): Xaa in position 166 to 168 is any amino acid
  Variant (170)..(173): Xaa in position 170 to 173 is any amino acid
  Variant (175)..(175): Xaa in position 175 is any amino acid
  Variant (177)..(177): Xaa in position 177 is any amino acid
  Variant (179)..(188): Xaa in position 179 to 188 is any amino acid
  Variant (190)..(195): Xaa in position 190 to 195 is any amino acid
  Variant (199)..(204): Xaa in position 199 to 204 is any amino acid
  Variant (207)..(207): Xaa in position 207 is any amino acid
  Variant (210)..(211): Xaa in position 210 to 211 is any amino acid
  Variant (215)..(218): Xaa in position 215 to 218 is any amino acid
  Variant (220)..(223): Xaa in position 220 to 223 is any amino acid
  Variant (225)..(225): Xaa in position 225 is any amino acid
  Variant (227)..(231): Xaa in position 227 to 231 is any amino acid
PXYXQIAXXIXXXIXXGXLKPXXXLPXEXXLXXXXXVSRVTXRQAXXXLVXXXXXXXXXGSGTYVXXXXXXXDXXXLXXFXEXXXXXXXXXXSXXLXFEXXXXXXXXXXXLXXXXXXXVXXXXRXRXXXXXPXXXEXTXMPXXLFPDLXXXXMXXSKYXXIEXXKXXXIXXXXQXIXPXXXXXXXXXXLXXXXXXPILXXXXXXYLXDGXXFEYXXXXFXXXXYXFXXXXXR

SEQ ID NO: 161 - protein, 57 aa, Artificial sequence
  protein pattern
  Variant (2)..(3): Xaa in position 2 to 3 is any or no amino acid
  Variant (5)..(5): Xaa in position 5 is any amino acid
  Variant (6)..(7): Xaa in position 6 to 7 is any or no amino acid
  Variant (9)..(9): Xaa in position 9 is any amino acid
  Variant (10)..(10): Xaa in position 10 is Glu or Thr
  Variant (11)..(11): Xaa in position 11 is Glu or Lys
  Variant (12)..(12): Xaa in position 12 is Phe or Tyr
  Variant (13)..(13): Xaa in position 13 is Gly, Gln or Ser
  Variant (19)..(19): Xaa in position 19 is Ile or Val
  Variant (21)..(21): Xaa in position 21 is any amino acid
  Variant (22)..(22): Xaa in position 22 is Ala or Ser
  Variant (23)..(23): Xaa in position 23 is Ile or Leu
  Variant (24)..(25): Xaa in position 24 to 25 is any amino acid
  Variant (28)..(28): Xaa in position 28 is Asp or Glu
  Variant (29)..(29): Xaa in position 29 is Glu, Asn or Gln
  Variant (30)..(30): Xaa in position 30 is Gly, Asn or Gln
  Variant (31)..(32): Xaa in position 31 to 32 is Ile or Leu
  Variant (33)..(33): Xaa in position 33 is any amino acid
  Variant (34)..(34): Xaa in position 34 is Arg or Ser
  Variant (35)..(35): Xaa in position 35 is any amino acid
  Variant (36)..(36): Xaa in position 36 is Gln or Arg
  Variant (43)..(43): Xaa in position 43 is any amino acid
  Variant (44)..(44): Xaa in position 44 is Asp, Glu or Thr
  Variant (45)..(45): Xaa in position 45 is any amino acid
  Variant (46)..(46): Xaa in position 46 is Lys or Arg
  Variant (47)..(47): Xaa in position 47 is Ala, Ile or Val
  Variant (48)..(48): Xaa in position 48 is Glu, Asn or Gln
  Variant (49)..(49): Xaa in position 49 is any amino acid
  Variant (51)..(51): Xaa in position 51 is Ala or Ile
  Variant (52)..(53): Xaa in position 52 to 53 is any amino acid
  Variant (55)..(55): Xaa in position 55 is any amino acid
  Variant (56)..(56): Xaa in position 56 is Gly or Ser
PXXSXXXLXXXXXVSRVTXRXXXXXLVXXXXXXXXXGSGTYVXXXXXXXDXXXLXXF

SEQ ID NO: 162 - protein, 56 aa, Artificial sequence
  protein pattern
  Variant (2)..(13): Xaa in position 2 to 13 is any amino acid
  Variant (14)..(17): Xaa in position 14 to 17 is any or no amino acid
  Variant (19)..(19): Xaa in position 19 is Leu or Val
  Variant (21)..(23): Xaa in position 21 to 23 is any amino acid
  Variant (24)..(24): Xaa in position 24 is Asp, Gly or Gln
  Variant (25)..(25): Xaa in position 25 is Glu or Lys
  Variant (27)..(27): Xaa in position 27 is any amino acid
  Variant (28)..(28): Xaa in position 28 is Ala or Ile
  Variant (29)..(29): Xaa in position 29 is any amino acid
  Variant (31)..(31): Xaa in position 31 is any amino acid
  Variant (33)..(33): Xaa in position 33 is His, Trp or Tyr
  Variant (36)..(36): Xaa in position 36 is Ala, Leu or Val
  Variant (37)..(37): Xaa in position 37 is Ala, Ser or Val
  Variant (43)..(43): Xaa in position 43 is Ser or Thr
  Variant (44)..(44): Xaa in position 44 is any amino acid
  Variant (45)..(45): Xaa in position 45 is Ala, Glu or Gln
  Variant (46)..(46): Xaa in position 46 is Ile or Val
  Variant (48)..(48): Xaa in position 48 is Glu, Asn or Thr
  Variant (49)..(49): Xaa in position 49 is any amino acid
  Variant (53)..(53): Xaa in position 53 is any amino acid
  Variant (54)..(54): Xaa in position 54 is Phe or Tyr
  Variant (55)..(55): Xaa in position 55 is Ile or Val
LXXXXXXXXXXXXXXXXRXRXXXXXPXXXEXTXMPXXLFPDLXXXXMXXSKYXXXE

SEQ ID NO: 163 - protein, 21 aa, Artificial sequence
  protein pattern
  Variant (3)..(4): Xaa in position 3 to 4 is any or no amino acid
  Variant (6)..(6): Xaa in position 6 is any amino acid
  Variant (8)..(8): Xaa in position 8 is Ile or Val
  Variant (9)..(9): Xaa in position 9 is Ala or Glu
  Variant (10)..(10): Xaa in position 10 is Asp or Glu
  Variant (11)..(11): Xaa in position 11 is any amino acid
  Variant (13)..(13): Xaa in position 13 is Lys or Arg
  Variant (14)..(14): Xaa in position 14 is any amino acid
  Variant (15)..(15): Xaa in position 15 is Asp or Gln
  Variant (17)..(18): Xaa in position 17 to 18 is any amino acid
  Variant (19)..(19): Xaa in position 19 is Gly or Leu
  Variant (20)..(20): Xaa in position 20 is any amino acid
PLXXYXQXXXXIXXXIXXXXL

SEQ ID NO: 164 - protein, 21 aa, Artificial sequence
  protein pattern
  Variant (2)..(2): Xaa in position 2 is Asp, Glu or Lys
  Variant (3)..(3): Xaa in position 3 is Leu or Met
  Variant (4)..(8): Xaa in position 4 to 8 is any amino acid
  Variant (9)..(9): Xaa in position 9 is Asp, Glu or Gln
  Variant (10)..(10): Xaa in position 10 is Pro or Thr
  Variant (11)..(11): Xaa in position 11 is any amino acid
  Variant (12)..(12): Xaa in position 12 is Asn or Ser
  Variant (13)..(13): Xaa in position 13 is Glu or Arg
  Variant (14)..(14): Xaa in position 14 is Ile, Leu or Val
  Variant (16)..(16): Xaa in position 16 is any amino acid
  Variant (18)..(20): Xaa in position 18 to 20 is any or no amino acid
EXXXXXXXXXXXXXLXFXXXE

SEQ ID NO: 165 - DNA, 1191 bp, Escherichia coli
  CDS (1)..(1191): transl_table=11
atgacaacaaacactgtttcccgcaaagtggcgtggctacgggtcgttacgctggcagtcgccgccttcatcttcaacaccaccgaatttgtccctgttggcctgctctctgacattgcgcaaagttttcacatgcaaaccgctcaggtcggcatcatgttgaccatttacgcatgggtagtagcgctaatgtcattgccttttatgttaatgaccagtcaggttgaacggcgcaaattactgatctgcctgtttgtggtgtttattgccagccacgtactgtcgtttttgtcgtggagctttaccgttctggtgatcagtcgcattggtgtggcttttgcacatgcgattttctggtcgattacggcgtctctggcgatccgtatggctccggccgggaagcgagcacaggcattgagtttaattgccaccggtacagcactggcgatggtcttaggtttacctctcgggcgcattgtgggccagtatttcggttggcgaatgaccttcttcgcgattggtattggggcgcttatcacccttttgtgcctgattaagttacttcccttactgcccagtgagcattccggttcactgaaaagcctcccgctattgttccgccgcccggcattgatgagcatttatttgttaactgtggtggttgtcaccgcccattacacggcatacagctatatcgagccttttgtacaaaacattgcgggattcagcgccaactttgccacggcattactgttattactcggtggtgcgggcattattggcagcgtgattttcggtaaactgggtaatcagtatgcgtctgcgttggtgagtacggcgattgcgctgttgctggtgtgcctggcattgctgttacctgcggcgaacagtgaaatacacctcggggtgctgagtattttctgggggatcgcgatgatgatcatcgggcttggtatgcaggttaaagtgctggcgctggcaccagatgctaccgacgtcgcgatggcgctattctccggcatatttaatattggaatcggggcgggtgcgttggtaggtaatcaggtgagtttgcactggtcaatgtcgatgattggttatgtgggcgcggtgcctgcttttgccgcgttaatttggtcaatcattatatttcgccgctggccagtgacactcgaagaacagacgcaataa

SEQ ID NO: 166 - protein, 396 aa, Escherichia coli
MTTNTVSRKVAWLRVVTLAVAAFIFNTTEFVPVGLLSDIAQSFHMQTAQVGIMLTIYAWVVALMSLPFMLMTSQVERRKLLICLFVVFIASHVLSFLSWSFTVLVISRIGVAFAHAIFWSITASLAIRMAPAGKRAQALSLIATGTALAMVLGLPLGRIVGQYFGWRMTFFAIGIGALITLLCLIKLLPLLPSEHSGSLKSLPLLFRRPALMSIYLLTVVVVTAHYTAYSYIEPFVQNIAGFSANFATALLLLLGGAGIIGSVIFGKLGNQYASALVSTAIALLLVCLALLLPAANSEIHLGVLSIFWGIAMMIIGLGMQVKVLALAPDATDVAMALFSGIFNIGIGAGALVGNQVSLHWSMSMIGYVGAVPAFAALIWSIIIFRRWPVTLEEQTQ

SEQ ID NO: 167 - DNA, 1089 bp, Shigella flexneri 2a str. 301
  CDS (1)..(1089): transl_table=11
atgacaacaaacactgtttcccgcaaagtggcgtggctacgggtcgttacgctggcagtcgccgccttcatcttcaacaccaccgaatttgtccctgttggcctgctctctgacattgcgcaaagttttcacatgcaaaccgctcaggtcggcatcatgttgaccatttacgcatgggtagtagcgctaatgtcattgccttttatgttaatgaccagtcaggttgaacggcgcaaattactgatctgcctgtttgtggtgtttattgccagccacgtactgtcgtttttatcgtggagctttaccgttctggtgatcagtcgcattggtgtggcttttgcacatgcgattttctggtcgattacggcgtctctggcgatccgtatggctccggccgggaagcgggcacaggccttgagtttaattgccaccggtacagcactggcgatggtcttaggtttaccgctcgggcgcattgtggggcagtatttcggctggcgaatgaccttcttcgcgattggtattggggcgcttgttacccttttgtgcctgattaagttacttcccttactgcctagtgagcattccggttcattgaaaagcctcccgctattgttccgccgcccggcattgatgagcatttatttgttaactgtggtggttgtcaccgcccattacacggcatacagctatatcgagccttttgtgcaaaacattgcgggattcagcgccaactttgccacggcattactgttattactcggtggtgcgggcattattggcagcgtgattttcggtaaactgggtaatcaatatgcgtctgcgttggtaagtacggcgattgcgctgttgctggtgtgtctggcactgctgctacctgcggcgaacagtgaaatacacctcggggtgctgagtattttctgggggatcgcgatgatgatcatcgggcttggtatgcaggttaaagtgctggcgctggcaccagatgctaccgacgtcgcgatggcgctattctccggcatatttaatattggaatcggggcgggtgcgttggtaggtaatcaggtgagtttgccctggtcaatgtag

SEQ ID NO: 168 - protein, 362 aa, Shigella flexneri 2a str. 301
MTTNTVSRKVAWLRVVTLAVAAFIFNTTEFVPVGLLSDIAQSFHMQTAQVGIMLTIYAWVVALMSLPFMLMTSQVERRKLLICLFVVFIASHVLSFLSWSFTVLVISRIGVAFAHAIFWSITASLAIRMAPAGKRAQALSLIATGTALAMVLGLPLGRIVGQYFGWRMTFFAIGIGALVTLLCLIKLLPLLPSEHSGSLKSLPLLFRRPALMSIYLLTVVVVTAHYTAYSYIEPFVQNIAGFSANFATALLLLLGGAGIIGSVIFGKLGNQYASALVSTAIALLLVCLALLLPAANSEIHLGVLSIFWGIAMMIIGLGMQVKVLALAPDATDVAMALFSGIFNIGIGAGALVGNQVSLPWSM

SEQ ID NO: 169 - DNA, 1227 bp, Pseudomonas putida KT2440
  CDS (1)..(1227): transl_table=11
ttgtctgcggagaagcggtttccacccatgaacggacccatacccacacacctgccgcccacaacgggcagcggcagctggctgagcgtcatcgccctggccttggcggccttcattttcaacaccaccgagttcgtcccggtggccctgctcagtgacattggccgcagcttcgacatgagcactgcccaggtcggcctgatgctgaccatctacgcctggatcgtggcactggcctcgttgcccatgatgttgctgacccgcaacatcgaacggcggcgtctgctgctgttcgtgttcctggtgttcattgtcagccacttgctgtcctggctttcgcaaagcttcgccatgctgctggtcagccgcatcggcattgccctggcgcatgcggtgttctggtccatcaccgcctcgctggcggtgcgtgtggcgccgccgggccagcaggccaaggcgctgggcctgctggccaccggtactaccctggccatggtcctgggcatcccgctgggccgtgtggtgggcgaggcactgggctggcgtatcacgttcctgagcattgccggggtagcgctagccaccatgctttgcctgatcaaatcgctgccgctgctgcccagccagaactccggttcgttgcgcagcctgccggtcctgttcaagcgcccggcactggtcattacctacttgctggtgacgctggtcattaccgcgcagttcacggcctacagctatatcgagccgttcgccctgcacgtagcgcagatcggcggcgaccgcaccacgctgttgctgctgttgttcggcggtgccggggtttttggttcattgttgttcagccgttacagcgaacgcttcccgcatggcttcctggtaggttcgatcggggtactcgccgcgtgcctgttgctgatgttgccgctgtcgggcaacttctatgtgtttgcagtgctgagcatgttctggggcgtggcaattctcagcttcagcctggcgctgcagtccaagaccctgaagctggcgtccgacgccaccgatgtggccatggcgctgttctcgggtatctacaacatcggcattggcggtggtgcgctgctgggcagtatcgtcagcagccagatggatgtggcggatatcggcctggtgggcggcagcgtggcagtggtcgggctggtactggccgttgccagtacccggcgctttcgcgaggcgttgacacgttga

SEQ ID NO: 170 - protein, 408 aa, Pseudomonas putida KT2440
MSAEKRFPPMNGPIPTHLPPTTGSGSWLSVIALALAAFIFNTTEFVPVALLSDIGRSFDMSTAQVGLMLTIYAWIVALASLPMMLLTRNIERRRLLLFVFLVFIVSHLLSWLSQSFAMLLVSRIGIALAHAVFWSITASLAVRVAPPGQQAKALGLLATGTTLAMVLGIPLGRVVGEALGWRITFLSIAGVALATMLCLIKSLPLLPSQNSGSLRSLPVLFKRPALVITYLLVTLVITAQFTAYSYIEPFALHVAQIGGDRTTLLLLLFGGAGVFGSLLFSRYSERFPHGFLVGSIGVLAACLLLMLPLSGNFYVFAVLSMFWGVAILSFSLALQSKTLKLASDATDVAMALFSGIYNIGIGGGALLGSIVSSQMDVADIGLVGGSVAVVGLVLAVASTRRFREALTR

SEQ ID NO: 171 - DNA, 1182 bp, Bdellovibrio bacteriovorus HD100
  CDS (1)..(1182): transl_table=11
atgaacacaaattctctcaaatcctggcttcccactgtcagcatcagtctggccagtttcatattcgtgaccagcgagtttattcctgtgggtctgctcccagagatttctgcaggtcttgggaaaagcgaagccttcaccggcctgctgatgaccatctatgcctggattgtcgcgacaatgtccctgccaatgacggtcgtcagctcccactgggatcgccgccggctgatgctgatcctgttgggaacgttcgtcgtggcaaacctggcctcgggcctggcggcaagctttggcatgctgctggtctgccggatcatcgtggcttttgcccatgcggtgttttggtccattgcgatccccctggcgatccgcctgggcccggccgggggacgagccaaagctttatcgataattgcaatgggagcctctctgggaaatatcctggggatccctttgggcactttcctggggcagagctttggctggcgcatggccttttctttgatcgcgctggtggccttcgtcatttacgttattctgtatcgcatgctcccctccttaccaagccagagcatcaccacgtttaaaaatgtgccttcattgttcaagcgaaaatccctggtgctggtttacctgatgacggctctgaccgtgaccgggcacttcaccgcgtttacatacatcaaaccgttcctgctggcggtgggtggaatttcaacggatttcgtcgtggttttgctattggtgtttggtgcttctggagttttcggcagcatcctgggcagcaagattatttacaaacatccgaaaaatgcactgtggatatcactcgggatcgttttctcaagcctgctgttgatgacactggccgtgcattcacaaatctggctcatggcgctggcatttgtctggggaacagccctgacccttctgtgcctgatattccagtccgctgttttaaaggaagcccctgatgtgcaggatgtggcaatgtcgctgtactctggcattttcaatatcggcattggcggaggagccctgcttggcagcatttcctccacgaaccatatcgggtctgtcggctatgtcggggccatctttgtgctggcttcactgatgctttccgcgaaattccagatctcggaacttaagcacaccgaaggcgctgtgggacattaa

SEQ ID NO: 172 - protein, 393 aa, Bdellovibrio bacteriovorus HD100
MNTNSLKSWLPTVSISLASFIFVTSEFIPVGLLPEISAGLGKSEAFTGLLMTIYAWIVATMSLPMTVVSSHWDRRRLMLILLGTFVVANLASGLAASFGMLLVCRIIVAFAHAVFWSIAIPLAIRLGPAGGRAKALSIIAMGASLGNILGIPLGTFLGQSFGWRMAFSLIALVAFVIYVILYRMLPSLPSQSITTFKNVPSLFKRKSLVLVYLMTALTVTGHFTAFTYIKPFLLAVGGISTDFVVVLLLVFGASGVFGSILGSKIIYKHPKNALWISLGIVFSSLLLMTLAVHSQIWLMALAFVWGTALTLLCLIFQSAVLKEAPDVQDVAMSLYSGIFNIGIGGGALLGSISSTNHIGSVGYVGAIFVLASLMLSAKFQISELKHTEGAVGH

SEQ ID NO: 173 - DNA, 1164 bp, Apis mellifera
  CDS (1)..(1164)
atgaacaatgctaaaaagcgctctcagatatggtcgtcgattctttgtttagcttttgccggatttattttcaatactaccgaatttgtaccggttggtttacttcctaatattgcaaaaagcttttcgatggatgtcgctcatgcagggttattattaacgatatatgcatgggcagtatcattactatccttacccttaaccgtattaacatccagaatggagcgtcgcaagctcctcattttgctgttttgtttatttatcggcagccacttattagctggttttgcctggaatttttatagcttaatgacagctcgtattggtatcgcttgtgcacatgctgtattttgggctattaccacgcctttagctgttcagttggcgccgaatggcaaaaaagccaaagcaatgagttttatcgtagttggcacatcaatggcaacggtgctcggaattcctattggtaccaaaataggggaattagtcggttggcgtgtcacgtttttatgtattggtggcattgcttttggtattttagttttattgatttacttacttcctaaagtccccagtattaataccatttcaatcaaaaatctgccaaaagtgttaaaacgaccggccttactcaatatttacttattaacagctattattatcacaggacattttactgcctatacatacatcacgccatttatgatgaaagtgggcggattcagtcaggaagttgttgtccatctcttattggttattggattttcgggcatgattggtagtgttatttttactcgatacgcaagtaaatatccgacagcgatattagttgtccccgtaatattattgatggcgtgcttattatcactctattttagctcctttagtctctacaccgcgatgatacaaggcgtgatatggggattagccattaccattattggtatggtaatgcaaagtaaagtgatcgatgcagcccctgatgcgactgacattgccacatctgtttattcaggcatttataatataggtatcggtggaggagcctttgtcggcagccaggtattagtgaaactgtcaactcattatattggattggttggtgctatttttgttctcctcgcgttaatactttttttcttgttatccagaaaagcttggtaa

SEQ ID NO: 174 - protein, 387 aa, Apis mellifera
MNNAKKRSQIWSSILCLAFAGFIFNTTEFVPVGLLPNIAKSFSMDVAHAGLLLTIYAWAVSLLSLPLTVLTSRMERRKLLILLFCLFIGSHLLAGFAWNFYSLMTARIGIACAHAVFWAITTPLAVQLAPNGKKAKAMSFIVVGTSMATVLGIPIGTKIGELVGWRVTFLCIGGIAFGILVLLIYLLPKVPSINTISIKNLPKVLKRPALLNIYLLTAIIITGHFTAYTYITPFMMKVGGFSQEVVVHLLLVIGFSGMIGSVIFTRYASKYPTAILVVPVILLMACLLSLYFSSFSLYTAMIQGVIWGLAITIIGMVMQSKVIDAAPDATDIATSVYSGIYNIGIGGGAFVGSQVLVKLSTHYIGLVGAIFVLLALILFFLLSRKAW

SEQ ID NO: 175 - DNA, 1185 bp, Burkholderia vietnamiensis G4
  CDS (1)..(1185): transl_table=11
atggcaactccggacgccgtcagttccgagcagtcgtggtggggcgtcctggccctcgcgctcactgccttcatcttcaacaccaccgagttcgtgcccgtcgcactgctgagcgccatcggcgacagcctgcagatgcagcccaccgccgtcggcctgatgctgacgatctacgcgtgggccgtcgccgtcgtgtcgctgccgctcaccttcgtcacgcgtcacgtcgagcgccgcaagctgctcagttgcgcgctgctcgtgttcgtcgccagtcacgtcgtgaccggcgtcgcgtggaatttcacggtgctgatgatcgggcggctcggcgtcgcgtgtgcgcatgcggtgttctggtcgatctcggtgccgctcgcggtgcgcctcgcgccgagcgaccgcaagagccgcgcgctgagcctgctcgcgatgggcaccgcgatcgcgatggtcgccggcattccgctcgggcgcgtgatcggcgaagcgctcggctggcgcgtcacgttcctcgtgatcggcgcggcggcggccgtcgcgttgctgctgctgcgcgcgacgctgccgacgctcgcgagccagggcgccggctcgctcgccagcatcggcacgttcctgcgcaagccggcgctggtgtcgctgtacgcgatcacggtgctggtcgtgtccgcgcacttcacgtcgtacacgtacatcgagccgttcgtgcagaccgtcaatcatgcgagcagcagccggatcacctacgtgctgatcctgttcggcgtcgcggggatgcccgcggccatctgcttcaatcgcttgttcccggagcggccggccgatttcctgctcgcgtcgatcgttgcgttgtccgcatgtctgctggtgctgtttccgagcgcgctgaacatcgtcacgctgtcggtgcacacgctggtgtggggcggcgcgatcgtctgcttcggactcgcgatgcaggcgtgggtgctcaagctcgcgccgcacgcgaccgatctcgcggtgtcgatcttctcggggctgtacaacgtgggcatcggcgccggcgcgctgctcggcaaccatatcgccgcggatttcggcctcgcgtgggtcggcacgttcggcggcgtggtcggtatcgtgtcggccgcgatcgcgtgggccgcgttgcggctgcatgagcgacgcgcgtcagcgtag

SEQ ID NO: 176 - protein, 394 aa, Burkholderia vietnamiensis G4
MATPDAVSSEQSWWGVLALALTAFIFNTTEFVPVALLSAIGDSLQMQPTAVGLMLTIYAWAVAVVSLPLTFVTRHVERRKLLSCALLVFVASHVVTGVAWNFTVLMIGRLGVACAHAVFWSISVPLAVRLAPSDRKSRALSLLAMGTAIAMVAGIPLGRVIGEALGWRVTFLVIGAAAAVALLLLRATLPTLASQGAGSLASIGTFLRKPALVSLYAITVLVVSAHFTSYTYIEPFVQTVNHASSSRITYVLILFGVAGMPAAICFNRLFPERPADFLLASIVALSACLLVLFPSALNIVTLSVHTLVWGGAIVCFGLAMQAWVLKLAPHATDLAVSIFSGLYNVGIGAGALLGNHIAADFGLAWVGTFGGVVGIVSAAIAWAALRLHERRASA

SEQ ID NO: 177 - DNA, 1179 bp, Pseudomonas fluorescens Pf-5
  CDS (1)..(1179): transl_table=11
atgagtgattccgcggcgacaccccaaggcaactggcagccggtcatcgcgctggcgttggcggcctttgtcttcaacaccaccgagtttgtgccggtgggcctgctcagcgccattggcgccagcttcgacctgcccaccgagcgggtcggtctgatgctcaccatctacgcctggatcgtgtccctgacctcgctgccggtgatgctgctgacccgcaacatcgaacgacgcaagctgctcacggtgctgttcgggctgtttatcgtcagccatgtgttctccagcctggccagcaacttcggcctgctgatgctcagccgcatcggcgtggccctggcccatgcactgttctggtccatcaccgcgtccctggcggtgcgcctggcgccgccgggcaagcaggtgcaggccctcgggctgctggccaccggcacctcactggccatggtcctgggcattcccctgggccgcttgctgggcgaggccctgggctggcgcaccacgttcagcgtgatcgcggccatggccggcctgctggtgctgtggctgatccgcaccttgccgctgctgccgagccagaactccggttccctgcgcagcctgccgctgctgttcaagcgcccggcgctggtggcgatctatgtgcttaccgccctggtggtgacggcgcagttcaccgcctacagctacatcgagcccttcatcaaggtggcggcgggcctggggggcgaggtggtgaccctggtcctgctggtgttcggcggcgccgggatcatcggctcgctgctgttcagctggctgcaccgccacagcccccaggggtttctactgaccgcggtggcgctgctggcgctgtgcctgagcctgctgttgccgctcaatggccacgtctggtcgctggtggccctgagtgtgttctggggcatggcgatcatgggcttcggcctggccctgcaatccaaggtactggtgctggcgccggacgccaccgacgtggccatggcgatgttctccggcatctacaacatcggcattggcggcggtgcgctgctgggcagttgggtcggcgggcagttgggctttgcctatgtcggcctggcgggtggcgccctggcgaccctggccttgctgttgtacagcctggccctgggccgcatgagccgcaccagcgtgtag

SEQ ID NO: 178 - protein, 392 aa, Pseudomonas fluorescens Pf-5
MSDSAATPQGNWQPVIALALAAFVFNTTEFVPVGLLSAIGASFDLPTERVGLMLTIYAWIVSLTSLPVMLLTRNIERRKLLTVLFGLFIVSHVFSSLASNFGLLMLSRIGVALAHALFWSITASLAVRLAPPGKQVQALGLLATGTSLAMVLGIPLGRLLGEALGWRTTFSVIAAMAGLLVLWLIRTLPLLPSQNSGSLRSLPLLFKRPALVAIYVLTALVVTAQFTAYSYIEPFIKVAAGLGGEVVTLVLLVFGGAGIIGSLLFSWLHRHSPQGFLLTAVALLALCLSLLLPLNGHVWSLVALSVFWGMAIMGFGLALQSKVLVLAPDATDVAMAMFSGIYNIGIGGGALLGSWVGGQLGFAYVGLAGGALATLALLLYSLALGRMSRTSV

SEQ ID NO: 179 - DNA, 1200 bp, Psychrobacter arcticus 273-4
  CDS (1)..(1200): transl_table=11
atgacacataaccttgaggtgagctcagatgctcgccgaactcaatattttcaagtatttttgatgggggttagcgcctttatcatgaataccaccgaattcgtcccagtcgccctattaagtgacatcgcgcaagactttgctattaccacggcagaaacgggctggatgttgacgctctatgcgtggattgtcgctgccatgtcgttgccgctgatgctactgaccagtcgatttgaacggaagcgtttgctcttagccttgtttgcggtatttatcgccagccatgcgttatcagtatttgcgtggagtttccaagtattgctcatcagccgtgttgggattgcgctatcgcatgcgatattttggtcaatcacggcggcgattgccatacgagtggcacccaaaggcaaaaaagcaatggcactcagtgtgcttgcgaccggtacttcattggcaatggtactgggcgtaccattagggcgattggtcggtcaatggtttggctggcgcgcaacctttggcggtatcggcgcagttgctttggtggtatttatcttgcaagcaaggctattacccaccctgccaagtatgtttgagggctcgtttagaaagattccaacattgcttaaaaatcctttattggtcagtctgtatctgcttattttgctggtctttaccgcacactatagcgcttactcttatatcgaaccttttatgcgtcaggtcggtgcaatcagtgaaaacgccgcgacttttgtactactattatttggtgtggcaggcattttgggcagtgtgatattcagtcgctggggtgataactttaataccagattgatgctgatatcgatgatattaatattggtatcgatgcttgcgctattacttgccgtcacctcggtatgggcgctcagcttgattgccttactatggggcgcagcactcatgctgctgattgtctctatgcaagccaaagtgattatggtcgacgtcaaggcgcaagacatgctgatgtcaatgttctcagggattattaacttagggattggtacaggggctttgtttggaggttatgccgtgatccatctctcgttatcaagcgtgggctatgtaggggcagctatcgccagtgcagcactactcctgatactattgatgataaaacgcttccctgagctcagcaggaggctcggctaa

SEQ ID NO: 180 - protein, 399 aa, Psychrobacter arcticus 273-4
MTHNLEVSSDARRTQYFQVFLMGVSAFIMNTTEFVPVALLSDIAQDFAITTAETGWMLTLYAWIVAAMSLPLMLLTSRFERKRLLLALFAVFIASHALSVFAWSFQVLLISRVGIALSHAIFWSITAAIAIRVAPKGKKAMALSVLATGTSLAMVLGVPLGRLVGQWFGWRATFGGIGAVALVVFILQARLLPTLPSMFEGSFRKIPTLLKNPLLVSLYLLILLVFTAHYSAYSYIEPFMRQVGAISENAATFVLLLFGVAGILGSVIFSRWGDNFNTRLMLISMILILVSMLALLLAVTSVWALSLIALLWGAALMLLIVSMQAKVIMVDVKAQDMLMSMFSGIINLGIGTGALFGGYAVIHLSLSSVGYVGAAIASAALLLILLMIKRFPELSRRLG

SEQ ID NO: 181 - DNA, 1260 bp, Pseudomonas syringae pv. phaseolicola 1448A
  CDS (1)..(1260): transl_table=11
atgcgtggcgatcggccttcgggtcggaacattttcagggcgttgcgattcttgataacttcacctccaaacgagcaggcaggtagctggcttggcgtattcgcgctggccttggcggccttcattttcaataccaccgagttcgtgccgatcggtctgctgagtaacatcggccagagcttcgagatgaccccggcccaggtcgggctgatgcttacgatctatgcctgggttgtgtcgctgatgtcgttgccgatgatgctggcgacgcgcaacatcgagcgccgcaagttgctgatgttcgtgttcggcctgtttgtggtcagccatgtactctccgcaatctcccccagcttcgcaatcctgctggtgagtcgggtcggtatcgcctttgcacatgcggtgttctggtcggtcacggcgtcgctggccgtgcgcatcgcaccgcccggcaagcaggttcaggcgcttggcctgctggcgaccggtacgtcgctggcgatggtgctgggtattccgctgggccgcgtgctgggtgaggccctgggctggcggactacctttctgggcatcgccggcatcgctgcgctggtagtcttcctgttggctcgcgcgctgcctttgctgcccagccagaactccggctcgttgcgcagcctgccgatcctgttcaaacgcccacggttaatggcgatctacctgctgacagcgattgtggtgaccgctcatttcaccgcctacagctatatcgagccgttcacccagactgtgtcccgactcagcggcgaaatgaccacgattctgctgctggtctttggcggtgcaggaatcatgggctcgatcatcttcagcctgttcagcgaccgcttccctaacgggctattgatcaccgccattggcacgctgaccgtttgcctgctcatgctattgccactctccggcgatgcgacagcgctcggcacgctgaccattatctggggcatggcgatcatgtgcttcgggctgaccttgcaagcgcgtgtactctctctggcaccggatgcgaccgatgtggcaatggcgctgttctcgggcatcttcaatatcggaattggtggcggtgcgctgctcggcagcgtggtcagcagccatctcggggttgccaatgtcggtattgtgggcggcctgctggccttgggcgggttggggttgtgctgctttacgacgcattacttcggcaaaatccagcctgctgccgaggtgcaggccgagagcaaatag

SEQ ID NO: 182 - protein, 419 aa, Pseudomonas syringae pv. phaseolicola 1448A
MRGDRPSGRNIFRALRFLITSPPNEQAGSWLGVFALALAAFIFNTTEFVPIGLLSNIGQSFEMTPAQVGLMLTIYAWVVSLMSLPMMLATRNIERRKLLMFVFGLFVVSHVLSAISPSFAILLVSRVGIAFAHAVFWSVTASLAVRIAPPGKQVQALGLLATGTSLAMVLGIPLGRVLGEALGWRTTFLGIAGIAALVVFLLARALPLLPSQNSGSLRSLPILFKRPRLMAIYLLTAIVVTAHFTAYSYIEPFTQTVSRLSGEMTTILLLVFGGAGIMGSIIFSLFSDRFPNGLLITAIGTLTVCLLMLLPLSGDATALGTLTIIWGMAIMCFGLTLQARVLSLAPDATDVAMALFSGIFNIGIGGGALLGSVVSSHLGVANVGIVGGLLALGGLGLCCFTTHYFGKIQPAAEVQAESK

SEQ ID NO: 183 - DNA, 1185 bp, Burkholderia sp. 383
  CDS (1)..(1185): transl_table=11
atggccacaccggacgccgtcagttccaagcactcgtggtggggtgtcctgaccctggcactcaccgccttcatcttcaataccaccgaattcgtgcccgtcgcgctgctcagcgcgatcggcgacagcctgcacatgcggccgaccgacgttggcctgatgctgacgatctacgcgtgggccgtggccgtcgtgtcgctgccgctgacgctggccacgcgccatgtcgagcgccgcaagctgctgacgggagcgttgctggtgttcatcggcagtcacgtggtgaccggcgtcgcgtggaatttcgcggtgctgatggtcggccggctgggcatcgcgtgcgcgcacgcggtgttctggtcgatttccgtgccgctggccgtgcggctcgcgccgagcgaccggaaaagccgcgcgctcagcctgctggcgatgggcacggcgatcgcgatggtggccggcattccactcgggcgcgtggtcggcgagacgttcggctggcgcgtcacgttcctgatcatcgccggcgcggcgggtgtcgcgttgctgctgctgcgcgcgacgttgccggtatcgccgagccagggcgccgggtcgctcagcagtatcggcgtgttcctgcgcaagcccgcgctggtggccttgtatgcgatcaccgtgctcgtcgtgactgcgcacttcacgtcgtacacgtacatcgagcctttcgtccagagcgtcaatcacgcgagcagcagccggatcacgtacgtgctgatcctgttcggcgttgccggcataccggccgcgatctgcttcaaccgcgtctatccgcaccgtcctgacgacttcctgctcgggtcgatcgtcgcgctggcgggatgcctgctgatcctgttcccgtgcgcgctgaacatcgtcacgctgtccgtgcatacgctggtctggggcggcgcgatcgtctgcttcgggctggccatgcaggcatgggtgctgaagctggcgccggagggaaccgacctggcggtgtcgattttctccgggctgtacaacgtcggcatcggcgccggtgcgctgatcggcaaccatatcgccagcgacttcggactgccgtgggtcggcacgttcggcggcgtggtcggcgcggtggcggtcgggatcgcgtggcttgcgttgcggctgcatgcgaggcaggcggtggcgtag

SEQ ID NO: 184 - protein, 394 aa, Burkholderia sp. 383
MATPDAVSSKHSWWGVLTLALTAFIFNTTEFVPVALLSAIGDSLHMRPTDVGLMLTIYAWAVAVVSLPLTLATRHVERRKLLTGALLVFIGSHVVTGVAWNFAVLMVGRLGIACAHAVFWSISVPLAVRLAPSDRKSRALSLLAMGTAIAMVAGIPLGRVVGETFGWRVTFLIIAGAAGVALLLLRATLPVSPSQGAGSLSSIGVFLRKPALVALYAITVLVVTAHFTSYTYIEPFVQSVNHASSSRITYVLILFGVAGIPAAICFNRVYPHRPDDFLLGSIVALAGCLLILFPCALNIVTLSVHTLVWGGAIVCFGLAMQAWVLKLAPEGTDLAVSIFSGLYNVGIGAGALIGNHIASDFGLPWVGTFGGVVGAVAVGIAWLALRLHARQAVA

SEQ ID NO: 185 - DNA, 1206 bp, Haemophilus influenzae R2846
  CDS (1)..(1206): transl_table=11
atgtcgttatatttaaaagctgcaaaaatccaatcatggcgcgtgcttattatggcttgcgcaggatttatttttaatactacagaatttgtacccgttgcaatgttaagcgatattgcacaaagttttaatatgcaaaccgctgatactggtttaatgatgacagtttatgcgtggacagtgctaattatgtctttaccagccatgcttgccactggcaatatggaacgtaaaagtctgcttattaaacttttcattatatttattgttgggcatattttatcggtcattgcatggaatttctggatattacttctcgctcgaatgtgcattgcattagcccattcagtgttttggtcaattaccgcctcacttgtaatgcgcatcgcacctaaacacaagaaaactcaagcattaggaatgctcgctattggcaccgcacttgccaccataggcttaccgattgggagaatcgtcggacagctcgtcggttggcgagtcacttttggcattattgcggtactggcattatccatcatgtttttaattattcgattattgccaaatttacccagtaaaaatgctggctctattgcaagtttacccttgcttgcgaaacgcccattattactttggctttatgtaacaacggcaatcgtcatttcagcacactttactgcttatacctatatcgaaccatttatgattgatgtagggcatttagatccaaattttgccacggctgtattattagtttttggtttctcaggcattgcagcaagcctattatttaacagattataccgatttgctcccacaaaatttattgttgtttcgatgagtttattgatgttctctctattgctcctgttattttcaactgaagcaataatagcaatgttcagccttgtgtttatttgggggattggcatttcttgtatcggactatctctacaaatgcgcgtactaaaacttgcgccagatgcaaccgatgttgccacagctatttactcgggcattttcaatgcaggaattggcgcaggcgcattatttggaaaccttgcgacaacctatttaggattaaatgaaattggttatacaggcgcagcattaggtttaatcggtttcatcatttttattacaacgcacttaaaatatcgccatacctttcttctgcaaaacaataaaaaaataaccgcactttag

SEQ ID NO: 186 - protein, 401 aa, Haemophilus influenzae R2846
MSLYLKAAKIQSWRVLIMACAGFIFNTTEFVPVAMLSDIAQSFNMQTADTGLMMTVYAWTVLIMSLPAMLATGNMERKSLLIKLFIIFIVGHILSVIAWNFWILLLARMCIALAHSVFWSITASLVMRIAPKHKKTQALGMLAIGTALATIGLPIGRIVGQLVGWRVTFGIIAVLALSIMFLIIRLLPNLPSKNAGSIASLPLLAKRPLLLWLYVTTAIVISAHFTAYTYIEPFMIDVGHLDPNFATAVLLVFGFSGIAASLLFNRLYRFAPTKFIVVSMSLLMFSLLLLLFSTEAIIAMFSLVFIWGIGISCIGLSLQMRVLKLAPDATDVATAIYSGIFNAGIGAGALFGNLATTYLGLNEIGYTGAALGLIGFIIFITTHLKYRHTFLLQNNKKITAL

SEQ ID NO: 187 - DNA, 1191 bp, Haemophilus influenzae R2866
  CDS (1)..(1191): transl_table=11
atgtcgttatatttaaaagctgaaaaaatccaatcatggcgcgtgcttattatggcttgtgcaggatttatttttaatactacagaatttgtacccgttgcaatgttaagcgatattgcacaaagttttgatatgcaaaccgctgatactggtttaatgatgacagtttatgcttggacggtgctaattatgtctttaccagccatgcttgccacgggcaatatggaacgtaaaagtctgcttattaaacttttcattatatttattgttgggcatattttatcggtcattgcatggaatttctggatattacttctcgctcgaatgtgtattgcattagcacattcggtgttttggtcaattactgcctcacttgtgatgcgcatctcacctaaacacaagaaaactcaagcattaggaatgctcgctattggcaccgcacttgccacaatcttaggcttaccaattgggagaattgtcggacagcttgtcggttggcgggtcacttttggcattattgcggtactggcattatccattatgtttttaattattcgattattgccaaatttacccagtaaaaatgctggctctattgcaagtttacccttgcttgctaaacgcccattattactttggctttacgtaacaacggcaatcgtcatttcagcacactttaccgcttatacttatatcgaaccatttatgattgatgtcgggcacttggatccaaattttgccacggctgtattattagtttttggtttctcaggtattgccgcaagcctattatttaacagattataccgacttgcgcccacaaaatttattgttgtttcgatgagtttattgatgttctccctcttactactcctcttttcgaccgaaacaataatagcaatgttcagccttgtgtttatttgggggattggcatttcttgtatcggactatctctacaaatgcgcgtactaaaacttgcgccagatgcaactgatgttgccacagctatttactcgggcattttcaatgcaggaattggcgcgggcgcattatttggaaaccttgcgacaacctatttaggattaaatgaaattggttatacaggcgcagcattaggtttaatcggtctcatcatttttattacaacgcacttaaaatatcgccatacctttcttctacaaaacaaataa

SEQ ID NO: 188 - protein, 396 aa, Haemophilus influenzae R2866
MSLYLKAEKIQSWRVLIMACAGFIFNTTEFVPVAMLSDIAQSFDMQTADTGLMMTVYAWTVLIMSLPAMLATGNMERKSLLIKLFIIFIVGHILSVIAWNFWILLLARMCIALAHSVFWSITASLVMRISPKHKKTQALGMLAIGTALATILGLPIGRIVGQLVGWRVTFGIIAVLALSIMFLIIRLLPNLPSKNAGSIASLPLLAKRPLLLWLYVTTAIVISAHFTAYTYIEPFMIDVGHLDPNFATAVLLVFGFSGIAASLLFNRLYRLAPTKFIVVSMSLLMFSLLLLLFSTETIIAMFSLVFIWGIGISCIGLSLQMRVLKLAPDATDVATAIYSGIFNAGIGAGALFGNLATTYLGLNEIGYTGAALGLIGLIIFITTHLKYRHTFLLQNK

SEQ ID NO: 189 - DNA, 1191 bp, Escherichia coli O157
  CDS (1)..(1191): transl_table=11
atgacaacaaacactgtttcccgcaaagtggcgtggctacgggtcgttacgctggcagtcgccgccttcatcttcaacaccaccgaatttgtccctgttggcctgctctctgacattgcgcaaagttttcacatgcaaaccgctcaggtcggcatcatgttgaccatttacgcatgggtagtagcgctaatgtcattgccttttatgttaatgaccagccaggttgaacggcgcaaattactgatctgcctgtttgtggtgtttattgccagccacgtactgtcgtttttatcgtggagctttaccgttctggtgatcagtcgcattggtgtggcttttgcacatgcgattttctggtcgattacggcgtccctggcgatccgtatggctccggccgggaagcgagcacaggcattgagtttaattgccacaggtacagcactggcaatggtattaggattacctctcgggcgcattgtggggcagtatttcggttggcgaatgaccttcttcgcgattggtatcggggcgcttattacccttttgtgcctgattaagttacttcccttactgcccagtgagcattccggttcattgaaaagcctcccgctattattccgccgcccggcattgatgagcatttatttgttaactgtggtggttgtcaccgcccattacacggcatacagctatattgagccttttgtgcaaaacattgcgggattcagcgccaactttgccacggcattactgttattactcggtggtgcgggcattattggcagcgtgattttcggtaaactgggtaatcaatatgcgtctgcgttggtaagtacggcgattgcgctgttgctggtgtgcctggcactgctgctacctgcggcgaacagtgaaatacacctcggggtgctgagtattttctgggggatcgcgatgatgatcatcgggcttggtatgcaggttaaagtgctggcgctggcaccagatgccaccgacgtcgcgatggcgctattctccgggatatttaatattggaatcggggcgggtgcgttggtaggtaatcaggtgagtctgcactggtcaatgtcgatgattggttatgtgggcacggtgcctgcttttgccgcgttaatatggtcaatcattatatttcgccgctggccagtgacactcgaagaacagacgcaatag

SEQ ID NO: 190 - protein, 396 aa, Escherichia coli O157
MTTNTVSRKVAWLRVVTLAVAAFIFNTTEFVPVGLLSDIAQSFHMQTAQVGIMLTIYAWVVALMSLPFMLMTSQVERRKLLICLFVVFIASHVLSFLSWSFTVLVISRIGVAFAHAIFWSITASLAIRMAPAGKRAQALSLIATGTALAMVLGLPLGRIVGQYFGWRMTFFAIGIGALITLLCLIKLLPLLPSEHSGSLKSLPLLFRRPALMSIYLLTVVVVTAHYTAYSYIEPFVQNIAGFSANFATALLLLLGGAGIIGSVIFGKLGNQYASALVSTAIALLLVCLALLLPAANSEIHLGVLSIFWGIAMMIIGLGMQVKVLALAPDATDVAMALFSGIFNIGIGAGALVGNQVSLHWSMSMIGYVGTVPAFAALIWSIIIFRRWPVTLEEQTQ

SEQ ID NO: 191 - DNA, 1188 bp, Erwinia chrysanthemi
  CDS (1)..(1188): transl_table=11
atgacatccgcatcaccctcgcgctccaccgcctggctgcgcgtggtcacattggctatcgccgcgtttattttcaacaccacggaatttattccggtggggctgttgagcgacatcgccaactcctttgccatgaaaaccgaagatgtcgggctgatgatcaccatttatgcctggatcgtggcggtggcttcgctgatctgcatgttgctgaccagcggtattgagcgccgtaaattgctgattggcctgttcagcctgtttatcctcagccatctgctgtccgccgtcgcctggaactttaccgtgctggttatttcccgcgccggggtggcgctggcgcactcggtattctggtcgattaccgcctcgctggcgattcgcatggcgccccccggtaaacgcgcgcaggcgctggggctgatcgccaccgggtcgtcgctggcgatggtgctggggctgccgctggggcgggtcatcggtcagtatctcggctggcgcgtaaccttcctgaccatcgccgccggcgccacggtcgccatgatcctgttggcgcgcctgctgccgttgctgcccagcgagcattccggttcgctaggcagcgtgccgaagctgttccgtcgcccggcgctggtcggtatctacctgctgaccgtggtggtggtgaccgcgcatttcaccgcttacagctatattgagccgtttatccagacggtcgccggtctgccggaaaacttcaccaccctgattttgctgttgttcggctgcgccgggatcgccggcagtatgctctacagccgctacagcgaccgtttcccgattggctttctggtgaccgctatgctgctgttgctggcctgtctgacgttgctgatgccgttgtccggttatccgttcggcctgacgctgctgtgtctggtgtgggggctggcgatgatgtccatcgggctggcgatgcaggccaaagtgctgtcactggcgcctgacgccagtgacgtcgccatgtcgattttctccggcttgttcaatctcggcatcggcggcggcgcgctgctgggtagccaggtcagcctgcatctggggatggataaaatcggttatgtcggcgcgccgctggtgctggtggcgctgttcgccaccctactcagcgtctaccgcagcgtgcgactggtacattcccgcgtttga

SEQ ID NO: 192 - protein, 395 aa, Erwinia chrysanthemi
MTSASPSRSTAWLRVVTLAIAAFIFNTTEFIPVGLLSDIANSFAMKTEDVGLMITIYAWIVAVASLICMLLTSGIERRKLLIGLFSLFILSHLLSAVAWNFTVLVISRAGVALAHSVFWSITASLAIRMAPPGKRAQALGLIATGSSLAMVLGLPLGRVIGQYLGWRVTFLTIAAGATVAMILLARLLPLLPSEHSGSLGSVPKLFRRPALVGIYLLTVVVVTAHFTAYSYIEPFIQTVAGLPENFTTLILLLFGCAGIAGSMLYSRYSDRFPIGFLVTAMLLLLACLTLLMPLSGYPFGLTLLCLVWGLAMMSIGLAMQAKVLSLAPDASDVAMSIFSGLFNLGIGGGALLGSQVSLHLGMDKIGYVGAPLVLVALFATLLSVYRSVRLVHSRV

SEQ ID NO: 193 - DNA, 1188 bp, Erwinia carotovora subsp
  CDS (1)..(1188): transl_table=11
atgacccgttctccccgttcgaccgcctggttacgcgtcgtcagcctttctctggcggcattcatttttaacaccgctgaatttgcccctgttgcgttactgtcagacatcgctgccagtttttccatgagcgctgcgcaggttgggctgatcatcacgatttatgcctgggtagttgggctgatgtcgctgccctgcatgctgctgtccagtgatatggaacgacgtagcctgctgatcaaaatctttatcctgttcgccatcagtaatgtgctgtccggcctcgcctggaattattgggtgctgatcatggcccgtatcggcgtggcgctgtctcatgcggtgttctggtcgattacggcatcgttggtggtgcgtctggcgcctgcggataaaaaagcacaggcgttgagcctgctggcgaccggaacggcgctggcgctggtgctagggttaccgctggggcgtgtggtcgggcagtatctgggctggcgcgtgacgtttgtccttattggcctgatcgctgcggtgattatggtgggcctgatgaagctcctgcctgtgttgccgagcagcaattccggttcgttgaagagtttacctctcttgcttaagcgtccggcgttgctgtgtgtgtacggcctgacggtcatgatcgtgacggcgcattttaccgcctacagttacatcgagccgtttatcctgaaagtggcgttgttgagtgaaaacttcacgaccatcctgttactgatttttggcggtgccggaatcattggcagcatgttgtttagccgctacagcagcaagtatcctgccggcttcctgattgtgtcgttcgcgtttctggcggtgtgtttgctgctattgctacctttgtcattcagcggatggagcttgtcgacgctgtgcatcgtctggggtatcgccattatggcgctaagtctgggcatgcaggtcaaggtattgacgttggcatcggatgcaactgatgtagcgatggcactctattcggggatctataacatcgggatcggcggcggcgcgctactcggtaatcaggttattacccatttgggcctgcccgacatcggctacatgggtgcagcgatggcgatactggcgacggtgtgctgtatttttacgtttgttcgctattcccatgtgctaaaaacatcattaacgaactga

SEQ ID NO: 194 - protein, 395 aa, Erwinia carotovora subsp
MTRSPRSTAWLRVVSLSLAAFIFNTAEFAPVALLSDIAASFSMSAAQVGLIITIYAWVVGLMSLPCMLLSSDMERRSLLIKIFILFAISNVLSGLAWNYWVLIMARIGVALSHAVFWSITASLVVRLAPADKKAQALSLLATGTALALVLGLPLGRVVGQYLGWRVTFVLIGLIAAVIMVGLMKLLPVLPSSNSGSLKSLPLLLKRPALLCVYGLTVMIVTAHFTAYSYIEPFILKVALLSENFTTILLLIFGGAGIIGSMLFSRYSSKYPAGFLIVSFAFLAVCLLLLLPLSFSGWSLSTLCIVWGIAIMALSLGMQVKVLTLASDATDVAMALYSGIYNIGIGGGALLGNQVITHLGLPDIGYMGAAMAILATVCCIFTFVRYSHVLKTSLTN

SEQ ID NO: 195 - DNA, 1209 bp, Haemophilus influenzae
  CDS (1)..(1209): transl_table=11
atgtcgttatatttaaaagctgaaaaaatccaatcatggcgcgtgcttattatggcttgcgcaggatttatttttaatactacagaatttgtacccgttgcaatgttaagcgatattgcacaaagttttgatatgcaaactgctgatactggtttaatgatgacagtttatgcttggacggtgctaattatgtctttaccagcgatgcttgccacgggcaatatggaacgtaaaagtctgcttattaagcttttcattatatttattgttgggcatattttattggtcattgcatggaatttctggatattacttctcgctcgaatgtgtattgcattagcccattcggtgttttggtcaattactgcctcacttgtgatgcgcatctcacctaaacacaagaaaactcaagcattaggaatgctcgctattggcaccgcacttgccaccatcttaggcttaccgattgggagaatcgtcggacagcttgtcggttggcgagtcacttttggcattattgcggtactggcattatccatcatgtttttaattattcgattattgccaaatttacccagtaaaaatgctggctctattgcaagtttacccttgcttgcgaaacgcccattattactttggctttacgtaacaacggcaatcgtcatttcagcacattttactgcttatacttatatcgaaccatttatgattgatgtcgggcatttagatccaaattttgccacggctgtattattagtttttggtttctcaggcattgcagcaagcctattatttaacagattataccgatttgctcccacaaaatttattgttgtttcgatgagtttattgatgttctctctattgctcctgttattttcaactgaagcaataatagcaatgttcagccttgtgtttatttgggggattggcatttcttgtatcggactatctctacaaatgcgcgtactaaaacttgcgccagatgcaaccgatgttgccacagctatttactcgggcattttcaatgcaggaattggcgcaggcgcattatttggaaaccttgcgacaacctatttaggattaaatgaaattggttatacaggcgcagcattaggtttaatcggtttcatcatttttattacaacgcacttaaaatatcgccatacctttcttctgcaaaacaataaaaaaataaccgcactttag

SEQ ID NO: 196 - protein, 402 aa, Haemophilus influenzae
MSLYLKAEKIQSWRVLIMACAGFIFNTTEFVPVAMLSDIAQSFDMQTADTGLMMTVYAWTVLIMSLPAMLATGNMERKSLLIKLFIIFIVGHILLVIAWNFWILLLARMCIALAHSVFWSITASLVMRISPKHKKTQALGMLAIGTALATILGLPIGRIVGQLVGWRVTFGIIAVLALSIMFLIIRLLPNLPSKNAGSIASLPLLAKRPLLLWLYVTTAIVISAHFTAYTYIEPFMIDVGHLDPNFATAVLLVFGFSGIAASLLFNRLYRFAPTKFIVVSMSLLMFSLLLLLFSTEAIIAMFSLVFIWGIGISCIGLSLQMRVLKLAPDATDVATAIYSGIFNAGIGAGALFGNLATTYLGLNEIGYTGAALGLIGFIIFITTHLKYRHTFLLQNNKKITAL

SEQ ID NO: 197 - DNA, 1191 bp, Haemophilus influenzae
  CDS (1)..(1191): transl_table=11
atgtcgttatatttaaaagctgaaaaaatccaatcatggcgcgtgcttattatggcttgcgcaggatttatttttaatactacagaatttgtacccgttgcaatgttaagcgatattgcacaaagttttgatatgcaaaccgccgatactggtttaatgatgacagtttatgcttggacggtgctaattatgtctttgcctgcgatgcttgccacgggcaatatggaacgtaaaagtctgcttattaagcttttcattatatttattgttgggcatattttatcggtcattgcatggaatttctggatattacttctcgctcgaatgtgtattgcattagcacattcggtgttttggtcaattactgcctcacttgtgatgcgcatctcacctaaacacaagaaaactcaagcattaggaatgctcgctattggcaccgcacttgccacaatcttaggcttaccgattggacgaattgtcggacagctcgtcggttggcgggtcacttttggcattattgcggtactggcattatccatcatgtttttaattattcgattattgccaaatttacccagtaaaaatgctggctctattgcaagtttacccttgcttgctaaacgtccattattactttggctttacgtaacaacggcaatcgtcatttcagcacactttactgcttatacttatatcgaaccatttatgattgatgtagggcatttagatccaaattttgccacggctgtattattagtttttggtttctcaggcattgcagcaagcctattatttaacagattataccgatttgctcccacaaaatttattgttgtttcgatgagtttattgatgttctccctcttgctactcctcttttcgaccaaaacaataatagcaatgttcagccttgtgtttatttgggggattggcatttcttgtatcggactatctctacaaatgcgcgtactaaaacttgcgccagatgcaaccgatgttgccacagctatttactcgggcattttcaatgcaggaattggcgcaggcgcattatttggaaaccttgcgacaacctatttaggattaaatgaaattggttatacaggcgcagcattaggtttaatcggtttcatcatttttattacaacgcacttaaaatatcgccatacatttcttctgcaaaacaaataa

SEQ ID NO: 198 - protein, 396 aa, Haemophilus influenzae
MSLYLKAEKIQSWRVLIMACAGFIFNTTEFVPVAMLSDIAQSFDMQTADTGLMMTVYAWTVLIMSLPAMLATGNMERKSLLIKLFIIFIVGHILSVIAWNFWILLLARMCIALAHSVFWSITASLVMRISPKHKKTQALGMLAIGTALATILGLPIGRIVGQLVGWRVTFGIIAVLALSIMFLIIRLLPNLPSKNAGSIASLPLLAKRPLLLWLYVTTAIVISAHFTAYTYIEPFMIDVGHLDPNFATAVLLVFGFSGIAASLLFNRLYRFAPTKFIVVSMSLLMFSLLLLLFSTKTIIAMFSLVFIWGIGISCIGLSLQMRVLKLAPDATDVATAIYSGIFNAGIGAGALFGNLATTYLGLNEIGYTGAALGLIGFIIFITTHLKYRHTFLLQNK

SEQ ID NO: 199 - DNA, 1176 bp, Helicobacter pylori J99
  CDS (1)..(1176): transl_table=11
atgatgataaccaaacaatcgtatcaaagattcgctttaatgcgggtttttgtgttttcgctttcggcgtttatttttaacaccacggagtttgtccctgttgcacttctgtcagacattgcgaaaagctttgaaatggagagcgcaacagtggggcttatgatcactgcttatgcatgggtggtgtctcttggctcattgcccttgatgctgcttagcgctaaaattgaaaggaaacgcttattgctttttcttttcgctctttttattttcagccatatcctttcagcgttagcgtggaatttttgggtgcttctcctttctcgtatgggtatcgcttttgcccactctattttttggtccatcacggcttctttagtcattcgtgtcgcgccaagaaacaaaaaacaacaggccttagggctgttagcgttagggagttcgttagcgatgattttagggttgccgcttgggaggatcattgggcaaattttggattggcgatccacttttggcgtgattgggggcgttgcgactcttataatgctgcttatgtggaaattgctcccgcatctaccgagtagaaacgccggcacgctcgcaagtgtccctatattaatgaaacgcccgcttttagtggggatttatttgcttgtgatcatggttatttctgggcatttcaccacttatagctatattgagccttttatcattcaaatcagccaattttctcctgacattacaacgctaatgttgtttgtgtttgggttagcaggcgtggtggggagttttttgttcggccgtttgtatgcgaaaaattcaagaaaatttatcgcttttgcaatggttttagtcatttgcccgcaactcttgctttttgtgtttaaaaacttagagtgggtgatctttttgcagattttcttgtgggggattgggattacttcactcaccattgcgttacaaatgagggtgttgcaactcgcgcccgatgccacggatgttgcgagcgcgattttttcggggagctataatgtggggattggatcaggagcgctgtttggcagtattgtgatccaccaattagggctagaatatattggctttgtgggtggggctttgggtttgttggcgctattttggcttagattcattacgataaaatttaaaaaaacttaa

SEQ ID NO: 200 - protein, 391 aa, Helicobacter pylori J99
MMITKQSYQRFALMRVFVFSLSAFIFNTTEFVPVALLSDIAKSFEMESATVGLMITAYAWVVSLGSLPLMLLSAKIERKRLLLFLFALFIFSHILSALAWNFWVLLLSRMGIAFAHSIFWSITASLVIRVAPRNKKQQALGLLALGSSLAMILGLPLGRIIGQILDWRSTFGVIGGVATLIMLLMWKLLPHLPSRNAGTLASVPILMKRPLLVGIYLLVIMVISGHFTTYSYIEPFIIQISQFSPDITTLMLFVFGLAGVVGSFLFGRLYAKNSRKFIAFAMVLVICPQLLLFVFKNLEWVIFLQIFLWGIGITSLTIALQMRVLQLAPDATDVASAIFSGSYNVGIGSGALFGSIVIHQLGLEYIGFVGGALGLLALFWLRFITIKFKKT

SEQ ID NO: 201 - DNA, 1176 bp, Helicobacter pylori
  CDS (1)..(1176): transl_table=11
atgatgataaccaaacaatcgtatcaaaagttcgccttaatgcgggtttttgtgttttcgctttcggcgtttatttttaacaccacggagtttgtccctgtcgcgcttctgtcagatattgcgaaaagctttgaaatggagagcgcaacggtggggcttatgatcactgcttatgcatgggtggtgtctcttggctcattgcccttgatgctgcttagcgctaaaattgaaaggaaacgcttattgctttttcttttcgccctttttattctcagccatatcctttcagcgttagcgtggaatttttgggtgctactcctttctcgtatgggtatcgcttttgcccactctattttttggtccatcacggcttctttagtcattcgtgtcgcgccaagaaataaaaaacaacaggccttagggctgttagcgttagggagttcgttagcgatgattttagggttgccgcttgggaggatcattgggcaaattctagattggcgttccacttttggcgtgatcgggggcgttgcgacccttatagcgttgcttatgtggaaattgctcccgcatctacccagtagaaacgcaggcacgctcgcaagtgtccctgtattaatgaaacggccgcttttaatggggatttatttgcttgtgatcatggtcatctctgggcatttcaccacttatagttatattgagccttttatcattcaaatcagccaattttctcctgacattacaacgctaatgttgtttgtgtttgggttagcgggcgtggtggggagttttttgttcggccgtttgtatgcaaaaaattcaagaaaatttatcgcttttgcgatggttttagtcatttgcccgcaactcttgctttttgtgtttaaaaacttagagtgggtggttttcttgcaaattttcttatgggggattgggatcacttcgcttgggatttccttgcaaatgagggtgttgcagcttgcgccggatgccacggatgttgcgagtgcgatttactcagggagctataatgtggggattggatcaggagcgctgtttggcagtattgtgatccaccaactagggctaggatatattggctttgtgggtggggctttaggtttgttggcgctcttttggcttagattcattacgataaagtttaaaaaaacataa

SEQ ID NO: 202 - protein, 391 aa, Helicobacter pylori
MMITKQSYQKFALMRVFVFSLSAFIFNTTEFVPVALLSDIAKSFEMESATVGLMITAYAWVVSLGSLPLMLLSAKIERKRLLLFLFALFILSHILSALAWNFWVLLLSRMGIAFAHSIFWSITASLVIRVAPRNKKQQALGLLALGSSLAMILGLPLGRIIGQILDWRSTFGVIGGVATLIALLMWKLLPHLPSRNAGTLASVPVLMKRPLLMGIYLLVIMVISGHFTTYSYIEPFIIQISQFSPDITTLMLFVFGLAGVVGSFLFGRLYAKNSRKFIAFAMVLVICPQLLLFVFKNLEWVVFLQIFLWGIGITSLGISLQMRVLQLAPDATDVASAIYSGSYNVGIGSGALFGSIVIHQLGLGYIGFVGGALGLLALFWLRFITIKFKKT

SEQ ID NO: 203 - DNA, 1200 bp, Klebsiella pneumoniae subsp
  CDS (1)..(1200): transl_table=11
atgactacgaatacggtctcacgcaaggtagcgtggctacgtgtcgtgacgttggccatcgccgcgtttatttttaacaccacagagtttgccccggtcggtctgttgtcggatattgccgacagcttcggcatggaaaccgcccaggtgggcatgatgctgaccatctacgcatgggtggtggcgttaatgtcgctgccgtttatgctgctgaccagcaaagtggagcgccggcgcctgcttatcggcctgtttattctgtttatcgccagccacgtcctgtcgttttttgcctggaattttgacgtgctagtgatcagccgcattggtatcgcctttgcgcatgcagtgttctggtcgataacgtcggcactggccatccgcatggccccgccgggcaaacgggcgcaggcgctgagcctgatcgccaccggcaccgcgctggcgatggtgtttggtattccgatcgggcgcattatcggccagtactttggctggcggatgaccttcctggcgatcggcctcggcgcgttagccaccctggcctgcctcgtaaaactgctgccgaccctgccgagcgaacattctggctcgctgaaaagcctgccggtgctgttccgccgcccggcgctggtcagcgtgtacattctgaccgtggtggtggtgaccgctcattataccgcctacagctatatcgagccctttgtccagacggtagcgggcctgagcggcaactttgccaccgtactgctgctgatccttggcggggccggtattatcggcagcattctgttcggtaaactcggtaaccagcacgcgtcggggctgataagcctggcgattgccctgctgctcgcctgcctgctgctgctgctgccggcctcgcataacccgcagcacctgatgctgctcagcatcttctggggggtggcgatcatgattatcggtctcggcatgcaggtgaaagtgctggcctccgctccggatgccaccgacgtcgccatgtctctgttctcgggcatctttaatatcggcataggcgccggggcgctggtcggcagccaggtgagtctgcatctttccatggcctccgtcggctacgtcggcgccattccggcgctggtcgcgctggtctggtcgctgatgatattccgtcgctggccggtatcgctggaagaccatcagccgcaccactcctga

SEQ ID NO: 204 - protein, 399 aa, Klebsiella pneumoniae subsp
MTTNTVSRKVAWLRVVTLAIAAFIFNTTEFAPVGLLSDIADSFGMETAQVGMMLTIYAWVVALMSLPFMLLTSKVERRRLLIGLFILFIASHVLSFFAWNFDVLVISRIGIAFAHAVFWSITSALAIRMAPPGKRAQALSLIATGTALAMVFGIPIGRIIGQYFGWRMTFLAIGLGALATLACLVKLLPTLPSEHSGSLKSLPVLFRRPALVSVYILTVVVVTAHYTAYSYIEPFVQTVAGLSGNFATVLLLILGGAGIIGSILFGKLGNQHASGLISLAIALLLACLLLLLPASHNPQHLMLLSIFWGVAIMIIGLGMQVKVLASAPDATDVAMSLFSGIFNIGIGAGALVGSQVSLHLSMASVGYVGAIPALVALVWSLMIFRRWPVSLEDHQPHHS

SEQ ID NO: 205 - DNA, 1194 bp, Mannheimia succiniciproducens
  CDS (1)..(1194): transl_table=11
atgctaaatagaaaactggttaatcgtgttgaatatttccgtgtgattgttatggcgtttgccgcattcgtatttaataccacggaatttgtgccggtggcattacttagtgatatagccgatagtttccaaatgccggtctcaaacacggggctgatgattactatctatgcctggattgtttccttatgttctttaccgtgtatgctgatgacggcaaggctggaacgtcgccgtttactaatcagtctgtttattttatttattgcgagtcatattctttccgcatttgcttggaattatgaagtgctattgatcgctcgtgccggagtagcgttaacgcattctattttttggtcgattacagctgccttaactattcgtattgcaccgaaaaataagaaaacccaagctttaggtctattagcgttaggatcctccctggcaatggtattggggctgcctttagggcggattatcggtcaggcattcggctggcgtacaacattcactttaattggtgtttttgccgcgctgattttaattttaattgttcgcttattgccaaaaattccgagtcaaaacgccggttcattaaaaagtttaccggtacttgctcgccggccaatgctgattacactgtatattttcactattttagtgatttctgcgcattttaccgcttatagttatattgaaccttttatgattcaaatcggccgggtttcggctaataaggcaactgccgtgttgttgattttcggtgtgtccggcgtggttgccagtgttttgttcagccggctttatcgtattgcgccaattaagtttttactgagttccgtagctattttaactttggcattgatttgtttatacggggttagcggcatatccggtgcgatattcgcattggttttcatttggggcgttgcaatttcggcactcagtctggcaatgcagatgaaggtactgcaactagctccggacgctactgatgtggcaacagccatttattcgggcatttataatatcggtatcggcggcggcgccttaattggtaatcaggttatgcaacatttaggtttggcaaatatcggttatgtgggggcggttctcggtgcggtaagtattatttggtttattctgatgtttttaaaattcagtcgggttcctctcaatattgttaatcagtaa

SEQ ID NO: 206 - protein, 397 aa, Mannheimia succiniciproducens
MLNRKLVNRVEYFRVIVMAFAAFVFNTTEFVPVALLSDIADSFQMPVSNTGLMITIYAWIVSLCSLPCMLMTARLERRRLLISLFILFIASHILSAFAWNYEVLLIARAGVALTHSIFWSITAALTIRIAPKNKKTQALGLLALGSSLAMVLGLPLGRIIGQAFGWRTTFTLIGVFAALILILIVRLLPKIPSQNAGSLKSLPVLARRPMLITLYIFTILVISAHFTAYSYIEPFMIQIGRVSANKATAVLLIFGVSGVVASVLFSRLYRIAPIKFLLSSVAILTLALICLYGVSGISGAIFALVFIWGVAISALSLAMQMKVLQLAPDATDVATAIYSGIYNIGIGGGALIGNQVMQHLGLANIGYVGAVLGAVSIIWFILMFLKFSRVPLNIVNQ

SEQ ID NO: 207 - DNA, 1215 bp, Pasteurella multocida
  CDS (1)..(1215): transl_table=11
atgttaccttttcaggccgctcgtcaacgtcaatttgcgcgtgttatcacctttgcgcttgctgggtttgtgtttaatacaacagagtttattcctgttgccttactctctgatattgcgcaaagctttgcgatgcccgtatcacaaacgggtttaataattactgtttatgcttgggtagtgtcattaatgtcattgccttttatgttactgactgcaaaagcagagcgtagagggttattgattaaattactggtgttatttattttaagtcatctgttatcggtgatcgcttgggatttttgggtattagtattagccagaataggtgtcgcattaacccattctattttttgggcaattactgcgtctttagtcattcgggttgcgcctaaagataaaaaatcacaggcaattggactacttgctataggttgttctttggcaatgattttaggcttgcccctcggacgtttgattgggcaattctttggttggcgtgcaacctttgccattattgcccttattgcgataggcattttatgcttgttttatcaacttttaccgcacttaccaagtaagaatgcgggttctttaaatagtctgccaacgctttttaaacgtccattattgcttgggctttatgcgcttactatgattattatttcggctcattttactgcgtatagctatattgaaccctttatgctcaatatcagcacaatgagtcatagtatggcaacttttgttctcttcgtcttcggtctttctggcattaccgctagtttgttatttaatcgctattataatgcaggaccgatccgttttattttgttttcaatgggactactcaccgctacacttttgctcttattcattgcgagccaacaaacgtggacaatgtttttattaaccttcttctggggaattggcatagcaggcattggcttaggattacaaattcgagtgttacaccttgcccctgatgctacagacgtcgcgatggcaatctattctgggatttataatattggcattggggctggcgcattgctaggtaatcaagtgatgcaacattatgggctagcctatattggtgttgctggggcgttatttgcagtattcgggcttgttttatttattttagtccagtggaaatatggtcacttagcgccaaataagctatcgactgaagagaagaaaaagtgcggttaa

SEQ ID NO: 208 - protein, 404 aa, Pasteurella multocida
MLPFQAARQRQFARVITFALAGFVFNTTEFIPVALLSDIAQSFAMPVSQTGLIITVYAWVVSLMSLPFMLLTAKAERRGLLIKLLVLFILSHLLSVIAWDFWVLVLARIGVALTHSIFWAITASLVIRVAPKDKKSQAIGLLAIGCSLAMILGLPLGRLIGQFFGWRATFAIIALIAIGILCLFYQLLPHLPSKNAGSLNSLPTLFKRPLLLGLYALTMIIISAHFTAYSYIEPFMLNISTMSHSMATFVLFVFGLSGITASLLFNRYYNAGPIRFILFSMGLLTATLLLLFIASQQTWTMFLLTFFWGIGIAGIGLGLQIRVLHLAPDATDVAMAIYSGIYNIGIGAGALLGNQVMQHYGLAYIGVAGALFAVFGLVLFILVQWKYGHLAPNKLSTEEKKKCG

SEQ ID NO: 209 - DNA, 1191 bp, Pseudomonas aeruginosa
  CDS (1)..(1191): transl_table=11
atggacagcacctccgaaacccgcagcggcagctggctgagcgtgatcgccctggccctggccgccttcatcttcaacaccacggagttcgtcccggtcggcctgctcagcgacatcggccacagcttcgagatgcccacctcgcaggtcggcctgatgttgaccatctatgcctgggtggtgtcgctggcctcgttgccgatgatgctgctgacccgcaatatcgagcggcgcaagctgctggtcggggtattcctgctgttcatcgccagccacgtgctgtccgggctggcctggagcttccaggtgctgatgctcagccggatcggcattgccttcgcccacgcggtgttctgggccatcaccgcttcgctggcggtgcgcgtggcgccgccgggacagcaggccaaggcgctagggctgctggccaccggcaccaccctggcgatggtcctgggcatcccgctggggcgggtggtcggcgaggccctgggctggcgtaccaccttcatggccatcgccggactctcggtgctgaccttgctctacctggcgcgctccctgccgctgctgccaagccagaattccggttccctgcgcagcctgccgatgctgttccgacgcccggcgctggtttgcctgtacgtgctgaccgtggtggtgatcagcgcccagttcaccgcctacagctacatcgagcccttcgccaagcaggtggcgcagatgagcggcgaggcgaccaccctgctgttgctgttgttcggcggcgccgggatcttcggttcgatcctcttcagccgctacagcgaggctttcccgcgaggcttcctgctggccgcgatcctcgccttgggcagcagcctggcgctgctgttgccgctgtccgcgcagccgacctggctgatggcgctcagcctgctctggggcatgtcgatcatgtgcttcggcctggcccagcagtcccgcgtcctgcgcctcgcctcggacgccaccgacgtggccatggcgctgttctccggcctgtacaacgtcggcatcggcgccggcgcgctgctcggcagcgtggtcagcgaacgcatgggcctggcctcgatcggcaacgtcggcgccgcgctggcgctggccggcctgctgctcgccctgttcgccgcactgcgctacgcggaggcgctgaaaaccacgtcgttgtga

SEQ ID NO: 210 - protein, 396 aa, Pseudomonas aeruginosa
MDSTSETRSGSWLSVIALALAAFIFNTTEFVPVGLLSDIGHSFEMPTSQVGLMLTIYAWVVSLASLPMMLLTRNIERRKLLVGVFLLFIASHVLSGLAWSFQVLMLSRIGIAFAHAVFWAITASLAVRVAPPGQQAKALGLLATGTTLAMVLGIPLGRVVGEALGWRTTFMAIAGLSVLTLLYLARSLPLLPSQNSGSLRSLPMLFRRPALVCLYVLTVVVISAQFTAYSYIEPFAKQVAQMSGEATTLLLLLFGGAGIFGSILFSRYSEAFPRGFLLAAILALGSSLALLLPLSAQPTWLMALSLLWGMSIMCFGLAQQSRVLRLASDATDVAMALFSGLYNVGIGAGALLGSVVSERMGLASIGNVGAALALAGLLLALFAALRYAEALKTTSL

SEQ ID NO: 211 - DNA, 1191 bp, Pseudomonas aeruginosa
  CDS (1)..(1191): transl_table=11
atggacagcacctccgaaacccgcagcggcagctggctgagcgtgatcgccctggccctggccgccttcatcttcaacaccacggagttcgtcccggtcggcctgctcagcgacatcggccacagcttcgagatgcccacctcgcaggtcggcctgatgttgaccatctatgcctgggtggtgtcgctggcctcgttgccgatgatgctgctgacccgcaatatcgagcggcgcaagctgctggtcggggtattcctgctgttcatcgccagccacgtgctgtccgggctggcctggagcttccaggtgctgatgctcagccggatcggcattgccttcgcccacgcggtgttctgggccatcaccgcttcgctggcggtgcgcgtggcgccgccgggacagcaggccaaggcgctagggctgctggccaccggcaccaccctggcgatggtcctgggcatcccgctggggcgggtggttggcgaggccctgggctggcgtaccaccttcatggccatcgccggactctcggtgctgaccttgctctacctggcgcgctccctgccgctgctgccaagccagaactccggttccctgcgcagcctgccgatgctgttccgacgcccggcgctggtttgcctgtacgtgctgaccgtggtggtgatcagcgcccagttcaccgcctacagctacatcgagcccttcgccaagcaggtggcgcagatgagcggcgaggcgaccaccctgctgttgctgttgttcggcggcgccgggatcttcggttcgatcctcttcagccgctacagcgaggctttcccgcgaggcttcctgctggccgcgatcctcgccttgggcagcagcctggcgctgctgttgccgctgtccgcgcagccgacctggctgatggcgctcagcctgctctggggcatgtcgatcatgtgcttcggcctggcccagcagtcccgcgtcctgcgcctcgcctcggacgccaccgacgtggccatggcgctgttctccggcctgtacaacgtcggcatcggcgccggcgcgctgctcggcagcgtggtcagcgaacgcatgggcctggcctcgatcggcaacgtcggcgccgcgctggcgctggccggcctgctgctcgccctgttcgccgcactgcgctacgcggaggcgctgaaaagcacgtcgttgtga

SEQ ID NO: 212 - protein, 396 aa, Pseudomonas aeruginosa
MDSTSETRSGSWLSVIALALAAFIFNTTEFVPVGLLSDIGHSFEMPTSQVGLMLTIYAWVVSLASLPMMLLTRNIERRKLLVGVFLLFIASHVLSGLAWSFQVLMLSRIGIAFAHAVFWAITASLAVRVAPPGQQAKALGLLATGTTLAMVLGIPLGRVVGEALGWRTTFMAIAGLSVLTLLYLARSLPLLPSQNSGSLRSLPMLFRRPALVCLYVLTVVVISAQFTAYSYIEPFAKQVAQMSGEATTLLLLLFGGAGIFGSILFSRYSEAFPRGFLLAAILALGSSLALLLPLSAQPTWLMALSLLWGMSIMCFGLAQQSRVLRLASDATDVAMALFSGLYNVGIGAGALLGSVVSERMGLASIGNVGAALALAGLLLALFAALRYAEALKSTSL

SEQ ID NO: 213 - DNA, 1200 bp, Pseudomonas putida
  CDS (1)..(1200): transl_table=11
atgaacggacccacacctacccacatatcgcccgcaacgggcagcggcagctggcttagcgtgatcgccctggccttggcggccttcatcttcaacaccaccgagttcgttccggtggcgttgctcagcgacattggccgcagcttcgacatgagcaccgcccaggtgggcctgatgctgaccatctacgcctgggtggtggcgctggcctcgctgccgatgatgctgctgacccgcaacatcgaacggcggcgtctgctgctgttcgtgttcctggtgttcatcgtcagccatttgctgtcttggttgtcgcaaagctttgccatgctgctggtcagccgtatcggcattgccctggcgcatgcggtgttctgggccatcaccgcttcgctggcggtgcgtgtggcgccaccagggcagcaggccaaggcgctgggcctgttggccaccggtactaccctggccatggtcctgggtattccgctgggccgcgtggtaggcgaggcgttgggctggcgcatcacgttcctgagcatcgccggggtggcgctggccaccatgctgtgcctgatgaaatcgctgccgctgctgcccagccagaactccggctcgttgcgcagcctgccgatcctgttcaagcgcccggcgctggtgatcacctacctgctggtgacgctggtgattaccgcgcagttcactgcctacagctacattgaaccgtttgcactgcacgtggcgcagattggcggtgagcgcaccacgctggtgttgttgctgttcggcggtgcgggggtattcggctcgttgctgttcagccgctacagcgaccgtttcccccatggcttcctggtaggctcgatcggcttgctcgccgcgtgcctgttgctgttgctgccgctctcgggcaacttctacgcgtttgcggcgctgagcatgttctggggtgtggcgatcctcagcttcagcctgtcgctgcagtccaagacgctgaagctggcgtcggatgccaccgatgtggccatggcgctgttctcgggtatctacaacatcggcattggtggtggtgcgctgctgggcagtattgtcagcagccagatggacgtggcgaatattggcctggtgggcggtagcgtggcggtggtcgggctggtgctggccgttgccagcactcggcgcttccgtgaggcgctgacacgctga

SEQ ID NO: 214 - protein, 399 aa, Pseudomonas putida
MNGPTPTHISPATGSGSWLSVIALALAAFIFNTTEFVPVALLSDIGRSFDMSTAQVGLMLTIYAWVVALASLPMMLLTRNIERRRLLLFVFLVFIVSHLLSWLSQSFAMLLVSRIGIALAHAVFWAITASLAVRVAPPGQQAKALGLLATGTTLAMVLGIPLGRVVGEALGWRITFLSIAGVALATMLCLMKSLPLLPSQNSGSLRSLPILFKRPALVITYLLVTLVITAQFTAYSYIEPFALHVAQIGGERTTLVLLLFGGAGVFGSLLFSRYSDRFPHGFLVGSIGLLAACLLLLLPLSGNFYAFAALSMFWGVAILSFSLSLQSKTLKLASDATDVAMALFSGIYNIGIGGGALLGSIVSSQMDVANIGLVGGSVAVVGLVLAVASTRRFREALTR

SEQ ID NO: 215 - DNA, 1227 bp, Pseudomonas putida; identical to SEQ ID NO: 169
  CDS (28)..(1227): transl_table=11

SEQ ID NO: 216 - protein, 399 aa, Pseudomonas putida
MNGPIPTHLPPTTGSGSWLSVIALALAAFIFNTTEFVPVALLSDIGRSFDMSTAQVGLMLTIYAWIVALASLPMMLLTRNIERRRLLLFVFLVFIVSHLLSWLSQSFAMLLVSRIGIALAHAVFWSITASLAVRVAPPGQQAKALGLLATGTTLAMVLGIPLGRVVGEALGWRITFLSIAGVALATMLCLIKSLPLLPSQNSGSLRSLPVLFKRPALVITYLLVTLVITAQFTAYSYIEPFALHVAQIGGDRTTLLLLLFGGAGVFGSLLFSRYSERFPHGFLVGSIGVLAACLLLMLPLSGNFYVFAVLSMFWGVAILSFSLALQSKTLKLASDATDVAMALFSGIYNIGIGGGALLGSIVSSQMDVADIGLVGGSVAVVGLVLAVASTRRFREALTR

SEQ ID NO: 217 - DNA, 1224 bp, Pseudomonas syringae pv
  CDS (1)..(1224): transl_table=11
ttgatcacttcacctcccaatgaacaaaccggtgagcacaccggcagctggctgggcgttttcgcgctggccctggcggcctttattttcaacaccaccgagtttgtgccgatcggcttgctgagcaacatcggccagagcttcgacatgacgccggcacaagtcggtttgatgctgacgatctacgcctgggtcgtctcgctgatgtcgctgcccatgatgctggcgacgcgcaacattgagcgccgcaaactgttgatgtttgtgttcggcctgtttgtggtcagccacgtcatctctgcgatggcgtccagcttcgcgattctgctggtgagccgtgtcggcattgcgtttgcgcatgcggtgttctggtcggtcacggcctcccttgccgtgcgcatcgcaccgccgggcaagcaggttcaagcccttggtttgctggcgaccggcacttcgctggcgatggttctgggtattccgctgggacgtgtgctgggtgaagccctgggttggcgcaccacattcctcggtatcgccggggtcgctgcgctggtggtctttctgctggcgcgcgcgctgccgttgctgccgagccagaactccggctcgctgcgcagcctgcctatcctgttcaaacgcccgcgcctgatggccatctacctgttgactgccatcgtggtgactgcgcacttcaccgcctacagctacatcgagccgttcacgcaaaccgtgtcgcgcctcagcggtgaaatgaccaccatcttgctgctggtcttcggcggtgccggaatcatgggctcgattgtgttcagcctgttcagcgaccggtttccaaacggtctgttgatcactgccattggcaccctggcggtctgcttgctgatgctgttgccactgtctggcgacgcaacaatgctcggcacgctgaccgtggtctgggggatggcgatcatgtgcttcgggctgttgctgcaggcgcgcgtgctgtcgctggcaccggatgcgaccgacgtggcgatggcgctgttttccgggatattcaacatcggcattggcggcggtgccttgctgggcagcgtcgtcagcagccacctgggcgtggcgaatgtcggcattgtaggcggcctgttggcccttggcgggttggggctgatttgctatacgacgtttctattcggcaagacgcagccccatgcagagatgcaggctgacgctaaacactga

SEQ ID NO: 218 - protein, 407 aa, Pseudomonas syringae pv
MITSPPNEQTGEHTGSWLGVFALALAAFIFNTTEFVPIGLLSNIGQSFDMTPAQVGLMLTIYAWVVSLMSLPMMLATRNIERRKLLMFVFGLFVVSHVISAMASSFAILLVSRVGIAFAHAVFWSVTASLAVRIAPPGKQVQALGLLATGTSLAMVLGIPLGRVLGEALGWRTTFLGIAGVAALVVFLLARALPLLPSQNSGSLRSLPILFKRPRLMAIYLLTAIVVTAHFTAYSYIEPFTQTVSRLSGEMTTILLLVFGGAGIMGSIVFSLFSDRFPNGLLITAIGTLAVCLLMLLPLSGDATMLGTLTVVWGMAIMCFGLLLQARVLSLAPDATDVAMALFSGIFNIGIGGGALLGSVVSSHLGVANVGIVGGLLALGGLGLICYTTFLFGKTQPHAEMQADAKH

SEQ ID NO: 219 - DNA, 1209 bp, Pseudomonas syringae pv
  CDS (1)..(1209): transl_table=11
ttgataacttcacctccaaacgagcaggcaggtagctggcttggcgtattcgcgctggccttggcggccttcattttcaataccaccgagttcgtgccgatcggtctgctgagtaacatcggccagagcttcgaaatgaccccggcccaggtcgggctgatgctcacgatctatgcctgggtcgtgtcgctgatgtcgttgccgatgatgctggcgacgcgcaacatcgagcgccgcaagttgctgatgttcgtgttcggcctgttcgtggtcagccacgtcctttccgcgattgcccccagcttcgcgatcctgctggtgagccgggtcggtatcgcgtttgcacatgcggtgttctggtcggtcacggcgtcgctggccgtgcgcatcgcaccgcccggcaagcaggttcaggcgctgggcctgctggcgaccggtacgtcgctggcgatggtattgggtattccgctgggccgcgtgctgggtgaagccctgggctggcgcaccacctttctgggcatcgccgccatcgctgcgctggtagtcttcctgctggttcgcgcgctgcctttgctgcccagtcagaactcaggctcgttgcgcagcctgccgatcctgttcaagcgcccacggctgatggcgatctacctgctgaccgccatcgtggtgaccgctcatttcaccgcctacagctatatcgagccgttcactcagaccgtgtccctgctcagcggcgaaatgaccacgatcctgctgctggtctttggcggggccgggatcatgggctcgatcatcttcagcctgttcagcgatcgcttccccaacgggctgttgatcacggccattggcacgctgaccctgtgcctgctgatgctgttgccgctctccggtgatgccgtgacgctcggcacgctgaccattatctggggcatggcgatcatgtgcttcggcctgaccttgcaggcgcgcgtactgtcgctggcacccgatgcgaccgatgtggcgatggcgctgttctcgggcatcttcaatatcggtattggcggcggcgcgctgctcggcagtgtggtcagcagccatctcggggttgccaatgtcggcatcgtcggcggcctgctggccctcggcgggttggggctgtgctgctacacaacgcatcacttcggcaaggtccggcctgctgccgagatgcaggccgagagcaaatag

SEQ ID NO: 220 - protein, 402 aa, Pseudomonas syringae pv
MITSPPNEQAGSWLGVFALALAAFIFNTTEFVPIGLLSNIGQSFEMTPAQVGLMLTIYAWVVSLMSLPMMLATRNIERRKLLMFVFGLFVVSHVLSAIAPSFAILLVSRVGIAFAHAVFWSVTASLAVRIAPPGKQVQALGLLATGTSLAMVLGIPLGRVLGEALGWRTTFLGIAAIAALVVFLLVRALPLLPSQNSGSLRSLPILFKRPRLMAIYLLTAIVVTAHFTAYSYIEPFTQTVSLLSGEMTTILLLVFGGAGIMGSIIFSLFSDRFPNGLLITAIGTLTLCLLMLLPLSGDAVTLGTLTIIWGMAIMCFGLTLQARVLSLAPDATDVAMALFSGIFNIGIGGGALLGSVVSSHLGVANVGIVGGLLALGGLGLCCYTTHHFGKVRPAAEMQAESK

SEQ ID NO: 221 - DNA, 1191 bp, Salmonella arizonae
  CDS (1)..(1191): transl_table=11
atgactatcaatccagtttcccgcaaagtcgcgtggctacgggtagttacgcttgctatcgccgcttttatttttaataccacggaatttgtgccggtcggtttactgtcagacattgccgaaagctttcatatgcaaaccgcgcaggtcggcatcatgctaaccatttatgcctgggtagttgccgtaatgtcgctgccttttatgctcctcaccagtcaaatagagcgccgtaagctactcatttgtctgtttgttctgtttattgccagtcacgtgctctccttcctggcgtggaactttaccgtgctggtcattagccgtatcggcatcgctttcacccacgctattttctggtcgataaccgcatctctggcgatccgcctggcccctgccggaaaacgcgcgcaggcattaagtctgatagcgaccggaaccgcgctggccatggtgcttggactgccgataggccgcgttgttggccagtattttggctggcgcaccactttctttgccatcggtatgggcgcattaattacgctgatatgcctgattaagcttctaccgaaattgccgagcgaacattccggctcactaaaaagtttacctttgctattccgacgcccggcgctgatgagcctttatttactgaccgccgttgtggtgacagcgcattacacggcttatagctatattgaacccttcgtccagaatgtagccgggctcagtgcgaattttgctaccgttctgttactgatcctgggcggcgcagggatcatcggcagccttgtgtttggcaaactgggtaatcagcatgcctcgttgctcgtcagtatcgctatttctttgctggttgtctgtctgcttctgctgctgcctgcggcggatagcgaagcgcatctggccctgctgagcattttttggggaatcgcgattatggtgatagggctcggtatgcaggtgaaagtgttagcgctggcgccggatgctaccgatgtcgcgatggcgctattttcaggcatctttaatatcggtattggcgctggcgcgctggcaggaaatcaggtgagtttgcactggtcaatgtcgaccatcggttatattggcgctgtacccgcctgtgcggcgctggtatgggctgtgctcatattccgtaaatggcccgtgacgctggaagaacagccgcgttaa

SEQ ID NO: 222 - protein, 396 aa, Salmonella arizonae
MTINPVSRKVAWLRVVTLAIAAFIFNTTEFVPVGLLSDIAESFHMQTAQVGIMLTIYAWVVAVMSLPFMLLTSQIERRKLLICLFVLFIASHVLSFLAWNFTVLVISRIGIAFTHAIFWSITASLAIRLAPAGKRAQALSLIATGTALAMVLGLPIGRVVGQYFGWRTTFFAIGMGALITLICLIKLLPKLPSEHSGSLKSLPLLFRRPALMSLYLLTAVVVTAHYTAYSYIEPFVQNVAGLSANFATVLLLILGGAGIIGSLVFGKLGNQHASLLVSIAISLLVVCLLLLLPAADSEAHLALLSIFWGIAIMVIGLGMQVKVLALAPDATDVAMALFSGIFNIGIGAGALAGNQVSLHWSMSTIGYIGAVPACAALVWAVLIFRKWPVTLEEQPR

SEQ ID NO: 223 - DNA, 1191 bp, Salmonella choleraesuis
  CDS (1)..(1191): transl_table=11
atgacaatcaatccagtttcccgcaaggtcgcgtggctacgggtagttacgcttgctattgccgcttttattttcaataccacagaatttgtgccggttggtttgctatcagacattgctgaaagctttcatatgcaaaccgcgcaggtcggcatcatgctaaccatttacgcctgggtagttgccgtcatgtcgctgccttttatgcttcttaccagtcaaatggagcgccgtaagctactcatttgtctgtttgttttgtttattgccagccatgtgctctcctttctggcatggaactttaccgtgctggtcattagccgtattggtatcgctttcgcccacgctattttctggtcgataaccgcctcgctggcgatccgcctggcccctgccgggaaacgcgcacaggcattaagtctgatagcgaccggcaccgcgttggccatggtgcttgggctgccgataggtcgcgttgttggtcagtattttggctggcgcaccaccttttttgccatcggcatgggcgcattaattacgctgctatgtctgattaagcttctaccgaaattgccgagcgagcattccggctcactaaaaagtttacctttgctattccgacgcccggcgctgatgagcctctatgtactgaccgtcgttgtggtgactgcgcattacacagcttatagctatattgagccgttcgttcagaatgtcgccgggctcagtgcgaattttgctaccgtcctgttactgatcctcggcggcgccgggatcatcggcagccttgtgtttggtaaactgggtaatcgtcatgcctcgtcgctcgtcagtatcgctattgccctgctggttgtctgtctgcttctgctgctgcctgcggcggatagcgaagcgcatctggccatactgagcattttctggggcatcgcgattatggtgatagggctcggtatgcaggtgaaagtactggcgctggccccggacgcgaccgatgtcgcaatggcgctattttcaggcatctttaatattggtattggcgctggcgcgctggtaggcaatcaggtgagtttgcactggtcaatgtcggccatcggctatattggcgacatacccgcctgtgccgcgctggtatgggctgtgctcatattccgcaaatggccagtgacgctggaagaacaaccgcattaa

SEQ ID NO: 224 - protein, 396 aa, Salmonella choleraesuis
MTINPVSRKVAWLRVVTLAIAAFIFNTTEFVPVGLLSDIAESFHMQTAQVGIMLTIYAWVVAVMSLPFMLLTSQMERRKLLICLFVLFIASHVLSFLAWNFTVLVISRIGIAFAHAIFWSITASLAIRLAPAGKRAQALSLIATGTALAMVLGLPIGRVVGQYFGWRTTFFAIGMGALITLLCLIKLLPKLPSEHSGSLKSLPLLFRRPALMSLYVLTVVVVTAHYTAYSYIEPFVQNVAGLSANFATVLLLILGGAGIIGSLVFGKLGNRHASSLVSIAIALLVVCLLLLLPAADSEAHLAILSIFWGIAIMVIGLGMQVKVLALAPDATDVAMALFSGIFNIGIGAGALVGNQVSLHWSMSAIGYIGDIPACAALVWAVLIFRKWPVTLEEQPH

SEQ ID NO: 225 - DNA, 1191 bp, Salmonella paratyphi A
  CDS (1)..(1191): transl_table=11
atgacaatcaatccagtttcccgcaaggtcgcgtggctacgggtagttacgcttgctattgccgcttttattttcaataccacagaatttgtgccagttggtttgctgtcagacattgctgaaagctttcatatgcaaaccgcgcaggtcggcatcatgctaaccatttacgcctgggtagttgccgtcatgtcgctgccttttatgcttcttaccagtcaaatggagcgccgtaaactactcatttgtctgtttgttttgtttattgccagccatgtgctctcctttctggcatggaactttaccgtgctggtcattagccgtattggcatcgctttcgcccacgctattttctggtcgataaccgcctcgctggcgatccgcctggcccctgccgggaaacgcgcgcaggcattaagtctgatagcgaccggcaccgcgttggccatggtgcttgggctgccgataggtcgcgttgttggtcagtattttggctggcgcaccaccttttttgccatcggcatgggcgcattaattacgctgctatgtctgattaagcttctaccgaaattgccgagcgagcattccggctcactaaaaagtttacctttgctattccggtgcccggcgctgatgagcctctatgtgctgaccgtcgttgtggtgactgcgcattatacagcttatagctatattgaaccgttcgttcagaatgtcgccgggctcagtgcgaattttgctaccgtcctgttactgctcctcggcggcgccgggatcatcggcagcctcgtgtttggtaaactgggtaatcgccatgcctcgtcgctcgtcagtatcgctattgctctgctggttgtctgtctgcttctgctgctgcctgcggcggatagcgaagcgcatctggccatactgagcattttctggggcatcgcgattatggtgatagggctcggtatgcaggtgaaagtactggcgctggccccggacgcgaccgatgtcgcaatggcgctattttcaggcatctttaatattggtattggcgctggcgcgctggtaggcaatcaggtgagtttgcactggtcaatgtcggccatcggctatattggcgccatacccgcctgtgccgcgctggtatgggctgtgctcatattccgcaaatggccagtgacgctggaagaacaaccgcattaa

SEQ ID NO: 226 - protein, 396 aa, Salmonella paratyphi A
MTINPVSRKVAWLRVVTLAIAAFIFNTTEFVPVGLLSDIAESFHMQTAQVGIMLTIYAWVVAVMSLPFMLLTSQMERRKLLICLFVLFIASHVLSFLAWNFTVLVISRIGIAFAHAIFWSITASLAIRLAPAGKRAQALSLIATGTALAMVLGLPIGRVVGQYFGWRTTFFAIGMGALITLLCLIKLLPKLPSEHSGSLKSLPLLFRCPALMSLYVLTVVVVTAHYTAYSYIEPFVQNVAGLSANFATVLLLLLGGAGIIGSLVFGKLGNRHASSLVSIAIALLVVCLLLLLPAADSEAHLAILSIFWGIAIMVIGLGMQVKVLALAPDATDVAMALFSGIFNIGIGAGALVGNQVSLHWSMSAIGYIGAIPACAALVWAVLIFRKWPVTLEEQPH

SEQ ID NO: 227 - DNA, 1191 bp, Salmonella paratyphi B
  CDS (1)..(1191): transl_table=11
atgacaatcaatccagtttcccgcaaggtcgcgtggctacgggtagttacgcttgctattgccgcttttattttcaataccacagaatttgtgccggttggtttgctgtcagacattgctgaaagctttcatatgcaaaccgcgcaggtcggcatcatgctaaccatttacgcctgggtagttgccgtcatgtcgctgccttttatgcttcttaccagtcaaatggagcgccgtaagctactcatttgtctgtttgttttgtttattgccagccatgtgctctccttcctggcatggaactttaccgtactggtcattagccgtattggcatcgctttcgcccacgctattttctggtcgataaccgcctctctggcgatccgcctggcccctgccgggaaacgcgcgcaggcattaagtctgatagcgaccggcaccgcgttggccatggtgcttgggctgccgataggtcgcgttgttggtcagtattttggctggcgcaccaccttttttgccatcggcatgggcgcattaattacgctgctatgtctgattaagcttctaccgaaattgccgagcgagcattccggctcactaaaaagtttacctttgctattccggcgcccggcgctaatgagcctctatgtactaaccgtcgttgtggtgactgcgcattacacagcttatagctatattgaaccgttcgttcagaatgtcgccgggctcagtgcgaattttgctaccgtcctgttactgatcctcggcggcgccgggatcatcggcagcctcgtgtttggtaaactgggtaatcgccatgcctcgtcgctcgtcagtatcgctattgccctgctggttgtctgtctgcttctgctgctgcctgcggcggatagcgaagcgcatctggccatactgagcattttctggggcatcgcgattatggtgatagggctcggtatgcaggtgaaagtactggcgctggccccggacgcgaccgatgtcgcaatggcgctattttcaggcatctttaatattggtattggcgctggcgcgctggtaggcaatcaggtgagtttgcactggtcaatgtcggccatcggctatattggcgccatacccgcctgtgccgcgctggtatgggctgtgctcatattccgcaaatggccagtgacgctggaagaacaaccgcattaa

SEQ ID NO: 228 - protein, 396 aa, Salmonella paratyphi B
MTINPVSRKVAWLRVVTLAIAAFIFNTTEFVPVGLLSDIAESFHMQTAQVGIMLTIYAWVVAVMSLPFMLLTSQMERRKLLICLFVLFIASHVLSFLAWNFTVLVISRIGIAFAHAIFWSITASLAIRLAPAGKRAQALSLIATGTALAMVLGLPIGRVVGQYFGWRTTFFAIGMGALITLLCLIKLLPKLPSEHSGSLKSLPLLFRRPALMSLYVLTVVVVTAHYTAYSYIEPFVQNVAGLSANFATVLLLILGGAGIIGSLVFGKLGNRHASSLVSIAIALLVVCLLLLLPAADSEAHLAILSIFWGIAIMVIGLGMQVKVLALAPDATDVAMALFSGIFNIGIGAGALVGNQVSLHWSMSAIGYIGAIPACAALVWAVLIFRKWPVTLEEQPH

SEQ ID NO: 229 - DNA, 1191 bp, Salmonella typhimurium
  CDS (1)..(1191): transl_table=11
atgacaatcaatccagtttcccgcaaggtcgcgtggctacgggtagttacgcttgctattgccgcttttattttcaataccacagaatttgtgccagttggtttgctatcagacattgctgaaagctttcatatgcaaaccgcgcaggtcggcatcatgctaaccatttacgcctgggtagttgccgtcatgtcgctgccttttatgcttcttaccagtcaaatggagcgccgtaagctactcatttatctgtttgttttgtttattgccagccatgtgctctcctttctggcatggaactttaccgtgctggtcattagccgtattggtatcgctttcgcccacgctattttctggtcgataaccgcctcgctggcgatccgcctggcccctgccgggaaacgcgcgcaggcattaagtctgatagcgaccggcaccgcgttggccatggtgcttgggctgcccataggtcgcgttgttggtcagtattttggctggcgcaccaccttttttgccatcggcatgggcgcattaattacgctgctatgtctgattaagcttctaccgaaattgccgagcgagcattccggctcactaaaaagtttacctttgctattccgacgcccggcgctgatgagcctctatgtactgaccgtcgttgtggtgactgcgcattacacagcttatagctatattgaaccgttcgttcagaatgtcgccgggctcagtgcgaattttgctaccgtcctgttactgatcctcggcggcgccgggatcatcggcagcctcgtgtttggtaaactgggtaatcgccatgcctcgtcgctcgtcagtatcgctattgccctgctggttgtctgtctgctgctgctgctgcccgcggcggagagcgaagcgcatctggccatactgagcattttctggggcatcgcgattatggtgatagggctcggtatgcaggtgaaagtactggcgctggccccggacgcgaccgatgtcgcaatggcgctattttcaggcatctttaatattggtattggcgctggcgcgctggtaggtaatcaggtgagtttgcactggtcaatgtcggccatcggctatattggcgccatacccgcctgtgccgcgctggtatgggctgtgctcatattccgcaaatggccagtgacgctggaagaacaaccgcattaa

SEQ ID NO: 230 - protein, 396 aa, Salmonella typhimurium
MTINPVSRKVAWLRVVTLAIAAFIFNTTEFVPVGLLSDIAESFHMQTAQVGIMLTIYAWVVAVMSLPFMLLTSQMERRKLLIYLFVLFIASHVLSFLAWNFTVLVISRIGIAFAHAIFWSITASLAIRLAPAGKRAQALSLIATGTALAMVLGLPIGRVVGQYFGWRTTFFAIGMGALITLLCLIKLLPKLPSEHSGSLKSLPLLFRRPALMSLYVLTVVVVTAHYTAYSYIEPFVQNVAGLSANFATVLLLILGGAGIIGSLVFGKLGNRHASSLVSIAIALLVVCLLLLLPAAESEAHLAILSIFWGIAIMVIGLGMQVKVLALAPDATDVAMALFSGIFNIGIGAGALVGNQVSLHWSMSAIGYIGAIPACAALVWAVLIFRKWPVTLEEQPH

SEQ ID NO: 231 - DNA, 1191 bp, Shigella flexneri
  CDS (1)..(1191): transl_table=11
atgacaacaaacactgtttcccgcaaagtggcgtggctacgggtcgttacgctggcagtcgccgccttcatcttcaacaccaccgaatttgtccctgttggcctgctctctgacattgcgcaaagttttcacatgcaaaccgctcaggtcggcatcatgttgaccatttacgcatgggtagtagcgctaatgtcattgccttttatgttaatgaccagtcaggttgaacggcgcaaattactgatctgcctgtttgtggtgtttattgccagccacgtactgtcgtttttatcgtggagctttaccgttctggtgatcagtcgcattggtgtggcttttgcacatgcgattttctggtcgattacggcgtctctggcgatccgtatggctccggccgggaagcgggcacaggccttgagtttaattgccaccggtacagcactggcgatggtcttaggtttaccgctcgggcgcattgtggggcagtatttcggctggcgaatgaccttcttcgcgattggtattggggcgcttgttacccttttgtgcctgattaagttacttcccttactgcctagtgagcattccggttcattgaaaagcctcccgctattgttccgccgcccggcattgatgagcatttatttgttaactgtggtggttgtcaccgcccattacacggcatacagctatatcgagccttttgtgcaaaacattgcgggattcagcgccaactttgccacggcattactgttattactcggtggtgcgggcattattggcagcgtgattttcggtaaactgggtaatcaatatgcgtctgcgttggtaagtacggcgattgcgctgttgctggtgtgtctggcactgctgctacctgcggcgaacagtgaaatacacctcggggtgctgagtattttctgggggatcgcgatgatgatcatcgggcttggtatgcaggttaaagtgctggcgctggcaccagatgctaccgacgtcgcgatggcgctattctccggcatatttaatattggaatcggggcgggtgcgttggtaggtaatcaggtgagtttgcactggtcaatgtcgatgattggttatgtgggcgcggtgcctgcttttgctgcgttaatatggtcaatcattatatttcgccgctggccagtgacactcgaagaacagacgcaatag

SEQ ID NO: 232 - protein, 396 aa, Shigella flexneri
MTTNTVSRKVAWLRVVTLAVAAFIFNTTEFVPVGLLSDIAQSFHMQTAQVGIMLTIYAWVVALMSLPFMLMTSQVERRKLLICLFVVFIASHVLSFLSWSFTVLVISRIGVAFAHAIFWSITASLAIRMAPAGKRAQALSLIATGTALAMVLGLPLGRIVGQYFGWRMTFFAIGIGALVTLLCLIKLLPLLPSEHSGSLKSLPLLFRRPALMSIYLLTVVVVTAHYTAYSYIEPFVQNIAGFSANFATALLLLLGGAGIIGSVIFGKLGNQYASALVSTAIALLLVCLALLLPAANSEIHLGVLSIFWGIAMMIIGLGMQVKVLALAPDATDVAMALFSGIFNIGIGAGALVGNQVSLHWSMSMIGYVGAVPAFAALIWSIIIFRRWPVTLEEQTQ

SEQ ID NO: 233 - DNA, 24 bp, Artificial sequence
  primer
atgacaacaaacactgtttcccgc

SEQ ID NO: 234 - DNA, 25 bp, Artificial sequence
  primer
ttattgcgtctgttcttcgagtgtc

SEQ ID NO: 235 - protein, 355 aa, Artificial sequence
  consensus sequence
  Variant (2)..(4): Xaa in position 2 to 4 is any amino acid
  Variant (6)..(6): Xaa in position 6 is any amino acid
  Variant (8)..(8): Xaa in position 8 is any amino acid
  Variant (20)..(20): Xaa in position 20 is any amino acid
  Variant (24)..(24): Xaa in position 24 is any amino acid
  Variant (26)..(27): Xaa in position 26 to 27 is any amino acid
  Variant (30)..(30): Xaa in position 30 is any amino acid
  Variant (32)..(36): Xaa in position 32 to 36 is any amino acid
  Variant (38)..(38): Xaa in position 38 is any amino acid
  Variant (40)..(40): Xaa in position 40 is any amino acid
  Variant (42)..(42): Xaa in position 42 is any amino acid
  Variant (46)..(46): Xaa in position 46 is any amino acid
  Variant (48)..(50): Xaa in position 48 to 50 is any amino acid
  Variant (54)..(54): Xaa in position 54 is any amino acid
  Variant (57)..(57): Xaa in position 57 is any amino acid
  Variant (59)..(61): Xaa in position 59 to 61 is any amino acid
  Variant (64)..(65): Xaa in position 64 to 65 is any amino acid
  Variant (68)..(70): Xaa in position 68 to 70 is any amino acid
  Variant (72)..(73): Xaa in position 72 to 73 is any amino acid
  Variant (76)..(76): Xaa in position 76 is any amino acid
  Variant (79)..(79): Xaa in position 79 is any amino acid
  Variant (82)..(86): Xaa in position 82 to 86 is any amino acid
  Variant (88)..(89): Xaa in position 88 to 89 is any amino acid
  Variant (91)..(93): Xaa in position 91 to 93 is any amino acid
  Variant (95)..(95): Xaa in position 95 is any amino acid
  Variant (97)..(97): Xaa in position 97 is any amino acid
  Variant (99)..(99): Xaa in position 99 is any amino acid
  Variant (102)..(103): Xaa in position 102 to 103 is any amino acid
  Variant (110)..(110): Xaa in position 110 is any amino acid
  Variant (112)..(113): Xaa in position 112 to 113 is any amino acid
  Variant (115)..(115): Xaa in position 115 is any amino acid
  Variant (118)..(123): Xaa in position 118 to 123 is any amino acid
  Variant (126)..(128): Xaa in position 126 to 128 is any amino acid
  Variant (130)..(130): Xaa in position 130 is any amino acid
  Variant (133)..(133): Xaa in position 133 is any amino acid
  Variant (136)..(137): Xaa in position 136 to 137 is any amino acid
  Variant (140)..(140): Xaa in position 140 is any amino acid
  Variant (142)..(142): Xaa in position 142 is any amino acid
  Variant (145)..(146): Xaa in position 145 to 146 is any amino acid
  Variant (148)..(150): Xaa in position 148 to 150 is any amino acid
  Variant (154)..(154): Xaa in position 154 is any amino acid
  Variant (157)..(158): Xaa in position 157 to 158 is any amino acid
  Variant (160)..(162): Xaa in position 160 to 162 is any amino acid
  Variant (164)..(173): Xaa in position 164 to 173 is any amino acid
  Variant (176)..(176): Xaa in position 176 is any amino acid
  Variant (180)..(182): Xaa in position 180 to 182 is any amino acid
  Variant (185)..(186): Xaa in position 185 to 186 is any amino acid
  Variant (188)..(188): Xaa in position 188 is any amino acid
  Variant (190)..(190): Xaa in position 190 is any amino acid
  Variant (192)..(193): Xaa in position 192 to 193 is any amino acid
  Variant (196)..(196): Xaa in position 196 is any amino acid
  Variant (198)..(200): Xaa in position 198 to 200 is any amino acid
  Variant (202)..(203): Xaa in position 202 to 203 is any amino acid
  Variant (205)..(206): Xaa in position 205 to 206 is any amino acid
  Variant (208)..(209): Xaa in position 208 to 209 is any amino acid
  Variant (212)..(212): Xaa in position 212 is any amino acid
  Variant (216)..(216): Xaa in position 216 is any amino acid
  Variant (222)..(233): Xaa in position 222 to 233 is any amino acid
  Variant (235)..(236): Xaa in position 235 to 236 is any amino acid
  Variant (239)..(240): Xaa in position 239 to 240 is any amino acid
  Variant (242)..(243): Xaa in position 242 to 243 is any amino acid
  Variant (245)..(247): Xaa in position 245 to 247 is any amino acid
  Variant (249)..(250): Xaa in position 249 to 250 is any amino acid
  Variant (252)..(269): Xaa in position 252 to 269 is any amino acid
  Variant (271)..(273): Xaa in position 271 to 273 is any amino acid
  Variant (275)..(276): Xaa in position 275 to 276 is any amino acid
  Variant (278)..(289): Xaa in position 278 to 289 is any amino acid
  Variant (291)..(293): Xaa in position 291 to 293 is any amino acid
  Variant (296)..(302): Xaa in position 296 to 302 is any amino acid
  Variant (304)..(305): Xaa in position 304 to 305 is any amino acid
  Variant (307)..(308): Xaa in position 307 to 308 is any amino acid
  Variant (311)..(311): Xaa in position 311 is any amino acid
  Variant (314)..(314): Xaa in position 314 is any amino acid
  Variant (321)..(324): Xaa in position 321 to 324 is any amino acid
  Variant (327)..(328): Xaa in position 327 to 328 is any amino acid
  Variant (330)..(330): Xaa in position 330 is any amino acid
  Variant (334)..(334): Xaa in position 334 is any amino acid
  Variant (338)..(338): Xaa in position 338 is any amino acid
  Variant (340)..(348): Xaa in position 340 to 348 is any amino acid
  Variant (349)..(351): Xaa in position 349 to 351 is any or no amino acid
  Variant (353)..(354): Xaa in position 353 to 354 is any amino acid
VXXXAXAXFIFNTTEFVPVXLLSXIXXSFXMXXXXXGXMXTXYAWXVXXXSLPXMLXTXXXERXXLLXXXFXXFIXSHXLSXXXXXFXXLXXXRXGXAXAHXXFWSITAXLXXRXAPXXXXXXALXXXAXGTXLAXXLGXPXGRXXGXXXGWRXTFXXIXXXAXXXXXXXXXXLPXLPSXXXGSXXSXPXLXXRPXLXXXYXXTXXVXXAHXTAYXYIEPFXXXXXXXXXXXXTXXLLXXGXXGXXXSXXFXXXXXXXXXXXXXXXXXXLXXXLXXLXXXXXXXXXXXXLXXXWGXXXXXXXLXXQXXVLXLAXDATDVAXXXXSGXXNXGIGXGALXGXXXXXXXXXXXXGXXG

SEQ ID NO: 236 - protein, 59 aa, Artificial sequence
  protein pattern
  Variant (9)..(9): Xaa in position 9 is Ala, Ile or Val
  Variant (11)..(11): Xaa in position 11 is Ile or Val
  Variant (12)..(12): Xaa in position 12 is Ala or Gly
  Variant (13)..(13): Xaa in position 13 is Leu or Met
  Variant (15)..(15): Xaa in position 15 is Pro or Ser
  Variant (16)..(16): Xaa in position 16 is Ala, Asp or Asn
  Variant (18)..(18): Xaa in position 18 is Ala or Gly
  Variant (19)..(19): Xaa in position 19 is any amino acid
  Variant (21)..(21): Xaa in position 21 is Phe or Leu
  Variant (22)..(22): Xaa in position 22 is any amino acid
  Variant (24)..(25): Xaa in position 24 to 25 is any amino acid
  Variant (26)..(26): Xaa in position 26 is Ala, Glu, Ser or Thr
  Variant (27)..(27): Xaa in position 27 is any amino acid
  Variant (28)..(28): Xaa in position 28 is Ala, Thr or Val
  Variant (30)..(30): Xaa in position 30 is Ile, Leu or Met
  Variant (31)..(31): Xaa in position 31 is Leu or Met
  Variant (32)..(32): Xaa in position 32 is Ile, Leu or Met
  Variant (34)..(34): Xaa in position 34 is Ala, Ile or Val
  Variant (38)..(38): Xaa in position 38 is any amino acid
  Variant (40)..(40): Xaa in position 40 is any amino acid
  Variant (41)..(41): Xaa in position 41 is Ile, Leu or Val
  Variant (42)..(42): Xaa in position 42 is any amino acid
  Variant (45)..(45): Xaa in position 45 is Ile or Pro
  Variant (46)..(47): Xaa in position 46 to 47 is any amino acid
  Variant (48)..(48): Xaa in position 48 is Phe, Leu or Val
  Variant (49)..(49): Xaa in position 49 is any amino acid
  Variant (50)..(50): Xaa in position 50 is Ser or Thr
  Variant (51)..(52): Xaa in position 51 to 52 is any amino acid
  Variant (53)..(53): Xaa in position 53 is Ile, Met or Val
  Variant (56)..(56): Xaa in position 56 is Lys or Arg
  Variant (57)..(57): Xaa in position 57 is any amino acid
FIFNTTEFXPXXXLXXIXXSXXMXXXXXGXXXTXYAWXVXXXSLXXXXXXXXXERXXLL

SEQ ID NO: 237 - protein, 45 aa, Artificial sequence
  protein pattern
  Variant (2)..(2): Xaa in position 2 is any amino acid
  Variant (3)..(3): Xaa in position 3 is Cys or Gly
  Variant (4)..(4): Xaa in position 4 is Ile or Val
  Variant (6)..(6): Xaa in position 6 is Phe or Leu
  Variant (7)..(7): Xaa in position 7 is Ala, Ser or Thr
  Variant (9)..(9): Xaa in position 9 is Ala or Ser
  Variant (10)..(10): Xaa in position 10 is Ile or Val
  Variant (13)..(13): Xaa in position 13 is Ala or Ser
  Variant (14)..(14): Xaa in position 14 is Ile or Val
  Variant (16)..(17): Xaa in position 16 to 17 is Ala or Ser
  Variant (18)..(18): Xaa in position 18 is Ile or Leu
  Variant (19)..(19): Xaa in position 19 is Ala, Thr or Val
  Variant (20)..(20): Xaa in position 20 is Ile, Met or Val
  Variant (22)..(22): Xaa in position 22 is Ile, Leu, Met or Val
  Variant (23)..(23): Xaa in position 23 is Ala or Ser
  Variant (25)..(30): Xaa in position 25 to 30 is any amino acid
  Variant (33)..(33): Xaa in position 33 is any amino acid
  Variant (34)..(34): Xaa in position 34 is any or no amino acid
  Variant (36)..(36): Xaa in position 36 is any or no amino acid
  Variant (38)..(38): Xaa in position 38 is any amino acid
  Variant (40)..(40): Xaa in position 40 is Ser or Thr
  Variant (41)..(41): Xaa in position 41 is Ala, Ser or Thr
  Variant (44)..(44): Xaa in position 44 is any amino acid
  Variant (45)..(45): Xaa in position 45 is Ile or Val
RXXXAXXHXXFWXXTXXXXXRXXPXXXXXXALXXLXAXGXXLAXX

SEQ ID NO: 238 - protein, 59 aa, Artificial sequence
  protein pattern
  Variant (2)..(2): Xaa in position 2 is any or no amino acid
  Variant (5)..(6): Xaa in position 5 to 6 is any amino acid
  Variant (7)..(7): Xaa in position 7 is Ala or Ser
  Variant (9)..(9): Xaa in position 9 is Ser or Thr
  Variant (10)..(10): Xaa in position 10 is Ile or Leu
  Variant (11)..(11): Xaa in position 11 is any amino acid
  Variant (13)..(13): Xaa in position 13 is Leu or Val
  Variant (15)..(15): Xaa in position 15 is any amino acid
  Variant (17)..(17): Xaa in position 17 is any amino acid
  Variant (18)..(18): Xaa in position 18 is Lys or Arg
  Variant (19)..(19): Xaa in position 19 is any amino acid
  Variant (21)..(21): Xaa in position 21 is any amino acid
  Variant (23)..(23): Xaa in position 23 is Leu, Met or Val
  Variant (24)..(25): Xaa in position 24 to 25 is any amino acid
  Variant (27)..(27): Xaa in position 27 is Ala, Gly, Ile, Leu or Val
  Variant (28)..(28): Xaa in position 28 is any amino acid
  Variant (29)..(29): Xaa in position 29 is Thr or Val
  Variant (30)..(30): Xaa in position 30 is any amino acid
  Variant (31)..(31): Xaa in position 31 is Ile, Leu, Met or Val
  Variant (32)..(33): Xaa in position 32 to 33 is Ile or Val
  Variant (34)..(34): Xaa in position 34 is Ser or Thr
  Variant (35)..(35): Xaa in position 35 is Ala or Gly
  Variant (36)..(36): Xaa in position 36 is any amino acid
  Variant (37)..(37): Xaa in position 37 is Phe or Tyr
  Variant (39)..(39): Xaa in position 39 is Ala or Thr
  Variant (41)..(41): Xaa in position 41 is Ser or Thr
  Variant (47)..(49): Xaa in position 47 to 49 is any amino acid
  Variant (50)..(50): Xaa in position 50 is Ala, Ile or Val
  Variant (51)..(51): Xaa in position 51 is Ala, Gly or Ser
  Variant (52)..(52): Xaa in position 52 is any amino acid
  Variant (53)..(53): Xaa in position 53 is Phe, Ile, Leu or Met
  Variant (54)..(54): Xaa in position 54 is Asp, Gly, Pro or Ser
  Variant (55)..(55): Xaa in position 55 is any amino acid
  Variant (56)..(56): Xaa in position 56 is Asp, Glu, Asn or Ser
  Variant (57)..(57): Xaa in position 57 is any amino acid
  Variant (58)..(58): Xaa in position 58 is Ala, Thr or Val
LXPSXXXGXXXSXPXLXXXPXLXXXYXXXXXXXXXXXTXYXYIEPFXXXXXXXXXXXXT

SEQ ID NO: 239 - protein, 54 aa, Artificial sequence
  protein pattern
  Variant (2)..(4): Xaa in position 2 to 4 is any amino acid
  Variant (5)..(5): Xaa in position 5 is any or no amino acid
  Variant (8)..(8): Xaa in position 8 is any amino acid
  Variant (9)..(9): Xaa in position 9 is Ala, Gly or Ser
  Variant (10)..(10): Xaa in position 10 is Ile, Leu or Met
  Variant (11)..(12): Xaa in position 11 to 12 is any amino acid
  Variant (13)..(13): Xaa in position 13 is Phe, Ile or Leu
  Variant (14)..(14): Xaa in position 14 is Cys, Gly or Ser
  Variant (16)..(17): Xaa in position 16 to 17 is any amino acid
  Variant (19)..(20): Xaa in position 19 to 20 is any amino acid
  Variant (21)..(21): Xaa in position 21 is Thr or Val
  Variant (23)..(24): Xaa in position 23 to 24 is any amino acid
  Variant (26)..(26): Xaa in position 26 is Pro or Ser
  Variant (28)..(28): Xaa in position 28 is Ala or Val
  Variant (29)..(29): Xaa in position 29 is Gln, Ser or Thr
  Variant (33)..(33): Xaa in position 33 is any amino acid
  Variant (34)..(34): Xaa in position 34 is Ala or Ser
  Variant (35)..(35): Xaa in position 35 is Ile, Leu or Met
  Variant (36)..(36): Xaa in position 36 is Phe or Tyr
  Variant (39)..(39): Xaa in position 39 is Ile or Leu
  Variant (40)..(40): Xaa in position 40 is Phe or Tyr
  Variant (42)..(42): Xaa in position 42 is Ala, Ile, Leu or Val
  Variant (46)..(46): Xaa in position 46 is Ala or Gly
  Variant (50)..(50): Xaa in position 50 is any amino acid
  Variant (52)..(52): Xaa in position 52 is Asn or Ser
  Variant (53)..(53): Xaa in position 53 is any amino acid
  Variant (54)..(54): Xaa in position 54 is Ala, Ser or Val
LXXXXWGXXXXXXXLXXQXXXLXXAXDXXDVAXXXXSGXXNXGIGXGALXGXXX

SEQ ID NO: 240 - protein, 21 aa, Artificial sequence
  protein pattern
  Variant (2)..(2): Xaa in position 2 is any amino acid
  Variant (4)..(4): Xaa in position 4 is Ile or Leu
  Variant (7)..(8): Xaa in position 7 to 8 is Ile, Leu or Val
  Variant (10)..(10): Xaa in position 10 is Glu or Gln
  Variant (11)..(11): Xaa in position 11 is any amino acid
  Variant (12)..(12): Xaa in position 12 is Phe, Leu or Val
  Variant (16)..(16): Xaa in position 16 is any amino acid
  Variant (19)..(20): Xaa in position 19 to 20 is any amino acid
GXPXGRXXGXXXGWRXTFXXI

SEQ ID NO: 241 - protein, 21 aa, Artificial sequence
  protein pattern
  Variant (2)..(3): Xaa in position 2 to 3 is any amino acid
  Variant (5)..(5): Xaa in position 5 is Ile or Val
  Variant (6)..(6): Xaa in position 6 is any amino acid
  Variant (7)..(7): Xaa in position 7 is Gly or Ser
  Variant (9)..(9): Xaa in position 9 is Ala, Ile, Leu or Val
  Variant (10)..(10): Xaa in position 10 is Phe, Ile or Leu
  Variant (11)..(12): Xaa in position 11 to 12 is any amino acid
  Variant (13)..(13): Xaa in position 13 is Phe, Ile, Leu, Met or Val
  Variant (14)..(14): Xaa in position 14 is Ala or Ser
  Variant (15)..(15): Xaa in position 15 is any amino acid
  Variant (16)..(16): Xaa in position 16 is Asn or Ser
  Variant (18)..(19): Xaa in position 18 to 19 is any amino acid
  Variant (21)..(21): Xaa in position 21 is Leu, Met or Val
FXXFXXXHXXXXXXXXFXXLX

SEQ ID NO: 242 - DNA, 1011 bp, Escherichia coli
  CDS (1)..(1011): transl_table=11
atgagtgcgttaaataagaaaagttttcttacttacctgaaagagggcggtatttacgtcgttcttttagttttgctggcgattattattttccaggacccaacatttttaagtctgttgaacttaagtaatattctcacccagtcatcggtgcgtattattatcgcgctcggtgtggcagggttaattgtcacccaggggaccgatctttctgctggtcgtcaggtagggctggcggcagtggtggctgcgacattattgcagtccatggataacgccaacaaagtgttcccggaaatggcgacgatgccgattgcgctggttattctgattgtctgtgccattggtgcggtgatcggtttgatcaacggtctgattatcgcttatctcaacgtgacgccgttcattaccacgctcggcacgatgatcatcgtctatggcatcaactcgctctattacgactttgtcggggcgtcgccaatttctggttttgacagtggcttctctacctttgctcagggctttgtcgcgctggggagtttccgtctctcttacatcaccttctacgcgttgattgcggtggcgttcgtctgggtgttgtggaacaaaacccgcttcggtaagaacatttttgccattggcggtaacccggaagcggcaaaagtatctggtgtcaacgtcggcctgaacctgctgatgatctacgcgttgtctggcgtgttctatgcctttggcgggatgttagaagccggacgtatcggctctgccaccaacaacctcggctttatgtatgagctggatgctatcgcggcgtgcgtggtaggcggtgtatcgttcagcggcggtgtggggacggtgattggcgtggtgaccggggtaattatttttaccgtcatcaactatggcctgacgtatatcggcgtaaacccatactggcagtacatcatcaaaggggcgattattatcttcgccgtagcgctggattcactgaaatacgcgcgtaagaaataa

SEQ ID NO: 243 - protein, 336 aa, Escherichia coli
MSALNKKSFLTYLKEGGIYVVLLVLLAIIIFQDPTFLSLLNLSNILTQSSVRIIIALGVAGLIVTQGTDLSAGRQVGLAAVVAATLLQSMDNANKVFPEMATMPIALVILIVCAIGAVIGLINGLIIAYLNVTPFITTLGTMIIVYGINSLYYDFVGASPISGFDSGFSTFAQGFVALGSFRLSYITFYALIAVAFVWVLWNKTRFGKNIFAIGGNPEAAKVSGVNVGLNLLMIYALSGVFYAFGGMLEAGRIGSATNNLGFMYELDAIAACVVGGVSFSGGVGTVIGVVTGVIIFTVINYGLTYIGVNPYWQYIIKGAIIIFAVALDSLKYARKK

SEQ ID NO: 244 - DNA, 1011 bp, Pasteurella multocida subsp. multocida str. Pm70
  CDS (1)..(1011): transl_table=11
atggctgcattaaaacaaaataaatcccttgatttctttaaacaaaatgcaatctactttgtattattaattttactcgggatcatcattgttcaagacccaacattcttgaacttacgaaacttcagtaacattttaacgcaatcttccgtacgcttaatcatcgcgctgggtgtagccggcttacttgtcacacaagggacagacttatctgccggtcgccaagtcggtttagcggcggttatttcagcgaccttgttacaagccatggacaactttaaccgcgttttcccggatttacctgagctcccaattccggttgtaattttaactgtttgtgcgattggtgcagtcatcggtttagtaaatggtttagttattgcttacttaaacgtaacaccatttattgccaccatggggaccatgattatcgtttatgggattaactcactttactatgatgcggtaggaggatcgccaattgcaggctttaacgaaaccttctcaacgtttgcacaaggtttctttaaattcggttccttcaaactgtcctatatcacgatttatgctgctgttgcgaccttcttagtgtgggtattgtggaataaaacgcgctttggtaaaaatatctttgctatcggtggtaacccagaagcggctcgtgtatctggcgttaacgtcgcacgtaacttagtggttatctatatgatcgcggggatgttctacggttttggtgggatgttagaagccggtcgtatcggttctgccactaataacttaggtttcatgtatgaattagatgcgattgctgcctgtgtagtagggggcgtctcattcgccggtggtgtgggtacggttattggtgtggtaactggggtaattatctttaccgtcatcaactacggcttaacctatatcggtgttaacccatattggcaatatatcatcaaaggtagcatcatcattcttgcggtggctatcgactcactcaaatacgcgaagaaaaaataa

SEQ ID NO: 245 - protein, 336 aa, Pasteurella multocida subsp. multocida str. Pm70
MAALKQNKSLDFFKQNAIYFVLLILLGIIIVQDPTFLNLRNFSNILTQSSVRLIIALGVAGLLVTQGTDLSAGRQVGLAAVISATLLQAMDNFNRVFPDLPELPIPVVILTVCAIGAVIGLVNGLVIAYLNVTPFIATMGTMIIVYGINSLYYDAVGGSPIAGFNETFSTFAQGFFKFGSFKLSYITIYAAVATFLVWVLWNKTRFGKNIFAIGGNPEAARVSGVNVARNLVVIYMIAGMFYGFGGMLEAGRIGSATNNLGFMYELDAIAACVVGGVSFAGGVGTVIGVVTGVIIFTVINYGLTYIGVNPYWQYIIKGSIIILAVAIDSLKYAKKK

SEQ ID NO: 246 - DNA, 1011 bp, Escherichia coli O157:H7 EDL933
  CDS (1)..(1011): transl_table=11
  misc_feature (900)..(900): s is g or c
atgagtgcgttaaataagaaaagttttcttacttacctgaaagagggcggtatttacgtcgttcttttagttttgcttgcgattattattttccaggccccaacatttttaagtctgttgaacttaagtaatattctcacccagtcatcggtgcgtattattatcgcgctcggtgtggcagggttaattgtcacccaggggaccgacctttctgcggggcgtcaagtagggctggcggcagtggtggcagcgacattattgcagtccatggataacgccaacaaagtgttcccggaaatggcgacgatgccgattgcgctggttattctgattgtctgtgccattggtgcggtgatcggtttgatcaacggtctgattatcgcttatctcaacgtgacgccgttcattaccacgctcggcacgatgatcatcgtctatggcatcaactcgctttattacgactttgtcggggcgtcgccaatttctggttttgacagtggcttctctacctttgctcagggctttgtcgcgctggggagtttccgtctctcttacatcaccttctacgcgttgattgcggtggcgttcgtctgggtgttgtggaacaaaacccgcttcggtaagaacatttttgccattggcggtaacccggaagcggcaaaagtatctggtgtcaacgtcggcctgaacctgctgatgatctacgcgttgtctggcgtgttctatgcctttggcgggatgttagaagccggacgtatcggctctgccaccaacaacctcggctttatgtatgaactggatgctatcgcggcgtgcgtggtaggcggtgtatcgttcagcggcggtgtggggacggtgattggcgtggtgaccggggtaattatttttaccgtcatcaastatggcctgacgtacatcggcgtaaacccatactggcagtacatcatcaaaggggcgattattatcttcgccgtagcgctggattcactgaagtacgcgcgtaagaagtga

SEQ ID NO: 247 - protein, 336 aa, Escherichia coli O157:H7 EDL933
  misc_feature (300)..(300): The Xaa at location 300 stands for Asn, or Lys.
MSALNKKSFLTYLKEGGIYVVLLVLLAIIIFQAPTFLSLLNLSNILTQSSVRIIIALGVAGLIVTQGTDLSAGRQVGLAAVVAATLLQSMDNANKVFPEMATMPIALVILIVCAIGAVIGLINGLIIAYLNVTPFITTLGTMIIVYGINSLYYDFVGASPISGFDSGFSTFAQGFVALGSFRLSYITFYALIAVAFVWVLWNKTRFGKNIFAIGGNPEAAKVSGVNVGLNLLMIYALSGVFYAFGGMLEAGRIGSATNNLGFMYELDAIAACVVGGVSFSGGVGTVIGVVTGVIIFTVIXYGLTYIGVNPYWQYIIKGAIIIFAVALDSLKYARKK

SEQ ID NO: 248 - DNA, 1029 bp, Agrobacterium tumefaciens str. C58
  CDS (1)..(1029): transl_table=11
atgactacgaacgccgccaacgcacagttggacgcaaaatccggacgcaagccgcaccggcgcatcccgcccgaggccaatatctttttcgtgctgatcggcattgcgctagtttatgaaattctcggctggattttcatcggccagagctttttgcttaaccagcagcgcctgacgatcatgatcctgcaggtatcggtgatcggcataatcgccgttggcgtgacccaggtcatcatcaccggcggtatcgatctttcctccggctccgtcgtcggcctgacggcgatgttggccgccagcgtggggcaatcatccacatggccgcgggcgctttatccggggctgactgatctgcccttcttcattccgctggctgtcggcattctggctggcgcattggccggctttatcaacgggcaacttatagcgcgcacgaaaatcccgcccttcatcgcaaccctcggtatgatggtgacggcgcgtggcctttccaaatggtacaccaagggccagccgatttccggtctgactgacggtttcaccttcatcggtacaggtgtctggccggtcgtggtgttcctcgtcgtcgccatcattttccacgtcgcgctgcgttatacgcgttatggcaagttcacctacgccatcggcgccaaccagcaggcggcccgcgtttccggtatcaatatcgaagcgcatctgatcaaggtctatgccattgccggtctgctggccggtctcgccggcgtcgtcaccgccgcccgtgcacagacagcgcaggccggcatgggtgtgatgtatgaacttgacgccatcgctgcggccgtcatcggaggcacatcgctcgccggcggcgctggccggattaccggaactgtcatcggcaccatcattcttggcgtcatgacttcaggcttcacgttcctcagggtcgacgcctattaccaggagatcgtcaagggcctgatcatcgtggccgccgttgttgccgacgtttaccgccagaagaaacgcgcaaagcgctga

SEQ ID NO: 249 - protein, 342 aa, Agrobacterium tumefaciens str. C58
MTTNAANAQLDAKSGRKPHRRIPPEANIFFVLIGIALVYEILGWIFIGQSFLLNQQRLTIMILQVSVIGIIAVGVTQVIITGGIDLSSGSVVGLTAMLAASVGQSSTWPRALYPGLTDLPFFIPLAVGILAGALAGFINGQLIARTKIPPFIATLGMMVTARGLSKWYTKGQPISGLTDGFTFIGTGVWPVVVFLVVAIIFHVALRYTRYGKFTYAIGANQQAARVSGINIEAHLIKVYAIAGLLAGLAGVVTAARAQTAQAGMGVMYELDAIAAAVIGGTSLAGGAGRITGTVIGTIILGVMTSGFTFLRVDAYYQEIVKGLIIVAAVVADVYRQKKRAKR

SEQ ID NO: 250 - DNA, 1011 bp, Salmonella enterica subsp. enterica serovar Typhi str. CT18
  CDS (1)..(1011): transl_table=11
atgagtgcgttaaacaagaaaagctttttgacctggctgaaagagggcggaatttacgtcgttcttttagtgctgctggcgattattattttccaggacccgacttttttaagtttgctgaatttaagtaatattctgacgcaatcttcggtacgtattattatcgcgctgggcgtggcgggactcatcgtcacccaggggacagacctgtcggcggggcgtcaggtagggctggcggcggttgtggcggcaacattactgcaatcaatggaaaacgccaacaaagtgtttccggaaatggcgaccatgccgattgcgctggtcatcctgattgtctgcgcgattggcgcggtgattggcctggtgaacggcatcatcattgcttacctgaacgtgacgccgtttattaccacgcttggcacgatgattatcgtttatggaatcaactccctttactatgactttgtcggcgcttcgcccatttccggctttgacagcggcttttccacctttgcgcagggctttgtggcgatgggcagtttccggctctcctacatcaccttttacgctctgattgcggtagtgtttgtctgggtgctgtggaataagacccgctttggtaaaaacatttttgctattggcggcaacccggaagcggcgaaagtttctggcgtaaacgtggcgctgaacctgctgatgatttatgcgctctccggcgtgttttatgccttcggcggcttactggaagcagggcgtattggttctgccaccaacaacctcggctttatgtatgaactggatgcgattgccgcgtgcgtggtcgggggcgtatcgtttagcggcggagtggggacggtcttcggcgtggtgaccggcgtcattatctttaccgtcatcaactatggcctgacctatatcggggtaaacccgtactggcagtacattatcaaaggcggcattatcattttcgccgtggcgctggactcgctgaaatacgcgcgtaagaagtag

SEQ ID NO: 251 - protein, 336 aa, Salmonella enterica subsp. enterica serovar Typhi str. CT18
MSALNKKSFLTWLKEGGIYVVLLVLLAIIIFQDPTFLSLLNLSNILTQSSVRIIIALGVAGLIVTQGTDLSAGRQVGLAAVVAATLLQSMENANKVFPEMATMPIALVILIVCAIGAVIGLVNGIIIAYLNVTPFITTLGTMIIVYGINSLYYDFVGASPISGFDSGFSTFAQGFVAMGSFRLSYITFYALIAVVFVWVLWNKTRFGKNIFAIGGNPEAAKVSGVNVALNLLMIYALSGVFYAFGGLLEAGRIGSATNNLGFMYELDAIAACVVGGVSFSGGVGTVFGVVTGVIIFTVINYGLTYIGVNPYWQYIIKGGIIIFAVALDSLKYARKK

SEQ ID NO: 252 - DNA, 966 bp, Salmonella typhimurium LT2
  CDS (1)..(966): transl_table=11
atgacaacccaggctgtttctggtcgccgttatttcactaaagcgtggcttcttgagcagaagtcgctcattgccctgctggtgttgatcgcgattgtttcgacgttgagccccaacttttttaccgttaataatctgttcaatattcttcaacagacctccgttaacgccattatggcggtggggatgacgttggtgattctgacatcggggatcgatctgtccgtcggttccctgctggcgctcaccggtgcggttgccgcttcaatcgtcggcgttgaagtgaatgcgctggtcgcggttgccgccgcgctggcgctgggcgctgcgattggcgccgtcactggcgttatcgtcgcgaagggccgcgtacaggcgtttatcgctacgctggtgatgatgctgctactgcgtggcgtgacgatggtttacaccgacggtagcccggtcaacaccggctttaccgataacgccgatctgtttggctggttcggtatcggtcgtccgctgggcgttcctacgccggtctggatcatggctatcgtctttatcgccgcctggtatatgctgcatcacactcgtctgggacgctatatctacgcgctgggcggtaacgaagcggcgacgcgtctgtctggcattagcgtgagcaaagtgaaaattatcgtctattcactttgcggcctgacagcatcgctggcgggcatcattgaagtggcgcgcctctcttccgcgcagccgacggcgggtaccggctatgagctggatgctattgccgccgtggtgctgggcggcaccagccttgcaggtggtaaagggcgcattgttgggacattgatcggcgcattgattctcggcttccttaataatggtttgaatttgttaggtgtttcctcctattaccagatgatcgtcaaagcggtggtgattttgctggcggtactggtagacaacaaaaagcagtaa

SEQ ID NO: 253 - protein, 321 aa, Salmonella typhimurium LT2
MTTQAVSGRRYFTKAWLLEQKSLIALLVLIAIVSTLSPNFFTVNNLFNILQQTSVNAIMAVGMTLVILTSGIDLSVGSLLALTGAVAASIVGVEVNALVAVAAALALGAAIGAVTGVIVAKGRVQAFIATLVMMLLLRGVTMVYTDGSPVNTGFTDNADLFGWFGIGRPLGVPTPVWIMAIVFIAAWYMLHHTRLGRYIYALGGNEAATRLSGISVSKVKIIVYSLCGLTASLAGIIEVARLSSAQPTAGTGYELDAIAAVVLGGTSLAGGKGRIVGTLIGALILGFLNNGLNLLGVSSYYQMIVKAVVILLAVLVDNKKQ

SEQ ID NO: 254 - DNA, 1029 bp, Clostridium perfringens str. 13
  CDS (1)..(1029): transl_table=11
atgcaaaccaaatcaaagaaaaagtttaatttaaatagccaatggttaatgaataatgctatttatatagttttagtggccttattaataggaatttgtattatttcaccagattttttatcattaaaaaactttattaatatattaagccaatcctcttctcgtataataatagctcttggagttggaggaatacttttaactgaaggtactgacctttctgctggtagaacagttggacttgctgccgtagtatcagcttctttacttcaagctggagattatgcatataaaatgtatcctaatttacctgaattacctatattcattccaattttaatagcaatggctgtttgtggaatagttggtcttgtaaatggattagttgtttctaaatttaatgttcctccatttatagctactctaggaatgatgacaggaatatatggacttaactcaatatactttgatagacctccatatggagctatgccaataggtggtcttagccaatcctttagtaattttacacttggttccattcctatatatggaaatataaaaataccttatttagttatatatgcaattattgtaatagctgtaatttggactttatggaataaaactaaatttggtaaaaacctttatgccataggtggtaacagagaagctgcagtggtttcaggtgtaaatgttgttagaacacttttattagtttatatgttagctggagttctttatggttttgcaggtactctagaagctggtcgtgttggtagtgctactgctagtactggtgaaatgtatgaactagatgccatagcttcctgtgttgttggtggtgtttccactgctggtggtgttggtactgttcctggaatagtaactggtgttttaatattccaagttataaactatggtctagcttttataggtgttagcccttatttacaattcgttataaaaggtttaattatagttctagctgtagctcttgatatgagaaaatacatgaaaaagaactaa

SEQ ID NO: 255 - protein, 342 aa, Clostridium perfringens str. 13
MQTKSKKKFNLNSQWLMNNAIYIVLVALLIGICIISPDFLSLKNFINILSQSSSRIIIALGVGGILLTEGTDLSAGRTVGLAAVVSASLLQAGDYAYKMYPNLPELPIFIPILIAMAVCGIVGLVNGLVVSKFNVPPFIATLGMMTGIYGLNSIYFDRPPYGAMPIGGLSQSFSNFTLGSIPIYGNIKIPYLVIYAIIVIAVIWTLWNKTKFGKNLYAIGGNREAAVVSGVNVVRTLLLVYMLAGVLYGFAGTLEAGRVGSATASTGEMYELDAIASCVVGGVSTAGGVGTVPGIVTGVLIFQVINYGLAFIGVSPYLQFVIKGLIIVLAVALDMRKYMKKN

SEQ ID NO: 256 - DNA, 1020 bp, Fusobacterium nucleatum subsp. nucleatum ATCC 25586
  CDS (1)..(1020): transl_table=11
atgattgcaagaactaatgaaggaaaaatagattataaaaaaattattatagaaagtggactgtatcttgtattattttgtatgcttgttgcaataataataaaagagcctacttttttaagtttaagaaactttaaaaatattcttacacaatcatctgtaagaacaattattgcacttggtgttgctggacttatagtaacacaaggtactgacttatcagcaggtagacaagttggactttctgctgtaatttctggaacacttttacaatcaatgacaaatgtaaataaagcatttccaaaattaggagaattttcaatatttacaactatattgattgttgttgtagttggtgtagttatagcaagtataaatggagtggttgttgctacattaaatgttcacccatttatagctactatgggaacaatgactattgtgtatggaataaactctctttactatgataaagcaggagctgctccaatttctggatttgtagaaaaatatagtaaatttgcacaaggttatataaaaataggctcatatacaataccatatttaattatctatgcagctattgcaacattaattatgtggactttatggaacaaaacaaagtttggtaagaatgtatttgcagttggaggaaatccagaagctgcaaaagtatcaggagtaaatgttgttttaactcttatgggaatttatgcattatctggagcgtattatgcttttggtggtttcttagaagctggacgtattggttctgcaactaacaacctaggatttatgtatgaaatggatgctatcgctgcctgtgtaattggtggagtttcattctatggtggtgttggtagaatttctggagttatcacaggagttataattttaacaattataaactatggacttacttatacaggtgttagcccatactggcaatatattataaaaggtataataattgttactgctgttgcatttgactctattaaatatgctaagaaaaaataa

SEQ ID NO: 257 - protein, 339 aa, Fusobacterium nucleatum subsp. nucleatum ATCC 25586
MIARTNEGKIDYKKIIIESGLYLVLFCMLVAIIIKEPTFLSLRNFKNILTQSSVRTIIALGVAGLIVTQGTDLSAGRQVGLSAVISGTLLQSMTNVNKAFPKLGEFSIFTTILIVVVVGVVIASINGVVVATLNVHPFIATMGTMTIVYGINSLYYDKAGAAPISGFVEKYSKFAQGYIKIGSYTIPYLIIYAAIATLIMWTLWNKTKFGKNVFAVGGNPEAAKVSGVNVVLTLMGIYALSGAYYAFGGFLEAGRIGSATNNLGFMYEMDAIAACVIGGVSFYGGVGRISGVITGVIILTIINYGLTYTGVSPYWQYIIKGIIIVTAVAFDSIKYAKKK

SEQ ID NO: 258 - DNA, 1026 bp, Yersinia pestis KIM
  CDS (1)..(1026): transl_table=11
ttgaaggttcttattatgaatgtgttaaataagaaagatatgctcacttactttaaagagagcgggatttatgtggtgttgtttgtgctattggcaattattattatcaaggatccgacttttttaagtttgatgaatttaagtaacattctgactcaatcttcggtgcgtattattatcgcgttaggggtcgcgggtttgattgttacccaaggcacggatttgtccgcaggtcgtcaggtagggttagccgcagtggtcgctgcgacaatgctacaatcgatggataacgtgaataaagttttcccggacttgcagactgtacctattccagtggtcattctcgttgtctgcctgattggggcggttattggtttgattaacggtataattattgcgtacctgaatgtgactccatttattaccacattaggcactatgattatcgtttatggcgttaactcgctgtattacgattttgtcggtgcttcaccgattgccggttttgatcctgctttttcgacttttgctcaaggtttcttgcggtttggtgattttaaactgtcctatattaccttttacgccttaatagcaattatgtttgtatgggtactgtggaataagacccgttttggcaagaatatttttgctattggcggcaacccggaggcggcgaaagtctctggtgtgaatgtgccactgaatttgatcatgatttatgcattgtcgggggtgttctatgcctttggcggtatgctggaagcagggcgtatcggcagtgcgacgaacaatctcggatttatgtatgagctagatgcgatagcagcctgcgtggtgggtggggtgtccttcagtggtggcgtcggtaccgtgatcggcgtggtgaccggggttatcatcttcactgtcattaactatgggctcacgtatattggtgtgaacccgtactggcaatacattatcaagggcgggattatcatctttgcggttgcgttggattcactgaagtatgcgaagaagaaatag

SEQ ID NO: 259 - protein, 341 aa, Yersinia pestis KIM
MKVLIMNVLNKKDMLTYFKESGIYVVLFVLLAIIIIKDPTFLSLMNLSNILTQSSVRIIIALGVAGLIVTQGTDLSAGRQVGLAAVVAATMLQSMDNVNKVFPDLQTVPIPVVILVVCLIGAVIGLINGIIIAYLNVTPFITTLGTMIIVYGVNSLYYDFVGASPIAGFDPAFSTFAQGFLRFGDFKLSYITFYALIAIMFVWVLWNKTRFGKNIFAIGGNPEAAKVSGVNVPLNLIMIYALSGVFYAFGGMLEAGRIGSATNNLGFMYELDAIAACVVGGVSFSGGVGTVIGVVTGVIIFTVINYGLTYIGVNPYWQYIIKGGIIIFAVALDSLKYAKKK

SEQ ID NO: 260 - DNA, 1011 bp, Shigella flexneri 2a str. 301
  CDS (1)..(1011): transl_table=11
atgagtgcgttaaataagaaaagttttcttacttacctgaaagagggcggtatttacgtcgttcttttagttttgctggcgattattattttccaggacccaacatttttaagtctgttgaacttaagtaatattctcacccagtcatcggtgcgtattattatcgcgctcggtgtggcagggttaattgtcacccaggggaccgatctttctgctggtcgtcaggtagggctggcggcagtggtggctgcgacattattgcagtccatggataacgccaacaaagtgttcccggaaatggcgacgatgccgattgcgctggttattctgattgtctgtgccattggtgcggtgatcggtttgatcaacggtctgattatcgcttatctcaacgtgacgccgttcattaccacgctcggcacgatgatcatcgtctatggcatcaactcgctctattacgactttgtcggggcgtcgccaatttctggttttgacagtggcttctctacctttgctcagggctttgtcgcgctggggagtttccgtctctcttacatcaccttctacgcgttgattgcggtggcgttcgtctgggtgttgtggaacaaaacccgcttcggtaagaacatttttgccattggcggtaacccggaagcggcaaaaatatctggtgtcaacgtcggcctgaacctgctgatgatctacgcgttgtctggcgtgttctatgcctttggcgggatgttagaagccggacgtatcggctctgccaccaacaacctcggctttatgtatgagctggatgctatcgcggcgtgcgtggtaggcggtgtatcgttcagcggcggtgtggggacggtgattggcgtggtgaccggggtaattatttttaccgtcatcaactatggcctgacgtatatcggcgtaaacccatactggcagtacatcatcaaaggggcgattattatcttcgccgtagcgctggattcactgaaatacgcgcgtaagaagtga

SEQ ID NO: 261 - protein, 336 aa, Shigella flexneri 2a str. 301
MSALNKKSFLTYLKEGGIYVVLLVLLAIIIFQDPTFLSLLNLSNILTQSSVRIIIALGVAGLIVTQGTDLSAGRQVGLAAVVAATLLQSMDNANKVFPEMATMPIALVILIVCAIGAVIGLINGLIIAYLNVTPFITTLGTMIIVYGINSLYYDFVGASPISGFDSGFSTFAQGFVALGSFRLSYITFYALIAVAFVWVLWNKTRFGKNIFAIGGNPEAAKISGVNVGLNLLMIYALSGVFYAFGGMLEAGRIGSATNNLGFMYELDAIAACVVGGVSFSGGVGTVIGVVTGVIIFTVINYGLTYIGVNPYWQYIIKGAIIIFAVALDSLKYARKK

SEQ ID NO: 262 - DNA, 1008 bp, Vibrio vulnificus CMCP6
  CDS (1)..(1008): transl_table=11
atggacgctgttaaatctttcgcattaaagcatttaaaagagagcgcaatatacgcggttctccttattctactggctgttattgttattcaagagccatcgtttcttagcttgagaaacttaagtaatatcctgactcaatcttccgtgcgcgtcatcattgctctcggtgtcgccggcctgattgtcacccaaggcaccgacctttccgccggccgccaagtgggtttggcggcggtgatttcggccaccttgttgcaatcgatcgataacgtcaacaaagtgttcccaggcattggcgaagtgcccatcgtcgcggtgatcatttgcgtgtgcttgatcggtgccatcatcggtttggtcaacggcgttatcgttgcttacctgaaagtaacgccttttatcgccacattaggcactatgatcatcgtttacggcatcaactcgctttactacgatgccgtgggcgcctctccgattgcgggctttgacgagcgtttcaccacctttacgcaaggctttatcaacctcggtggtttccgtttctcctacatcaccttctacgccatcatcgccattgtctttatgtgggtgctgtggaacaaaaccgtgtttggcaaaaacattttcgccgtgggtggcaacccagaagcggccaaagtgtctggtgtgaacgtccccctcaccttgttgaaagtgtatgccctttctggtgtgctttacgcctttggcggtatgttggaagctggccgtatcggcagtgccaccaacaacttgggcttcctatacgagctcgatgccatcgccgcgtgtgtggtcggcggcgtttcatttgccggtggtgtcggtagcattgctggtgttgtcacgggtgtgttgatcttcaccgtcatcaactacggtatgacctacatcggcgtcagcccatactggcaatacattattaaaggttccatcatcgtcttcgcggtcgcgctcgattcgatgaaatacgccaacaaaaaataa

SEQ ID NO: 263 - protein, 335 aa, Vibrio vulnificus CMCP6
MDAVKSFALKHLKESAIYAVLLILLAVIVIQEPSFLSLRNLSNILTQSSVRVIIALGVAGLIVTQGTDLSAGRQVGLAAVISATLLQSIDNVNKVFPGIGEVPIVAVIICVCLIGAIIGLVNGVIVAYLKVTPFIATLGTMIIVYGINSLYYDAVGASPIAGFDERFTTFTQGFINLGGFRFSYITFYAIIAIVFMWVLWNKTVFGKNIFAVGGNPEAAKVSGVNVPLTLLKVYALSGVLYAFGGMLEAGRIGSATNNLGFLYELDAIAACVVGGVSFAGGVGSIAGVVTGVLIFTVINYGMTYIGVSPYWQYIIKGSIIVFAVALDSMKYANKK

SEQ ID NO: 264 - DNA, 1011 bp, Clostridium tetani E88
  CDS (1)..(1011): transl_table=11
atgtcggaatttgtaaacaaggagaaaaaaataaatacaaaaaatataaaagaatttgcaggtaagtatgcaatatatttggttcttttagctttgttattatccataggatttctagatagtaatttcctttcaaaacgaaatattataaatgtattaattatagcatctgtacgtgtaataatagcactaggtgttggtggagcattgattaccagaggaacagatttatcagcaggacgtgtagttggatttactgcatgtatatcggctagtttattacaaagaccagattatgcatataaactatttaaaaatgcacctcaactacctttaataatacctatattattagtaatatttatagggcttcttataggtgtaataaatggattagttgtagcttacttaaaagtacctccttttatagctactttaggaatgatggttatagtatatggagcagcatgtatatatactaatgctcaacctataggaggtctaagaaaagatttttcagaactgggaacagggtcaacgctaggtatacctaatttaataataattgctggactagtaatacttgtaatgtggtttatattaaataaaactaagtttggaaaacatatatatgccatagggggaaatccaaatgctgcagaagtttcaggggtaaatgtagatcttacacttgtaaaagtttatgcattagcgggagctttatatggattagcaggagcattactagctgcaagaacaggtggagctacaaataattatggtctaatgtatgaattagatgccatagctgcggctactataggaggagtttcaacttcaggtggaattggaacggttcaaggtataataacaggtgttttaatatttgaggttttaaataatggattagttatcttaggtgtatctgcatattggcaacaagttataaagggaattataatcataggagctgtagcctttgatattagaaaatatattgctaaaaaataa

SEQ ID NO: 265 - protein, 336 aa, Clostridium tetani E88
MSEFVNKEKKINTKNIKEFAGKYAIYLVLLALLLSIGFLDSNFLSKRNIINVLIIASVRVIIALGVGGALITRGTDLSAGRVVGFTACISASLLQRPDYAYKLFKNAPQLPLIIPILLVIFIGLLIGVINGLVVAYLKVPPFIATLGMMVIVYGAACIYTNAQPIGGLRKDFSELGTGSTLGIPNLIIIAGLVILVMWFILNKTKFGKHIYAIGGNPNAAEVSGVNVDLTLVKVYALAGALYGLAGALLAARTGGATNNYGLMYELDAIAAATIGGVSTSGGIGTVQGIITGVLIFEVLNNGLVILGVSAYWQQVIKGIIIIGAVAFDIRKYIAKK

SEQ ID NO: 266 - DNA, 1011 bp, Shigella flexneri 2a str. 2457T
  CDS (1)..(1011): transl_table=11
atgagtgcgttaaataagaaaagttttcttacttacctgaaagagggcggtatttacgtcgttcttttagttttgctggcgattattattttccaggacccaacatttttaagtctgttgaacttaagtaatattctcacccagtcatcggtgcgtattattatcgcgctcggtgtggcagggttaattgtcacccaggggaccgatctttctgctggtcgtcaggtagggctggcggcagtggtggctgcgacattattgcagtccatggataacgccaacaaagtgttcccggaaatggcgacgatgccgattgcgctggttattctgattgtctgtgccattggtgcggtgatcggtttgatcaacggtctgattatcgcttatctcaacgtgacgccgttcattaccacgctcggcacgatgatcatcgtctatggcatcaactcgctctattacgactttgtcggggcgtcgccaatttctggttttgacagtggcttctctacctttgctcagggctttctcgcgctggggagtttccgtctctcttacatcaccttctacgcgttgattgcggtggcgttcgtctgggtgttgtggaacaaaacccgcttcggtaagaacatttttgccattggcggtaacccggaagcggcaaaaatatctggtgtcaacgtcggcctgaacctgctgatgatctacgcgttgtctggcgtgttctatgcctttggcgggatgttagaagccggacgtatcggctctgccaccaacaacctcggctttatgtatgagctggatgctatcgcggcgtgcgtggtaggcggtgtatcgttcagcggcggtgtggggacggtgattggcgtggtgaccggggtaattatttttaccgtcatcaactatggcctgacgtatatcggcgtaaacccatactggcagtacatcatcaaaggggcgattattatcttcgccgtagcgctggattcactgaaatacgcgcgtaagaagtga

SEQ ID NO: 267 - protein, 336 aa, Shigella flexneri 2a str. 2457T
MSALNKKSFLTYLKEGGIYVVLLVLLAIIIFQDPTFLSLLNLSNILTQSSVRIIIALGVAGLIVTQGTDLSAGRQVGLAAVVAATLLQSMDNANKVFPEMATMPIALVILIVCAIGAVIGLINGLIIAYLNVTPFITTLGTMIIVYGINSLYYDFVGASPISGFDSGFSTFAQGFLALGSFRLSYITFYALIAVAFVWVLWNKTRFGKNIFAIGGNPEAAKISGVNVGLNLLMIYALSGVFYAFGGMLEAGRIGSATNNLGFMYELDAIAACVVGGVSFSGGVGTVIGVVTGVIIFTVINYGLTYIGVNPYWQYIIKGAIIIFAVALDSLKYARKK

SEQ ID NO: 268 - DNA, 1026 bp, Burkholderia vietnamiensis G4
  CDS (1)..(1026): transl_table=11
atgggcaacctgaatccggtcgcggacgcgcagtccatgacgatcaagacgcggcacgcgaagtggccgcccgagctgagcatcttcctggtgctggtgggcatcagcctgttcttcgaggggatcggctggctcgtcgtcggccagagcttcctgttcaacgccgagcggctcgagatcatcgtgctgcagatggccgtgatcggcatcatcgcggtcggcgtgaacctcgtgatcatcacgagcgggatcgacctgtcgtcgggctcggtggtcgccgcggcggccgtcgtgtcggcgagcctcgcgcaggtgtcggactttccgcgcgccgtgttcccgcacctcaccgacctgccgatcatctggccggtgctcgccggcgtgtgcgtggggctgctggtcggcctgctgaacggctcgctgatcgcgctgaccggcatcccgccgttcatcgcgacgctcggcacgatggtcgccgcgcgcggcttcgcgaagtggttcaccaacgggatgccggtgtcgatgctcaccgaccagttcgcggcgatcggcgcgggcgcgaacccggtgatcatcttcgtcgtggtggccgcgatcttccacgtcgtgctgcgctacacgcgcttcggcaagtacacgtatgcgatcggcgcgaaccgccacgcggccgtcgtgtcgggcatcaacgtgacgcgccatctggtgttcgtctatgcgatcgcggggctgctgagcggcatcgccggcacggtgacggccgcgcgggcgatctccgggcagtcgggcatgggcgtgatgtacgagctggacgcgatcgcggccgtcgtgatcggcggcacgtcgctgtcgggcggcctcggccgcgtgacgggcaccgtgatcggcgtgctgatcctcggcgtgatgacgtcgggcttcacgttcatccgcatcgacgcgtactaccaggagatggtgaagggggcgatcatcgtcgcggccgtgatcgccgaccagtatcgcaacaagaagtcgcgccgctga

SEQ ID NO: 269 - protein, 341 aa, Burkholderia vietnamiensis G4
MGNLNPVADAQSMTIKTRHAKWPPELSIFLVLVGISLFFEGIGWLVVGQSFLFNAERLEIIVLQMAVIGIIAVGVNLVIITSGIDLSSGSVVAAAAVVSASLAQVSDFPRAVFPHLTDLPIIWPVLAGVCVGLLVGLLNGSLIALTGIPPFIATLGTMVAARGFAKWFTNGMPVSMLTDQFAAIGAGANPVIIFVVVAAIFHVVLRYTRFGKYTYAIGANRHAAVVSGINVTRHLVFVYAIAGLLSGIAGTVTAARAISGQSGMGVMYELDAIAAVVIGGTSLSGGLGRVTGTVIGVLILGVMTSGFTFIRIDAYYQEMVKGAIIVAAVIADQYRNKKSRR

SEQ ID NO: 270 - DNA, 1011 bp, Klebsiella pneumoniae subsp. pneumoniae MGH 78578
  CDS (1)..(1011): transl_table=11
atgagtgcgttaaataaaaagagttttctcacttacctgaaagagggtgggatatatgttgtccttctggtcctgctggccattattattttccaggatccgacatttttaagtctgctcaacctgagtaatattctgacccagtcctcggtgcgtattattattgccctcggcgtggccggacttatcgtcacgcaggggaccgacctctccgccggccgtcaggtgggtctggcggcggtgattgccgccaccatgctgcaggcggtggataatgccaataaggtattcccggatatggcgaccatgccgatcccgctggtgatcctgctggtgtgcgccatcggggcggtcatcggcctgattaacgggatcgtcattgcctacctgaacgtgacgccgtttattaccactctcggcaccatgatcatcgtgtacggcattaactcgctgtactacgacttcgtgggcgcgtcgccgatctccggcttcgacagccacttctcccatttcgcgcaggggtttgtggcgctgggctccttccgcctgtcctacattaccttctacgcgctgattgccgtcttctttgtctggatcctgtggaacaagacgcgctttggcaaaaacattttcgctatcggcggtaacccggaagcggcgaaggtctccggggttaacgtagcgttaaacctgctgatgatctatgccctctccggcgtgttctacgccttcggcggcctgctggaagccggtcgtatcggctcggcgaccaataacctcggctttatgtacgaactggacgccatcgccgcctgtgtggtgggcggcgtatcgttcagcggcggggtagggacggtgtttggcgtggtgaccggggtgattatcttcaccgtcatcaactacggcctgacctatatcggcgtcaacccttactggcagtacattattaagggggcgattattatcttcgccgtggcgctggactccctgaaatacgcccgtaagaaataa

SEQ ID NO: 271 - protein, 336 aa, Klebsiella pneumoniae subsp. pneumoniae MGH 78578
MSALNKKSFLTYLKEGGIYVVLLVLLAIIIFQDPTFLSLLNLSNILTQSSVRIIIALGVAGLIVTQGTDLSAGRQVGLAAVIAATMLQAVDNANKVFPDMATMPIPLVILLVCAIGAVIGLINGIVIAYLNVTPFITTLGTMIIVYGINSLYYDFVGASPISGFDSHFSHFAQGFVALGSFRLSYITFYALIAVFFVWILWNKTRFGKNIFAIGGNPEAAKVSGVNVALNLLMIYALSGVFYAFGGLLEAGRIGSATNNLGFMYELDAIAACVVGGVSFSGGVGTVFGVVTGVIIFTVINYGLTYIGVNPYWQYIIKGAIIIFAVALDSLKYARKK

SEQ ID NO: 272 - DNA, 1011 bp, Salmonella enterica subsp. arizonae serovar 62:z4,z23:--
  CDS (1)..(1011): transl_table=11
atgagtgtgttaaataagaaaagttttcttacttatctgaaagagggcggaatttacgtcgttcttttagttttgctggcaattattattttccaggacccgacttttttaagtttgctgaatttaagtaatattctgacgcaatcttcggtacgtatcattatcgcgctgggcgtggcgggattaatcgtcacccaagggacagatctgtcggcagggcgtcaggtaggactggcggcggtggtggcggcaacgttacttcaatcgatggaaaacgccaataaagtgtttccggaaatggcgaccatgccgattgcggtggtcatcctggttgtctgtgcgattggcgctgtgattggcctggtaaacggcatcatcattgcttacctgaatgtgacgccgtttattactacactcggcacgatgattatcgtttacgggatcaactccctttactatgactttgtcggcgcttcgcccatttctggctttgacagcggcttttccacctttgcgcagggctttgtggcgatgggcagtttccggctctcatacatcaccttttacgccctgattgcggtagcgtttgtctgggtactgtggaataagacccgctttggtaaaaacatttttgctattggcggcaatccggaagcggcgaaagtttctggggtaaacgtggcgctgaacctgctgatgatttacgcgctctccggtgtgttttatgctttcggcggcttactggaggcggggcgtattggttctgcaaccaacaacctcggctttatgtatgagctggacgcgattgccgcgtgcgtcgtcggcggcgtatcgtttagcggcggggtgggtacggtcttcggcgtggtgactggcgtcattatctttaccgtcatcaactatggtctgacctatatcggggtaaacccatactggcagtacattatcaaagggggcattatcatcttcgccgtggcgctggactcgctgaaatacgcgcgtaagaagtag

SEQ ID NO: 273 - protein, 336 aa, Salmonella enterica subsp. arizonae serovar 62:z4,z23:--
MSVLNKKSFLTYLKEGGIYVVLLVLLAIIIFQDPTFLSLLNLSNILTQSSVRIIIALGVAGLIVTQGTDLSAGRQVGLAAVVAATLLQSMENANKVFPEMATMPIAVVILVVCAIGAVIGLVNGIIIAYLNVTPFITTLGTMIIVYGINSLYYDFVGASPISGFDSGFSTFAQGFVAMGSFRLSYITFYALIAVAFVWVLWNKTRFGKNIFAIGGNPEAAKVSGVNVALNLLMIYALSGVFYAFGGLLEAGRIGSATNNLGFMYELDAIAACVVGGVSFSGGVGTVFGVVTGVIIFTVINYGLTYIGVNPYWQYIIKGGIIIFAVALDSLKYARKK

SEQ ID NO: 274 - DNA, 1011 bp, Haemophilus somnus 2336
  CDS (1)..(1011): transl_table=11
atgtctgctttaaaacaaaacaaatcgctagatttccttaaacaaaacgcaatttattttgtgttattgatcttactcggaattattattatgcaagactcaagtttcttaagtttaagaaactttagtaatattttaacgcaatcctccgttcgcttaattattgccttaggcgttgcaggtttattagttacacaaggaacagacttgtcagcgggtcgtcaagtcggtctagctgcagttatttcggcaactctgttacaggcaatggataatataaatagagttttccctgaacttggtgaaattcctattcctgttgtaatcatagtagtttgtgtgattggggcaataattggattggtaaatggggttgtgattgcgttcttaaatgtcacacctttcattgccacgatgggaacgatgattatcgtttacggtattaactctctctattatgatgctgtcggttcttcacctattgcagggttcaacgaaagtttctctacatttgctcaaggctttttccgtataggttctttcaagctttcctatattacaatctatgcagctttggcttctttctttgtatgggtactatggaataaaacacgtttcggtaaaaacattttcgctatcggtggtaatccggaagcagcaaaagtatcgggtgttaacgttactcgtaaccttgtcgtcatttacatgattgcaggtatattctacgctttcggggggatgttagaagcgggacgtatcggttctgccaccaacaatctaggttttatgtatgaacttgatgccattgcagcttgcgttgtaggcggtgtatcttttgcaggcggtgttggtactgtactaggcgtagtaaccggtgtattaatttttactgtcatcaactatggtttaacctatattggtgtaaatccatattggcaatatattatcaaaggttcaattattatctttgccgttgcaattgattccttgaaatatgcgaagaaaaaatag

SEQ ID NO: 275 - protein, 336 aa, Haemophilus somnus 2336
MSALKQNKSLDFLKQNAIYFVLLILLGIIIMQDSSFLSLRNFSNILTQSSVRLIIALGVAGLLVTQGTDLSAGRQVGLAAVISATLLQAMDNINRVFPELGEIPIPVVIIVVCVIGAIIGLVNGVVIAFLNVTPFIATMGTMIIVYGINSLYYDAVGSSPIAGFNESFSTFAQGFFRIGSFKLSYITIYAALASFFVWVLWNKTRFGKNIFAIGGNPEAAKVSGVNVTRNLVVIYMIAGIFYAFGGMLEAGRIGSATNNLGFMYELDAIAACVVGGVSFAGGVGTVLGVVTGVLIFTVINYGLTYIGVNPYWQYIIKGSIIIFAVAIDSLKYAKKK

SEQ ID NO: 276 - DNA, 999 bp, Nostoc punctiforme PCC 73102
  CDS (1)..(999): transl_table=11
atgagtcagacagtcagaccgcctatcaataaatcagccaacaattccgcagctcgcaaccggaaatcaatcagcactctgctggaagttgctggtattctgccaatcctagtaattatctgcatcttatttgcattcctttctcccaactttctcaccggcggtaacatcgtcaatatcttgcgtcaggcatcaatcaatattgtgctggcgacaggaatgacctttgtaattctcaccggaggtattgacctatcagttgggtcaatattggccgtttctgccgtagttggactgctggtatcgctattgccggctttaagttgggcggctgtacctgctgcattgttggcaggattgcttttaggcttagtcaacggcgctctcatcaccttcttggatgtgccaccttttattgtgacgttaggttcacttacagccttgcggggtgtggcatttctgattgcgaagggtacaacactgattaaccgagatatcaattttgcttgggtgggtaatagttacgtcgggcctctgccgtggttagtaatcattgccctactgaccgtaatcgctagctggtttgtgctgcggcaaactgttttaggagtgcagatatatgccgtaggaggtaacgaacgggcagccagattaactgggattaaagttaatcgtgtcttgctatttgtctatggtattagcggattactggcaggcttaggaggaatcatgagcgccagccgtctatatagtgccagtggcatattgggtcaaggttacgaattagatgcgatcgcagctgttattcttggtggaaccagctttacaggtggtattggtaccattggcggcactcttttaggtgcattaatcattgctattctcaacaacggtttaaccttgttgaacctatcttacttctggcaactagtcgtcaaaggactagtaattattttggcagtaatgattgatcgattgcgtagacgttccagacggtaa

SEQ ID NO: 277 - protein, 332 aa, Nostoc punctiforme PCC 73102
MSQTVRPPINKSANNSAARNRKSISTLLEVAGILPILVIICILFAFLSPNFLTGGNIVNILRQASINIVLATGMTFVILTGGIDLSVGSILAVSAVVGLLVSLLPALSWAAVPAALLAGLLLGLVNGALITFLDVPPFIVTLGSLTALRGVAFLIAKGTTLINRDINFAWVGNSYVGPLPWLVIIALLTVIASWFVLRQTVLGVQIYAVGGNERAARLTGIKVNRVLLFVYGISGLLAGLGGIMSASRLYSASGILGQGYELDAIAAVILGGTSFTGGIGTIGGTLLGALIIAILNNGLTLLNLSYFWQLVVKGLVIILAVMIDRLRRRSRR

SEQ ID NO: 278 - DNA, 1032 bp, Pectobacterium atrosepticum SCRI1043
  CDS (1)..(1032): transl_table=11
atgtcccagcagccgctttctaagacgattacgccgcccaacacgcgtggacgttttgaccccattggcttttttgaacgctttggcgtgtttattttcatgattttgctgctgattttctttcagtcgcagaacagcaactttctgtccgaacgcaacatcaccaacatccttaccgaagtgtccatctacggcatcatggccgtagggatgacgttcgtcattttgaccgctgggatcgacctgtccgtcggctcgattctggcggtatgtgcaatcactgccgcgtcggtgattaaaggcgacaacttcaccaccgtcgatcccgatgcctggtacggcttgagctggctggtcgcgttgggcgtctgtctggcaatgggcacctttattggtttcttgcatggtttaggggtgaccaaactgcgtctgccaccgttcatcgtcacgctgggcgggatgaccatctggcgcggattaacgctggtgatgaacgatggtgcgccgattgcgggctttgaccccggctatcgctggtggggacggggagagatcctcggtatttcggtgccgatctggatcttcgcgctggtcgccttactgggctatctggcgctgcataaaacccgctggggacgctttgtgtacgccatcggtggcaacaccgaagcggcgcgattggctggtgtgaatgtgcagcgtgtactcgtcagcgtctacgtggtgattggctgcctggctggactggcgggctttattctcagcgctcgtctcggcagcgcagaagcggtcgcggggatcaccttcgaactgcgcgtcatcgcctcggtggtgatcggtggcacctcgctgatgggcggctatggccggatcagcggcacgattatcggctcgatcatcatgggaattctgattaacggactggtattgatgaacgtatcggcctattaccagcagattatcaccgggttaattatcgtgctggccgtggcgttcgacacctatgccaagagccgtcgcggcgctatctga

SEQ ID NO: 279 - protein, 343 aa, Pectobacterium atrosepticum SCRI1043
MSQQPLSKTITPPNTRGRFDPIGFFERFGVFIFMILLLIFFQSQNSNFLSERNITNILTEVSIYGIMAVGMTFVILTAGIDLSVGSILAVCAITAASVIKGDNFTTVDPDAWYGLSWLVALGVCLAMGTFIGFLHGLGVTKLRLPPFIVTLGGMTIWRGLTLVMNDGAPIAGFDPGYRWWGRGEILGISVPIWIFALVALLGYLALHKTRWGRFVYAIGGNTEAARLAGVNVQRVLVSVYVVIGCLAGLAGFILSARLGSAEAVAGITFELRVIASVVIGGTSLMGGYGRISGTIIGSIIMGILINGLVLMNVSAYYQQIITGLIIVLAVAFDTYAKSRRGAI

SEQ ID NO: 280 - DNA, 1008 bp, Mannheimia succiniciproducens MBEL55E
  CDS (1)..(1008): transl_table=11
atggctggacaaaaaaataaaacatgggatttcttcaaacaaaatgccatttacttcgtcttattaattttattaggtgtaattattgctcaagacccatcattcttaaacctgatgaacttcagtaatattcttactcaatcttcggtgcgactaatcattgcattaggtatcgccggtttattggtggtacagggtaccgacttatcagccggtcgccaggtaggtttagccgctgtggtggccgccaccatgttacaggcaattgataacttaaaccgcgtatttccgaacctgcctgaaatgccgattttcgtagtgatactgattgtgtgctcaatcggtgccgtaatcggtttgatcaacggctttgtggtcgctatcttaaatgtaacgccgtttatcgccaccatgggtaccatgatcatcgtgtacggtttcaactcactttactatgatgcggtaggcggttcgccgattgccggattcagcgaaaacttttcttctttcgcgcaaggattcttccgtttcggttcctttaaactttcatacattacgatttacgccattatcgcgacaatcttaatgtggattttatggaacaaaactcgtttcggtaaaaatatctttgccatcggcggtaacccggaagcggcgcgtgtttcaggggtaaacgtaacacgcaacctattggttatctatatgttagccggcgtattctatgctttcggcggtatgttggaagccggccgtatcgggtctgcaaccaataacttaggtttcatgtacgaattggatgccatcgcagcctgtgtggtaggcggtgtatcattcgcgggcggcgtggggactatcatcggtgtagtaaccggggtgttaattttcaccgttatcaactacggtttaacctacatcggcgtaaacccgtactggcaatatattattaaaggtagcattatcatcttagccgttgctatcgactcattaaaatatgctaagaaaaaataa

SEQ ID NO: 281 - protein, 335 aa, Mannheimia succiniciproducens MBEL55E
MAGQKNKTWDFFKQNAIYFVLLILLGVIIAQDPSFLNLMNFSNILTQSSVRLIIALGIAGLLVVQGTDLSAGRQVGLAAVVAATMLQAIDNLNRVFPNLPEMPIFVVILIVCSIGAVIGLINGFVVAILNVTPFIATMGTMIIVYGFNSLYYDAVGGSPIAGFSENFSSFAQGFFRFGSFKLSYITIYAIIATILMWILWNKTRFGKNIFAIGGNPEAARVSGVNVTRNLLVIYMLAGVFYAFGGMLEAGRIGSATNNLGFMYELDAIAACVVGGVSFAGGVGTIIGVVTGVLIFTVINYGLTYIGVNPYWQYIIKGSIIILAVAIDSLKYAKKK

SEQ ID NO: 282 - DNA, 975 bp, Corynebacterium glutamicum ATCC 13032
  CDS (1)..(975): transl_table=11
ttgagcaccgccgtagtttcacagaagaagtccacaacggcatccaaaattggacattggatgctcaataacggtgcgttggtggggctgattgcactgtgtgttggactttttattgcaacaccccactttctcaccattcctaacctgatcaacatcggtatccaatcggcgacggtggcgatcctggcgttcggcatgaccttcgtcatcgttaccgcaggcattgatttgtctgtgggatcagtggctgcgttgggtgcgatgacctcggcgtatttcttcgcggaagttggtttgccgggctggatcacgctgctgattggcctgttcatcggattgttggcgggtgcgatctctggcatttctattgcttatggcaagttgcctgcgtttattgccaccttggccatgatgtcgatcgccaggggaatcaccttggtcatttcccaaggctcaccaattcccagtgcaccagctgtgaacgctttggggcgcacctactttggcatcccgatgccgattctgatgatggcactggctggcattgtgtgttggtttattttgagccgcaccgtgctgggacggtccatgtacgccattggcggaaacatggaagcagcccgactatctggtctgccagtgaagaaaatcctggtcatggtctatgcactggctggtgtgtatgcagcacttgcgggtctggtcatgacgggacgcttgtcgtccgcgcagccgcaggcaggcgtgggatacgaactcgatgcgattgccgccgtggtcattggtggtgcgtcacttgctggcggaaccggaaaagcaacgggcactttgattggtgccatcttgttggccgtgatccgcaatggcttgaacattttgaacgtgtcctcgttctggcagcagattgtcatcggttgtgtcatcgcgcttgcggtgggcttcgatgtcatccgaaacaaaacctctaagtaa

SEQ ID NO: 283 - protein, 324 aa, Corynebacterium glutamicum ATCC 13032
MSTAVVSQKKSTTASKIGHWMLNNGALVGLIALCVGLFIATPHFLTIPNLINIGIQSATVAILAFGMTFVIVTAGIDLSVGSVAALGAMTSAYFFAEVGLPGWITLLIGLFIGLLAGAISGISIAYGKLPAFIATLAMMSIARGITLVISQGSPIPSAPAVNALGRTYFGIPMPILMMALAGIVCWFILSRTVLGRSMYAIGGNMEAARLSGLPVKKILVMVYALAGVYAALAGLVMTGRLSSAQPQAGVGYELDAIAAVVIGGASLAGGTGKATGTLIGAILLAVIRNGLNILNVSSFWQQIVIGCVIALAVGFDVIRNKTSK

SEQ ID NO: 284 - DNA, 1011 bp, Haemophilus influenzae 86-028NP
  CDS (1)..(1011): transl_table=11
atgagtgccttagaaaaaaacaaatcctttgatctcttaaaacaaaatgcgatttattttgtgttattgattttgctcggcatcatcattgcacaagatccgacattcttaaatttagtcaatttcagtaacatcttaacccaatcttctgtacgtttaattattgctttaggggttgcgggtttattgattacacaagggactgacttatctgcaggtcgtcaagttggtttgtctgcagttatctctgcaacaatgttgcaatcaatggaaaatattaaccgcgtgttccctgaaatgggacaaataccaattccagtggttattctcgcagtttgtgctatcggtgcagtaattggtttagtgaatggtttagttatcgcttacttaaatgtaactccattcatcgcaaccatgggtacaatgatcatcatatatggtttcaactcactatactatgatgctgtaggtggttctccaatcgcaggttttagtgaaaatttctcaacatttgctcaaggattcttccgagtcggcagctttaaactctcttacatcacgatttatgcagctattgcagcattattagtatggattatgtggaacaaaactcgtttcggtaaaaacgtatttgctattgggggtaacccagaagcagctaaagtttcaggcgtgaatgttgctcgtaacttagttgcaatctatatgattgcaggtatgttctatgcctttggtggtatgcttgaagcgggtcgtatcggttctgcaactaacaacttaggttttatgtatgaattagatgctatcgccgcttgcgtagtgggtggcgtatcttttgctggtggggtaggtacagtaattggtgttatcactggggttattatctttactgttatcaactacggtttaacttacatcggtgtaaacccttactggcaatacatcattaaaggtagcattatcattctagcggtagccattgactcgttaaaatatgcgaagaaaaaataa

SEQ ID NO: 285 - protein, 336 aa, Haemophilus influenzae 86-028NP
MSALEKNKSFDLLKQNAIYFVLLILLGIIIAQDPTFLNLVNFSNILTQSSVRLIIALGVAGLLITQGTDLSAGRQVGLSAVISATMLQSMENINRVFPEMGQIPIPVVILAVCAIGAVIGLVNGLVIAYLNVTPFIATMGTMIIIYGFNSLYYDAVGGSPIAGFSENFSTFAQGFFRVGSFKLSYITIYAAIAALLVWIMWNKTRFGKNVFAIGGNPEAAKVSGVNVARNLVAIYMIAGMFYAFGGMLEAGRIGSATNNLGFMYELDAIAACVVGGVSFAGGVGTVIGVITGVIIFTVINYGLTYIGVNPYWQYIIKGSIIILAVAIDSLKYAKKK

SEQ ID NO: 286 - DNA, 1026 bp, Pseudomonas syringae pv. phaseolicola 1448A
  CDS (1)..(1026): transl_table=11
atgagcaacgcgatttcgcaaaacaaaccagccttggcaccgaccaggaacaaacggcggctgccaaccgagctgagtatttttctggtgctgatcggtataggtctgatctttgagctgtttggctggatcgtccgtgatcagagctttctgctcaactcccagcgtctggtactgatgatccttcaggtgtcgatcatcggcttgctggccatcggcgtgactcaggtgatcattaccacaggcatcgacctgtcgtccggttcggtgctggcactgtcagcgatgattgccgcgagcctggcgcaaacctcggacttttcccgggcggtatttccttccttgaccgacctgcccgtgtggattccgatcgtggtcgggctcggagtcgggctgctggcgggtgccatcaacggcagcatcattgccataaccggtattccgccattcattgccacgctgggcatgatggtctccgcgcgtggcctggcgcgcttctacaccgaaggtcagccggtgagcatgctctctgactcctacacggctatcggacagggcgcgatgccggtgatcatctttctggtggtggcggtgatcttccacattgccctgcgttacaccaagtacggcaaatacacctacgccatcggcggcaacatgcaggctgcgcgtacttccgggatcaacgtcaagcgccacctggttatcgtctatagcatcgccgggctgctggccgggctggcaggggtggttgcctcggcacgtgccgcaaccgggcaggccagaatgggcatgtcctatgaactggacgctatcgctgccgcagtcatcggcggcaccagcctgtccggtggagtagggcgaatcaccggcactgtgatcggtgcgctgattctcggcgtaatggccagtggtttcacctttgtcggcgtagacgcttatgttcaggacattatcaaaggcctgatcattgtagtggcggtggtaatcgatcaatatcgcaacaagcgcaagaccaagcgctga

SEQ ID NO: 287 - protein, 341 aa, Pseudomonas syringae pv. phaseolicola 1448A
MSNAISQNKPALAPTRNKRRLPTELSIFLVLIGIGLIFELFGWIVRDQSFLLNSQRLVLMILQVSIIGLLAIGVTQVIITTGIDLSSGSVLALSAMIAASLAQTSDFSRAVFPSLTDLPVWIPIVVGLGVGLLAGAINGSIIAITGIPPFIATLGMMVSARGLARFYTEGQPVSMLSDSYTAIGQGAMPVIIFLVVAVIFHIALRYTKYGKYTYAIGGNMQAARTSGINVKRHLVIVYSIAGLLAGLAGVVASARAATGQARMGMSYELDAIAAAVIGGTSLSGGVGRITGTVIGALILGVMASGFTFVGVDAYVQDIIKGLIIVVAVVIDQYRNKRKTKR

SEQ ID NO: 288 - DNA, 960 bp, Rubrobacter xylanophilus DSM 9941
  CDS (1)..(960): transl_table=11
ttggctagcctggcgcggcgggtgcggcctcgggagctgctctcccgcggcgggccgctcggcgggctcgtgctgctgtgcgccgtcatggcggtcctctcgcccagcttcctcaccgtaaccaacttcttcaacgtcggcacccagatagccgttatcctgatcctcgccctcgggcagaccttcgtgatcgtctccgggggcatagacctctcggtggggagcgtgctggcgctcgccggggtggtcttcgggtgggcgaccgcggtggccgggctgcccctcgcgccggcgcttctgctggggctcggggccggggccgccgccgggctcgtcaacgggctgctcataacgctcggcaacctgccgccgttcatcgcgacgctcgccatgctcagcgccgcccgggggttggcgctcgtgatctccggcggggtcccgctcagccccatcccggagcccgtccggcatctgggcagcggggacctcttcggggcggtgccgctgccggtggtgctcatgatcgccatgtggctcctgacggcggccatactccgctacacttacccggggcggtgcatgtacgccatcgggggcaacgaggaggccgcccggctctccgggataggggtggggaggcagaagctcctcatctacaccctctccggcctcttcgcgggggtggcgggcatcctgcagaccgcccgtctcgcctcggcccagccgcaggccgggttcaccttcgagctggacgccatagccgcggtggtcatcggcggggcgagcctcaccggcggggtcggcacggcctcggggacgctcatcggggcgctcatcctgggcgtgctgcgcaacgggctgaatctgctgaacgtctcggcgttctggcagcaggtggtcataggcgcggtcatcgcgctggccgtgatgacggataccttgagaaggcggaggaagtag

SEQ ID NO: 289 - protein, 319 aa, Rubrobacter xylanophilus DSM 9941
MASLARRVRPRELLSRGGPLGGLVLLCAVMAVLSPSFLTVTNFFNVGTQIAVILILALGQTFVIVSGGIDLSVGSVLALAGVVFGWATAVAGLPLAPALLLGLGAGAAAGLVNGLLITLGNLPPFIATLAMLSAARGLALVISGGVPLSPIPEPVRHLGSGDLFGAVPLPVVLMIAMWLLTAAILRYTYPGRCMYAIGGNEEAARLSGIGVGRQKLLIYTLSGLFAGVAGILQTARLASAQPQAGFTFELDAIAAVVIGGASLTGGVGTASGTLIGALILGVLRNGLNLLNVSAFWQQVVIGAVIALAVMTDTLRRRRK

SEQ ID NO: 290 - DNA, 1005 bp, Trichodesmium erythraeum IMS101
  CDS (1)..(1005): transl_table=11
atgattaaacaaattataaactttgctcttaataatgctatctacttagtgttaatcctattgttaattgttataactataatttcacctgattttttaacagttaataattttcgtctgattttaactcaagcttcgactcgaattattattgctttgggtgttgggggagttttaattactcaaggtactgatttatctgcaggacgtatagtaggagtaggagcagtattatcagcttcattattacaaggagcagattatccttaccgtatgtatccaaatttaatggaattacctttaataattccgatgttatttactctgataatttgtgctttttttgggttcattaatggagtggttgtaggtatgtttaaagtacctccttttattgctacattaggaacaatgattataatttatggattaaattctatttattttgatcgccctcctttaggagcacaaccagttggtggattagctgaaaattttactacttttgttcaaggtgatttgattttaggttcctttgaaattccatatttaattatctatgcagtcatagtaattggagttatttgggttttatggaatcaaactattttgggcagaaatatgtatgctataggaggaaatattgaagcagcaactgtctctggtgttagtgttattaagtatttattaattgtttatactttagcgggtttattatacggatttgctggaatattagaagcaggtcgtgttggcagtgccactaataatactggtaatatgtatgagttagatgccattgctgcttgtgtagtgggaggagtttctacttccggaggtattggtactgtatcaggagttgtcacaggagtcttgattttccaaattattaattatggtctggtatttattgagttaagtccttatttacaatttattgttaagggattaattattgtcagtgcagtggcaattgatattagaaaatatgttagacaaagttga

SEQ ID NO: 291 - protein, 334 aa, Trichodesmium erythraeum IMS101
MIKQIINFALNNAIYLVLILLLIVITIISPDFLTVNNFRLILTQASTRIIIALGVGGVLITQGTDLSAGRIVGVGAVLSASLLQGADYPYRMYPNLMELPLIIPMLFTLIICAFFGFINGVVVGMFKVPPFIATLGTMIIIYGLNSIYFDRPPLGAQPVGGLAENFTTFVQGDLILGSFEIPYLIIYAVIVIGVIWVLWNQTILGRNMYAIGGNIEAATVSGVSVIKYLLIVYTLAGLLYGFAGILEAGRVGSATNNTGNMYELDAIAACVVGGVSTSGGIGTVSGVVTGVLIFQIINYGLVFIELSPYLQFIVKGLIIVSAVAIDIRKYVRQS

SEQ ID NO: 292 - DNA, 975 bp, Rhizobium leguminosarum bv. viciae 3841
  CDS (1)..(975): transl_table=11
atgactgccacccccaccgaaatcgtcgcgccgccgccgcgccggaaaatgaacatcctgttcggcctgacgctgatcggcctgctgatcttcctctggatcgtgcttggcgtcgtcaccccgagcttctggacgccgctcaatatctccaacctgctgcggcagggtgcgatgacggcgatcctggcgcttggccagaccttcgtcatcatcaccgccggcatcgacctttcggtcggcgccatcgtcggcttctgtaccgtcatcatcgcctggctgctgcaggcgggcgtgccggtctggggtgcgatcgcgctgacgctgctcatgggtgtggcgattggcgccttccatggcttcggcatcgtgcatatgggcctgccgccgttcatcatcacgctggcaaccctgacatcgctgcgcggcatcggcctgttgatcaccaacggttcgacgatcaacatcaccaatgagggcttcagcaatttcgctcgcgccgatctgctcagtattccgagcttgttctggatggtgatcttggtggcggtcccatccttcatcttcctgcatctgagccgttggggccgctatctcttcgcggtcggttcgaacgccgaggcggcacgcctttccggcgtcaacgtcaaaggcatgatctaccttgcctacatcctctcggcctccttcgccgccttcgtcggcgtgctgcttgcctcgcgcattgcgatcggcaatgcgacacaggccgacggctgggaactgcaggcaatcgcctcctccgtcatcggcggcaccagcctgttcggcgcggtcggctcggtgcacggcccgctgatcggcgccttcattctcgccaccatcaacaacggcgcgaaccttctgaacgtcaactccttctggcagcgcatcatcaccggtctgctgatcatcgtgatcgtgttcttcgaccagctgcgccgccgccggagcaattga

SEQ ID NO: 293 - protein, 324 aa, Rhizobium leguminosarum bv. viciae 3841
MTATPTEIVAPPPRRKMNILFGLTLIGLLIFLWIVLGVVTPSFWTPLNISNLLRQGAMTAILALGQTFVIITAGIDLSVGAIVGFCTVIIAWLLQAGVPVWGAIALTLLMGVAIGAFHGFGIVHMGLPPFIITLATLTSLRGIGLLITNGSTINITNEGFSNFARADLLSIPSLFWMVILVAVPSFIFLHLSRWGRYLFAVGSNAEAARLSGVNVKGMIYLAYILSASFAAFVGVLLASRIAIGNATQADGWELQAIASSVIGGTSLFGAVGSVHGPLIGAFILATINNGANLLNVNSFWQRIITGLLIIVIVFFDQLRRRRSN

SEQ ID NO: 294 - DNA, 1020 bp, Fusobacterium nucleatum subsp. vincentii ATCC 49256
  CDS (1)..(1020): transl_table=11
atgattgcaagaactaatgaaggaaaaatagattataaaaaaattattatagaaagtggactatatcttgtattgttttgtatgcttgttgcaataataataaaagaacctacttttttaagtataagaaactttaaaaatattcttacacaatcatctgtaagaacaattattgcacttggtgttgctgggcttatagtaacacaaggtactgatttatcagcaggtagacaagttggactttctgctgttatatctggaacacttttacaatcaatgacaaatgtaaataaagcatttccaaaattaggagaattttcaatatttacgactatattaattgttgtagtggttggtgtagttatagcaagtataaatggtatagttgtagctacattaaatgttcatccatttatagctactatgggtactatgactattgtttatggaataaactcgctttactatgataaagcaggagctgctccaatttctggatttgtagaaaaatatagtaaatttgcacaaggctatatacaaataggctcgtatacaataccatatttaattatttatgctgctattgcaacattaatcatgtggactttatggaataaaacaaaatttggtaaaaatgtatttgcagttggtggaaatccagaagctgcaaaggtatcaggagtaaatgttgttctaactcttatgggaatatatgcattatctggggcatattatgcttttggtggtttcttagaagctggacgtattggttctgcaaccaataacctaggatttatgtatgaaatggatgccattgctgcctgtgtaattggaggagtttcgttctatggtggtgttggtagaatttcaggagttattacaggggttataattttaactattataaattatggacttacttatacaggtgttagtccatactggcaatatattataaaaggtataataattgttgtagctgttgcatttgactctattaaatatgctaagaaaaaatag

SEQ ID NO: 295 - protein, 339 aa, Fusobacterium nucleatum subsp. vincentii ATCC 49256
MIARTNEGKIDYKKIIIESGLYLVLFCMLVAIIIKEPTFLSIRNFKNILTQSSVRTIIALGVAGLIVTQGTDLSAGRQVGLSAVISGTLLQSMTNVNKAFPKLGEFSIFTTILIVVVVGVVIASINGIVVATLNVHPFIATMGTMTIVYGINSLYYDKAGAAPISGFVEKYSKFAQGYIQIGSYTIPYLIIYAAIATLIMWTLWNKTKFGKNVFAVGGNPEAAKVSGVNVVLTLMGIYALSGAYYAFGGFLEAGRIGSATNNLGFMYEMDAIAACVIGGVSFYGGVGRISGVITGVIILTIINYGLTYTGVSPYWQYIIKGIIIVVAVAFDSIKYAKKK

SEQ ID NO: 296 - DNA, 1029 bp, Moritella sp. PE36
  CDS (1)..(1029): transl_table=11
atgagccagaaccagacagttaataaaaattccaataaccattcgaacaacaatgtgaccggtgatgttatgacgaaaactttaacccgaaaatatttcacgaaagagtggttgtttgaacaaaaatcattaattgccttaattttgctgattgtggtggtgtctttcttaaatccgcactttttcacaatgggcaatattttaaacatattacgtcaaacatcggtgagcgcgatcattgcagtgggcatgaccttagtgatcttaaccggtggtattgatttaggtgttggttcggtattagccctatgtggtgcctttgctgcgtccttaatcgcaatggaagtgtcagtgatgatagccgtacctgtggcattatttgcgggggctgcattaggtgcaatgagcggtatgattattgccataggtaaggtacaagcctttattgcgacgctggtgaccatgacattattgcgtggtgtgactatggtatataccgacggtcgtccaatctcaactggttttacggatgttgccgatagtttctcatggatcggtacgggttatttattaggtgtgccagtaccagtctggctaatggttattgtttttgcttcggtatggtacttacttaatcatacccgttttggtcgttatgtttatgcccttggtggtaacgaagctgcgacacgtttatcgggtattaacgtcgataaagtgaagattggtgtttatgcaatctgtggtgtactggctgctctagccggcctgattgtgacctctcgtctctcatctgcgcaaccaaccgcgggtatggggtatgagttagatgcgattgcagcagtcgtcgtcggcggtaccagccttgcgggtggtaaaggtcgaattatgggcacgctgatcggagcattaattatcggcttcctcaacaacgcattaaatctattggatgtatcttcatacttccaaatgattgctaaagctgtggtgatcttactggcagtattagttgaaacgaaaaagaaataa

SEQ ID NO: 297 - protein, 342 aa, Moritella sp. PE36
MSQNQTVNKNSNNHSNNNVTGDVMTKTLTRKYFTKEWLFEQKSLIALILLIVVVSFLNPHFFTMGNILNILRQTSVSAIIAVGMTLVILTGGIDLGVGSVLALCGAFAASLIAMEVSVMIAVPVALFAGAALGAMSGMIIAIGKVQAFIATLVTMTLLRGVTMVYTDGRPISTGFTDVADSFSWIGTGYLLGVPVPVWLMVIVFASVWYLLNHTRFGRYVYALGGNEAATRLSGINVDKVKIGVYAICGVLAALAGLIVTSRLSSAQPTAGMGYELDAIAAVVVGGTSLAGGKGRIMGTLIGALIIGFLNNALNLLDVSSYFQMIAKAVVILLAVLVETKKK

SEQ ID NO: 298 - DNA, 1011 bp, Haemophilus influenzae
  CDS (1)..(1011): transl_table=11
atgagtgccttagaaaaaaacaaatcctttgatctcttaaaacaaaatgcgatttattttgtgttattgattttgctcggcatcatcattgcacaagatccgacattcttaaatttagtcaatttcagtaacatcttaacccaatcttctgtacgtttaattattgctttaggggttgcgggtttattgattacacaagggactgacttatctgcaggtcgtcaagttggtttggctgcagttatctctgcaacaatgttgcaatcaatggaaaatattaaccgcgtgttccctgaaatgggacaaataccaattccagtggttattctcgcagtttgtgctatcggtgcagtaattggtttagtgaatggtttagttatcgcttacttaaatgtaactccattcatcgcaaccatgggtacaatgatcatcatatatggtttcaactcactatactatgatgctgtaggtggttctccaatcgcaggttttagtgaaaatttctcaacatttgctcaaggattcttccgagtcggcagctttaaactctcttacatcacgatttatgcagctattgcagcattattagtatggattatgtggaacaaaactcgtttcggtaaaaacgtatttgctatcggtggtaacccagaagcagctaaagtatctggtgtaaacgttgcacgtaacttagttgcaatctatatgattgcaggtatgttctatgcctttggtggtatgcttgaagcgggtcgtatcggttctgcaactaacaacttaggttttatgtatgaattagatgctatcgccgcttgcgtagtgggtggtgtatcttttgctggtggggtaggtacagtaattggtgttatcactggggttattatctttactgttatcaactacggtttaacttacatcggtgtaaacccttactggcaatacatcattaaaggtagcattatcattctagcggtagccattgactcgttaaaatatgcgaagaaaaaataa

SEQ ID NO: 299 - protein, 336 aa, Haemophilus influenzae
MSALEKNKSFDLLKQNAIYFVLLILLGIIIAQDPTFLNLVNFSNILTQSSVRLIIALGVAGLLITQGTDLSAGRQVGLAAVISATMLQSMENINRVFPEMGQIPIPVVILAVCAIGAVIGLVNGLVIAYLNVTPFIATMGTMIIIYGFNSLYYDAVGGSPIAGFSENFSTFAQGFFRVGSFKLSYITIYAAIAALLVWIMWNKTRFGKNVFAIGGNPEAAKVSGVNVARNLVAIYMIAGMFYAFGGMLEAGRIGSATNNLGFMYELDAIAACVVGGVSFAGGVGTVIGVITGVIIFTVINYGLTYIGVNPYWQYIIKGSIIILAVAIDSLKYAKKK

SEQ ID NO: 300 - DNA, 1011 bp, Salmonella typhimurium
  CDS (1)..(1011): transl_table=11
atgagtgcgttaaacaagaaaagctttttgacctggctgaaagagggcggaatttacgtcgttcttttagtgttgctggcgattattattttccaggacccgacttttttaagtttgctgaatttaagtaatattctgacgcaatcttcggtacgtattattatcgcgctgggcgtggcgggactcatcgtcacccaggggacagatctgtcggcggggcgtcaggtagggctggcggcggtcgtggcggcaacattactgcaatcaatggaaaacgccaataaagtgtttccggaaatggcgaccatgccgattgcgctggtcatcctgattgtctgcgcgattggcgcggtgattggcttggtgaacggcatcatcattgcttacctgaacgtgacgccgtttattaccacgcttggcacgatgattatcgtttatgggatcaactccctttactatgactttgtcggcgcttcgcccatttccggctttgacagcggcttttccacctttgcacagggctttgtggcgatgggcagtttccggctctcatacatcaccttttacgctctgattgcggtagcgtttgtctgggtgctgtggaataagacccgttttggtaaaaacatttttgctattggcggcaacccggaagcggcgaaagtttctggcgtaaacgtggcgctgaacctgctgatgatttatgcgctctccggcgtgttttatgccttcggcggcttactggaagcagggcgtattggttctgccaccaacaacctcggctttatgtatgaactggatgcgattgccgcgtgcgtggtcgggggcgtatcgtttagcggcggagtgggtacggtcttcggcgtggtgaccggcgtcattatctttaccgtcatcaactacggcctgacctatatcggggtaaacccgtactggcagtacattatcaaaggcggcattatcattttcgccgtggcgctggactcgctgaaatacgcgcgtaagaagtag

SEQ ID NO: 301 - protein, 336 aa, Salmonella typhimurium
MSALNKKSFLTWLKEGGIYVVLLVLLAIIIFQDPTFLSLLNLSNILTQSSVRIIIALGVAGLIVTQGTDLSAGRQVGLAAVVAATLLQSMENANKVFPEMATMPIALVILIVCAIGAVIGLVNGIIIAYLNVTPFITTLGTMIIVYGINSLYYDFVGASPISGFDSGFSTFAQGFVAMGSFRLSYITFYALIAVAFVWVLWNKTRFGKNIFAIGGNPEAAKVSGVNVALNLLMIYALSGVFYAFGGLLEAGRIGSATNNLGFMYELDAIAACVVGGVSFSGGVGTVFGVVTGVIIFTVINYGLTYIGVNPYWQYIIKGGIIIFAVALDSLKYARKK

SEQ ID NO: 302 - DNA, 969 bp, Bacillus subtilis
  CDS (1)..(969): transl_table=11
atgaaaacggaacaactgcaaacagaacaaaaacggattcacttcgacggagtcatgcaaaaactcggcccgtttcttggtttatttattctcgttatcattgtatctattttaaatcccagctttcttgaaccgctgaatattttaaacctgcttcgccaggtcgccattaacggattaatcgcgttcgggatgacctttgttattttgacaggcggcattgatctttctgttggcgctattcttgccctgtccagtgctttagttgcggggatgattgtgtccggtgtcgatccggttctcgcgatcatccttggctgtatcattggtgccgtactaggcatgatcaacggattattgattactaaaggaaaaatggcgccctttatcgccacgcttgcgaccatgactgtgtttcgcggactgacgctagtgtatacagatggaaatccgattaccggacttggcacaaactacggttttcagatgttcggacgcggttactttttaggcattcctgtaccggcaattacgatggttcttgcctttgtcatcctttgggtgcttcttcataaaacaccattcggacgccgaacgtacgctatcggcggcaacgaaaaagccgcgctcatttcaggcatcaaagtgacgcgcgtgaaagtgatgatctattctttagccgggcttttatccgctcttgcaggtgccatattgacttcccgcctgcattcggcccagccgactgcgggagaatcgtacgaacttgatgctatcgcggcagtcgtcttaggagggacaagtctttccggcggccgaggacgcattgtcggcacgttaatcggggtgctgatcatcggcacacttaataacggacttaatctgcttggcgtctcatcattttatcagctggttgtcaaagggattgttatcttaattgcggtattgttagaccgcaagaagtcagcttag

SEQ ID NO: 303 - protein, 322 aa, Bacillus subtilis
MKTEQLQTEQKRIHFDGVMQKLGPFLGLFILVIIVSILNPSFLEPLNILNLLRQVAINGLIAFGMTFVILTGGIDLSVGAILALSSALVAGMIVSGVDPVLAIILGCIIGAVLGMINGLLITKGKMAPFIATLATMTVFRGLTLVYTDGNPITGLGTNYGFQMFGRGYFLGIPVPAITMVLAFVILWVLLHKTPFGRRTYAIGGNEKAALISGIKVTRVKVMIYSLAGLLSALAGAILTSRLHSAQPTAGESYELDAIAAVVLGGTSLSGGRGRIVGTLIGVLIIGTLNNGLNLLGVSSFYQLVVKGIVILIAVLLDRKKSA

SEQ ID NO: 304 - DNA, 23 bp, Artificial sequence
  primer
atgagtgcgttaaataagaaaag

SEQ ID NO: 305 - DNA, 26 bp, Artificial sequence
  primer
ttatttcttacgcgcgtatttcagtg

SEQ ID NO: 306 - protein, 316 aa, Artificial sequence
  consensus sequence
  Variant (2)..(3): Xaa in position 2 to 3 is any amino acid
  Variant (5)..(12): Xaa in position 5 to 12 is any amino acid
  Variant (13)..(18): Xaa in position 13 to 18 is any or no amino acid
  Variant (20)..(20): Xaa in position 20 is any amino acid
  Variant (23)..(25): Xaa in position 23 to 25 is any amino acid
  Variant (27)..(28): Xaa in position 27 to 28 is any amino acid
  Variant (32)..(32): Xaa in position 32 is any amino acid
  Variant (34)..(34): Xaa in position 34 is any amino acid
  Variant (36)..(38): Xaa in position 36 to 38 is any amino acid
  Variant (40)..(40): Xaa in position 40 is any amino acid
  Variant (42)..(42): Xaa in position 42 is any amino acid
  Variant (44)..(49): Xaa in position 44 to 49 is any amino acid
  Variant (51)..(51): Xaa in position 51 is any amino acid
  Variant (53)..(53): Xaa in position 53 is any amino acid
  Variant (57)..(57): Xaa in position 57 is any amino acid
  Variant (59)..(62): Xaa in position 59 to 62 is any amino acid
  Variant (64)..(64): Xaa in position 64 is any amino acid
  Variant (66)..(68): Xaa in position 66 to 68 is any amino acid
  Variant (70)..(88): Xaa in position 70 to 88 is any amino acid
  Variant (89)..(100): Xaa in position 89 to 100 is any or no amino acid
  Variant (102)..(104): Xaa in position 102 to 104 is any amino acid
  Variant (106)..(107): Xaa in position 106 to 107 is any amino acid
  Variant (110)..(118): Xaa in position 110 to 118 is any amino acid
  Variant (122)..(122): Xaa in position 122 is any amino acid
  Variant (124)..(124): Xaa in position 124 is any amino acid
  Variant (126)..(126): Xaa in position 126 is any amino acid
  Variant (128)..(131): Xaa in position 128 to 131 is any amino acid
  Variant (133)..(136): Xaa in position 133 to 136 is any amino acid
  Variant (138)..(141): Xaa in position 138 to 141 is any amino acid
  Variant (142)..(146): Xaa in position 142 to 146 is any or no amino acid
  Variant (149)..(175): Xaa in position 149 to 175 is any amino acid
  Variant (176)..(185): Xaa in position 176 to 185 is any or no amino acid
  Variant (187)..(191): Xaa in position 187 to 191 is any amino acid
  Variant (193)..(194): Xaa in position 193 to 194 is any amino acid
  Variant (196)..(199): Xaa in position 196 to 199 is any amino acid
  Variant (201)..(201): Xaa in position 201 is any amino acid
  Variant (205)..(206): Xaa in position 205 to 206 is any amino acid
  Variant (209)..(210): Xaa in position 209 to 210 is any amino acid
  Variant (213)..(213): Xaa in position 213 is any amino acid
  Variant (216)..(218): Xaa in position 216 to 218 is any amino acid
  Variant (220)..(222): Xaa in position 220 to 222 is any amino acid
  Variant (224)..(226): Xaa in position 224 to 226 is any amino acid
  Variant (228)..(233): Xaa in position 228 to 233 is any amino acid
  Variant (235)..(239): Xaa in position 235 to 239 is any amino acid
  Variant (241)..(242): Xaa in position 241 to 242 is any amino acid
  Variant (245)..(248): Xaa in position 245 to 248 is any amino acid
  Variant (250)..(251): Xaa in position 250 to 251 is any amino acid
  Variant (260)..(260): Xaa in position 260 is any amino acid
  Variant (262)..(262): Xaa in position 262 is any amino acid
  Variant (265)..(265): Xaa in position 265 is any amino acid
  Variant (267)..(268): Xaa in position 267 to 268 is any amino acid
  Variant (271)..(271): Xaa in position 271 is any amino acid
  Variant (273)..(275): Xaa in position 273 to 275 is any amino acid
  Variant (277)..(279): Xaa in position 277 to 279 is any amino acid
  Variant (281)..(282): Xaa in position 281 to 282 is any amino acid
  Variant (284)..(289): Xaa in position 284 to 289 is any amino acid
  Variant (292)..(295): Xaa in position 292 to 295 is any amino acid
  Variant (297)..(298): Xaa in position 297 to 298 is any amino acid
  Variant (300)..(300): Xaa in position 300 is any amino acid
  Variant (302)..(302): Xaa in position 302 is any amino acid
  Variant (304)..(304): Xaa in position 304 is any amino acid
  Variant (307)..(308): Xaa in position 307 to 308 is any amino acid
  Variant (310)..(311): Xaa in position 310 to 311 is any amino acid
  Variant (314)..(315): Xaa in position 314 to 315 is any amino acid
LXXLXXXXXXXXXXXXXXPXFLXXXNXXNILXQXSXXXIXAXGXXXXXXTXGXDLSXGXXXXLXAXXXAXXXXXXXXXXXXXXXXXXXXXXXXXXXXXXXGXXXGXXNGXXXXXXXXXPFIXTXGXMXXXXGXXXXYXXXXXXXXXPIXXXXXXXXXXXXXXXXXXXXXXXXXXXXXXXXXXXXXWXXXXXTXXGXXXXAXGGNXXAAXXSGXNVXXXLXXXYXXXGXXXXXXGXXXXXRXXSAXXXXGXXYELDAIAAXVXGGXSXXGGXGXXXGXXXGXXIXXXXXXGLXXXXVXXYXQXIXKGXXIXXAVXXD

SEQ ID NO: 307 - protein, 60 aa, Artificial sequence
  protein pattern
  Variant (3)..(3): Xaa in position 3 is Gln, Ser or Thr
  Variant (4)..(4): Xaa in position 4 is Ala, Gly, Asn or Pro
  Variant (5)..(6): Xaa in position 5 to 6 is any amino acid
  Variant (8)..(9): Xaa in position 8 to 9 is any amino acid
  Variant (10)..(10): Xaa in position 10 is Phe or Tyr
  Variant (12)..(12): Xaa in position 12 is Leu or Met
  Variant (17)..(17): Xaa in position 17 is any amino acid
  Variant (18)..(18): Xaa in position 18 is any or no amino acid
  Variant (20)..(20): Xaa in position 20 is any amino acid
  Variant (21)..(21): Xaa in position 21 is any or no amino acid
  Variant (24)..(24): Xaa in position 24 is Ala, Thr or Val
  Variant (26)..(27): Xaa in position 26 to 27 is any amino acid
  Variant (30)..(30): Xaa in position 30 is any amino acid
  Variant (32)..(32): Xaa in position 32 is any amino acid
  Variant (33)..(33): Xaa in position 33 is Ala, Ile or Val
  Variant (34)..(34): Xaa in position 34 is any amino acid
  Variant (36)..(36): Xaa in position 36 is any amino acid
  Variant (37)..(37): Xaa in position 37 is Ile, Leu or Val
  Variant (38)..(38): Xaa in position 38 is any amino acid
  Variant (40)..(40): Xaa in position 40 is Ala or Val
  Variant (41)..(42): Xaa in position 41 to 42 is Ile or Leu
  Variant (43)..(43): Xaa in position 43 is Phe, Ile or Leu
  Variant (44)..(44): Xaa in position 44 is Ala, Gly, Gln or Thr
  Variant (45)..(45): Xaa in position 45 is any amino acid
  Variant (46)..(46): Xaa in position 46 is Ile or Leu
  Variant (47)..(48): Xaa in position 47 to 48 is any amino acid
  Variant (49)..(49): Xaa in position 49 is Ala or Gly
  Variant (50)..(50): Xaa in position 50 is Leu or Met
  Variant (51)..(51): Xaa in position 51 is Ala, Asn, Thr or Val
  Variant (52)..(53): Xaa in position 52 to 53 is any amino acid
  Variant (54)..(54): Xaa in position 54 is Asp, Glu, Gly or Asn
  Variant (55)..(55): Xaa in position 55 is Leu or Val
  Variant (56)..(56): Xaa in position 56 is Asn or Ser
  Variant (57)..(57): Xaa in position 57 is any amino acid
  Variant (58)..(58): Xaa in position 58 is Phe or Tyr
  Variant (59)..(59): Xaa in position 59 is any amino acid
SAXXXXGXXXEXDAIAXXVXXGGXSXXGGXGXXXGXXXGXXXXXXXXXXXXXXXXXXXXQ

SEQ ID NO: 308 - protein, 57 aa, Artificial sequence
  protein pattern
  Variant (2)..(3): Xaa in position 2 to 3 is any amino acid
  Variant (4)..(8): Xaa in position 4 to 8 is any or no amino acid
  Variant (10)..(11): Xaa in position 10 to 11 is any amino acid
  Variant (13)..(13): Xaa in position 13 is Lys or Arg
  Variant (14)..(15): Xaa in position 14 to 15 is any amino acid
  Variant (16)..(16): Xaa in position 16 is Phe or Tyr
  Variant (18)..(18): Xaa in position 18 is Ile or Val
  Variant (22)..(23): Xaa in position 22 to 23 is any amino acid
  Variant (26)..(27): Xaa in position 26 to 27 is any amino acid
  Variant (28)..(28): Xaa in position 28 is Ala or Ser
  Variant (30)..(30): Xaa in position 30 is Ile, Leu or Val
  Variant (31)..(31): Xaa in position 31 is any amino acid
  Variant (33)..(36): Xaa in position 33 to 36 is any amino acid
  Variant (37)..(37): Xaa in position 37 is Ile, Leu, Met or Val
  Variant (38)..(38): Xaa in position 38 is any amino acid
  Variant (39)..(39): Xaa in position 39 is Ile or Val
  Variant (41)..(41): Xaa in position 41 is any amino acid
  Variant (42)..(42): Xaa in position 42 is Ile, Leu or Val
  Variant (43)..(43): Xaa in position 43 is any amino acid
  Variant (45)..(47): Xaa in position 45 to 47 is any amino acid
  Variant (48)..(48): Xaa in position 48 is Ala or Gly
  Variant (49)..(49): Xaa in position 49 is Phe, Leu or Val
  Variant (50)..(50): Xaa in position 50 is Ala or Gly
  Variant (52)..(52): Xaa in position 52 is any amino acid
  Variant (53)..(53): Xaa in position 53 is Ile, Leu or Val
  Variant (54)..(54): Xaa in position 54 is any amino acid
  Variant (55)..(55): Xaa in position 55 is Ala, Ser or Thr
  Variant (56)..(56): Xaa in position 56 is Ala, Gly or Ser
LXXXXXXXTXXGXXXXAXGGNXXAAXXXGXXVXXXXXXXYXXXGXXXXXXGXXXXXR

SEQ ID NO: 309 - protein, 32 aa, Artificial sequence
  protein pattern
  Variant (2)..(4): Xaa in position 2 to 4 is any amino acid
  Variant (5)..(5): Xaa in position 5 is any or no amino acid
  Variant (7)..(7): Xaa in position 7 is any or no amino acid
  Variant (9)..(9): Xaa in position 9 is Phe, Leu or Val
  Variant (11)..(11): Xaa in position 11 is Ile, Met or Val
  Variant (12)..(12): Xaa in position 12 is Ala, Gly or Thr
  Variant (13)..(13): Xaa in position 13 is any amino acid
  Variant (14)..(14): Xaa in position 14 is Ala, Ile, Leu or Val
  Variant (15)..(15): Xaa in position 15 is Ile or Leu
  Variant (16)..(16): Xaa in position 16 is Ile, Leu or Val
  Variant (17)..(17): Xaa in position 17 is Thr or Val
  Variant (18)..(18): Xaa in position 18 is any amino acid
  Variant (20)..(20): Xaa in position 20 is any amino acid
  Variant (23)..(23): Xaa in position 23 is Gly or Ser
  Variant (24)..(24): Xaa in position 24 is Ala, Ser or Val
  Variant (26)..(26): Xaa in position 26 is Arg or Ser
  Variant (27)..(27): Xaa in position 27 is any amino acid
  Variant (28)..(28): Xaa in position 28 is Ala, Leu or Val
  Variant (29)..(29): Xaa in position 29 is Ala or Gly
  Variant (30)..(30): Xaa in position 30 is Phe, Leu or Val
  Variant (31)..(31): Xaa in position 31 is Ala, Cys, Gly, Ser or Thr
  Variant (32)..(32): Xaa in position 32 is Ala or Gly
SXXXXIXAXGXXXXXXXXGXDLXXGXXXXXXX

SEQ ID NO: 310 - protein, 41 aa, Artificial sequence
  protein pattern
  Variant (2)..(2): Xaa in position 2 is any amino acid
  Variant (3)..(3): Xaa in position 3 is Ile, Leu or Val
  Variant (4)..(4): Xaa in position 4 is any amino acid
  Variant (6)..(7): Xaa in position 6 to 7 is any amino acid
  Variant (8)..(8): Xaa in position 8 is Ile or Val
  Variant (9)..(9): Xaa in position 9 is Ala, Gly, Ser or Thr
  Variant (10)..(12): Xaa in position 10 to 12 is any amino acid
  Variant (13)..(13): Xaa in position 13 is Ile, Leu, Met or Val
  Variant (14)..(14): Xaa in position 14 is any amino acid
  Variant (15)..(15): Xaa in position 15 is Ala or Pro
  Variant (18)..(18): Xaa in position 18 is any or no amino acid
  Variant (20)..(22): Xaa in position 20 to 22 is any amino acid
  Variant (23)..(23): Xaa in position 23 is any or no amino acid
  Variant (25)..(28): Xaa in position 25 to 28 is any amino acid
  Variant (30)..(30): Xaa in position 30 is any amino acid
  Variant (31)..(31): Xaa in position 31 is Ala, Asn, Ser or Thr
  Variant (32)..(38): Xaa in position 32 to 38 is any amino acid
  Variant (39)..(39): Xaa in position 39 is Gly or Pro
  Variant (40)..(40): Xaa in position 40 is any amino acid
  Variant (41)..(41): Xaa in position 41 is Ala, Gly, Asn, Pro, Ser or Thr
GXXXGXXXXXXXXXXFIXTXXXXMXXXXGXXXXXXXXXXXX

SEQ ID NO: 311 - protein, 16 aa, Artificial sequence
  protein pattern
  Variant (2)..(2): Xaa in position 2 is any amino acid
  Variant (3)..(3): Xaa in position 3 is Ile or Val
  Variant (5)..(5): Xaa in position 5 is Ala, Ile or Val
  Variant (6)..(6): Xaa in position 6 is any amino acid
  Variant (9)..(9): Xaa in position 9 is Ala, Gly, Ile or Val
  Variant (10)..(10): Xaa in position 10 is any amino acid
  Variant (12)..(13): Xaa in position 12 to 13 is any amino acid
  Variant (14)..(15): Xaa in position 14 to 15 is any or no amino acid
GXXIXXAVXXDXXXXK

SEQ ID NO: 312 - DNA, 576 bp, Escherichia coli
  CDS (1)..(576): transl_table=11
atgagcgagcagttaacggaccaggtcctggttgaacgggtccagaagggagatcagaaagcctttaacttactggtagtgcgctatcagcataaagtggcgagtctggtttcccgctatgtgccgtcgggtgatgttcccgatgtggtacaagaagcttttattaaagcctatcgtgcgctggattcgttccggggagatagcgctttttatacatggctgtatcggattgctgtaaatacagcgaaaaattacctggttgctcaggggcgtcgtccaccttccagtgatgtggatgccattgaagctgaaaacttcgaaagtggcggcgcgttgaaagaaatttcgaaccctgagaacttaatgttgtcagaagaactgagacagatagttttccgaactattgagtccctcccggaagatttacgcatggcaataaccttgcgggagctggatggcctgagctatgaagagatagccgctatcatggattgtccggtaggtacggtgcgttcacgtatcttccgagcgagggaagctattgataacaaagttcaaccgcttatcaggcgttaa

SEQ ID NO: 313 - protein, 191 aa, Escherichia coli
MSEQLTDQVLVERVQKGDQKAFNLLVVRYQHKVASLVSRYVPSGDVPDVVQEAFIKAYRALDSFRGDSAFYTWLYRIAVNTAKNYLVAQGRRPPSSDVDAIEAENFESGGALKEISNPENLMLSEELRQIVFRTIESLPEDLRMAITLRELDGLSYEEIAAIMDCPVGTVRSRIFRAREAIDNKVQPLIRR

SEQ ID NO: 314 - DNA, 570 bp, Haemophilus influenzae
  CDS (1)..(570): transl_table=11
atggctgaacagctaacagatcaggctttggtagaaagagtgcagcaaggggataagaaagccttcaatttgttggtttcgcgttatcagaataaagtggcggggcttttgactcgctatgtatcacgtaacgatattcctgatgtggtgcaagaatcctttataaaagcttatcgctcaattgaatcttttcgtggcgaaagtgctttctatacatggctttatcgaattgccgttaatacggcaaaaaattatttaacggctcaaggtcgccgtccaccaaatgaagatattttggcagaagatgctgaaaattatgatgtgggtacgcacttgcgggatgtggatacacccgaaaatgaaatgttgtctagtgagttagaaagaattgtttttgatactattcataacttaccagaagatttaaaaaccgcgattacgttacgagagctagaaggtttaagttacgaagagattgcagaaattatggattgtcctgttggtacggttcgttcccgaatcttccgagcaagggaaatgatcgaaaataaaattcaacctctaatgtag

SEQ ID NO: 315 - protein, 189 aa, Haemophilus influenzae
MAEQLTDQALVERVQQGDKKAFNLLVSRYQNKVAGLLTRYVSRNDIPDVVQESFIKAYRSIESFRGESAFYTWLYRIAVNTAKNYLTAQGRRPPNEDILAEDAENYDVGTHLRDVDTPENEMLSSELERIVFDTIHNLPEDLKTAITLRELEGLSYEEIAEIMDCPVGTVRSRIFRAREMIENKIQPLM

SEQ ID NO: 316 - DNA, 570 bp, Thermotoga maritima MSB8
  CDS (1)..(570): transl_table=11
ttgaacgaaaaaaaactcgtcgaagccctcaaaaggaaagaagactgggcatacgaggttctatacagagaattcgctccaaaaatagggagtatagcaaagagctttttgaacaccgacgatgtggatgatgtcgttcaggatgtgtttttgaggattttcaaagggataaagaaattcagaggtgattcgaagctctctacgtggatctacaggatagccgtgaatgtctgtaaggactaccttcagaagtacaagaagagaaacgagtttttgacagattttcaggagaaagacaacgaggaagaaatctatatccagccagaagcgaaagagaacgtactcgatgaagtgcttcgctcaatcaccgctgagagggttcaaaaggctctggaaaagctctcaccggaggacaggctgctcataaaactgagggatatagacgggttgagctatgaagaaatagcgtccgttttgcaaaaacctgttggaactgtaaaaagccgtcttcactacgcaagaaagaggctgggaaacttgttgaaagagggtgaaactgttgaaagatga

SEQ ID NO: 317 - protein, 189 aa, Thermotoga maritima MSB8
MNEKKLVEALKRKEDWAYEVLYREFAPKIGSIAKSFLNTDDVDDVVQDVFLRIFKGIKKFRGDSKLSTWIYRIAVNVCKDYLQKYKKRNEFLTDFQEKDNEEEIYIQPEAKENVLDEVLRSITAERVQKALEKLSPEDRLLIKLRDIDGLSYEEIASVLQKPVGTVKSRLHYARKRLGNLLKEGETVER

SEQ ID NO: 318 - DNA, 576 bp, Pasteurella multocida subsp. multocida str. Pm70
  CDS (1)..(576): transl_table=11
atggctgaacagctaacagatcaggctttggtagaaagagtacagcaaggagataaaaaggcctttaatttattggtttctcgttatcaaaataaagtggctggtttgctgactcgctatgtgtcacaaaacgacattcctgatgttgtacaagaatcatttatcaaagcatatcgctcgattgattcttttcgtggtgacagtgctttctacacatggctatatcgaatcgccgtcaatacggcaaagaattatttaactgctcaaggacgtcgccctcctaatgaagatatcttagcggaagaggctgaaagttatgaaatgggcagtaacttacgggatgtggataccccggaaaatgaaatgttatccagcgaattaaagaaaattgtatttgatacaataaacggtttacaagaagatttaagaacggccattacactccgcgagcttgagggcttaagctacgaagagatcgcagaaattatggattgtccagttggaactgttcgctctcgaattttccgtgcgcgtgaaattatcgaaagtaaagtgcaacctatgttgcaacgttaa

SEQ ID NO: 319 - protein, 191 aa, Pasteurella multocida subsp. multocida str. Pm70
MAEQLTDQALVERVQQGDKKAFNLLVSRYQNKVAGLLTRYVSQNDIPDVVQESFIKAYRSIDSFRGDSAFYTWLYRIAVNTAKNYLTAQGRRPPNEDILAEEAESYEMGSNLRDVDTPENEMLSSELKKIVFDTINGLQEDLRTAITLRELEGLSYEEIAEIMDCPVGTVRSRIFRAREIIESKVQPMLQR

SEQ ID NO: 320 - DNA, 621 bp, Xylella fastidiosa 9a5c
  CDS (1)..(621): transl_table=11
atggccgaaacaaaacaacctcagtccctagatatcgaattggttcggcgcgtgcagtgcggcgaatacgctgcattcgataccttagtacgcaaataccaacatcgagtcattgccctgatcggacgctacatcgccgattggagtgaatgtcaggacgtagcccaggaaacatttgtacgcgcctatcgtgggatctgcaattttcgcggcgacgctcagttttcgacttggttacatcgtatcgccgtgaataccgccaagaaccacctcgccgcacgcaaccgttcccggctgagcaatgaggccgaaattgaagaggctgaacagtttaatcacagcgcacacttaagtgacaccaacacaccagaacgagaactcatgcgccaggagttggaacaaatcgtgatgagcgcggtccaagcactgcctgaagaatttagaaccgcctttactctgtgcgagatggaagggttgagctacgaagagatcgcacaacggatggattgcccaatcggaaccgtacgttcacgtattttccgggcgcgcgaagcgatagacatcgaattacgaccttttctagagatcaacaacattacccgcaaacgatatcgtgtatga

SEQ ID NO: 321 - protein, 206 aa, Xylella fastidiosa 9a5c
MAETKQPQSLDIELVRRVQCGEYAAFDTLVRKYQHRVIALIGRYIADWSECQDVAQETFVRAYRGICNFRGDAQFSTWLHRIAVNTAKNHLAARNRSRLSNEAEIEEAEQFNHSAHLSDTNTPERELMRQELEQIVMSAVQALPEEFRTAFTLCEMEGLSYEEIAQRMDCPIGTVRSRIFRAREAIDIELRPFLEINNITRKRYRV

SEQ ID NO: 322 - DNA, 600 bp, Ralstonia solanacearum GMI1000
  CDS (1)..(600): transl_table=11
gtgagtgaacgcgaagccgaccagatccttgtcgaacgcgtccagcagggtgacaagcgggcgtttgaactgttggtggtcaagtatcaccgcaagatcatccgtctgatctcacgcctgatccgcgatgccgcggaggtggaggatgtggcacaggatgccttcatcaaggcgtaccgtgcgctgccccagttccggggcgaatctgcgttttatacgtggctgtaccgcatcgccgttaacacggccaagaattacctggcgacccagggccggcgtcccgagtcgtccaccgatatcgacaccgaagaggctgaaacttttgccgacggtgaacaactaagggatatcaatacgccggactcgatgctgcacaccaagcaggttgccgaaacggtcaatcgcgcgatggaggcgttgccggaggaattgcgtacggcaattacgctccgcgagatcgagggtctgagctatgaggaaatcgctgaagcgatggaatgtccgatcgggaccgtccgttcgcggatatttcgggcacgcgaggcgattgccgagaaattgcgccccttgctgggaacagcagagggcaaacggtggtag

SEQ ID NO: 323 - protein, 199 aa, Ralstonia solanacearum GMI1000
MSEREADQILVERVQQGDKRAFELLVVKYHRKIIRLISRLIRDAAEVEDVAQDAFIKAYRALPQFRGESAFYTWLYRIAVNTAKNYLATQGRRPESSTDIDTEEAETFADGEQLRDINTPDSMLHTKQVAETVNRAMEALPEELRTAITLREIEGLSYEEIAEAMECPIGTVRSRIFRAREAIAEKLRPLLGTAEGKRW

SEQ ID NO: 324 - DNA, 576 bp, Thermoanaerobacter tengcongensis MB4
  CDS (1)..(576): transl_table=11
gtgggacaggaggaacttttggaaagagcaagaaatggagatgatgaagcatttagcttgctcatagaaaactatgagaagtatgtgtataatgtcatattgagaattgtggaagaaaaagaagaagcaaaagatattgcccaggaaacttttattaaagcttacatgagcataaaaacttttagaaaagacagcagtttcaggacctggatttacaggattgctgtaaatactgctatggattaccttagaaaaaaggtcaggtcggaagtcaaccttgtgacagccgctgaagatgaattagaaataaaaagttttcaaacgcctgaagaggtaattgagcaaaagctcactgtagaaatggtgagaagagagataagtaaactccctgtagattacaaaatagctcttattttaagggatatagaagggatgaattatgaagaaattgctagtatattaaaagtcaatctcgggacagtgaagtccaggatatggagagcgagaaatcttttaagagagaggataaaatcgcttccagagttttcaggttttcaagagaggaggcgagagtga

SEQ ID NO: 325 - protein, 191 aa, Thermoanaerobacter tengcongensis MB4
MGQEELLERARNGDDEAFSLLIENYEKYVYNVILRIVEEKEEAKDIAQETFIKAYMSIKTFRKDSSFRTWIYRIAVNTAMDYLRKKVRSEVNLVTAAEDELEIKSFQTPEEVIEQKLTVEMVRREISKLPVDYKIALILRDIEGMNYEEIASILKVNLGTVKSRIWRARNLLRERIKSLPEFSGFQERRRE

SEQ ID NO: 326 - DNA, 564 bp, Oceanobacillus iheyensis HTE831
  CDS (1)..(564): transl_table=11
atggatcaatttatcatagaaaagataaaacaagtaaaaaaaggagatcaatccgcatttgctgaagtggtttccttttaccaaaataaaatatttcagcattgttatcgtatgcttggtaacaaacatgaagcggaggacatagcgcaggaggcttttattagagcgtatataaatatcgattcgtttgatgaaaaacgcaaattttcaacctggttgtatcgtattgcaacgaatctaacgattgatcgtatacgaaagagaaagccagactactatttagatgccgaggttaaagggacagaagggttagatatgtattcccaattggcaagcacagaacgccttccaggtgaagaagtagagagtagagaactacaacgatatatacaccacgagatatcacaattaccagcaaagtatcgaagtattatcatgcttcgttatttagaggaattctctttacaagaaataagtgaaatactcgacatccctttagggacagtgaaaacgagaattcatcggggaagggaagccttacgaaaaaggcttcgacatgtgtaa

SEQ ID NO: 327 - protein, 187 aa, Oceanobacillus iheyensis HTE831
MDQFIIEKIKQVKKGDQSAFAEVVSFYQNKIFQHCYRMLGNKHEAEDIAQEAFIRAYINIDSFDEKRKFSTWLYRIATNLTIDRIRKRKPDYYLDAEVKGTEGLDMYSQLASTERLPGEEVESRELQRYIHHEISQLPAKYRSIIMLRYLEEFSLQEISEILDIPLGTVKTRIHRGREALRKRLRHV

SEQ ID NO: 328 - DNA, 579 bp, Shewanella oneidensis MR-1
  CDS (1)..(579): transl_table=11
atgagtggacaaataagtgatcaacaattagttgagcgcgtacaacggggtgataaaaacgcttttaacctgttagtgcttaaatatcagagtaaagtgattagcttgatttcacgctatgtgcgtaaccaagcagatgttactgatgtagcacaggaagcgtttatcaaagcttatcgagctttgccaaactttcgcggagaaagtgcgttttatacctggttgtaccgaatagccgttaatacggcaaagaattacctcgtgtctcaggggcgtagagctcctgcaaatgatgtggatgctgaggatgccgaatattacgaaggcagtgatgcgctaaaggagtttgcctccccagagcgactaatgttatcggacgaaatcaaaaaagtggttttcgaaactttagaaacattgcctgaagaattacgtatggcaatttcattgcgtgaacttgatgggatgagttacgaagatattgccatcatcatggattgccctgtaggaacggtaagatctcgtatctttcgcgcccgtgaagcaatcgataaaaagctccagcctttgctggaagagtaa

SEQ ID NO: 329 - protein, 192 aa, Shewanella oneidensis MR-1
MSGQISDQQLVERVQRGDKNAFNLLVLKYQSKVISLISRYVRNQADVTDVAQEAFIKAYRALPNFRGESAFYTWLYRIAVNTAKNYLVSQGRRAPANDVDAEDAEYYEGSDALKEFASPERLMLSDEIKKVVFETLETLPEELRMAISLRELDGMSYEDIAIIMDCPVGTVRSRIFRAREAIDKKLQPLLEE

SEQ ID NO: 330 - DNA, 579 bp, Vibrio vulnificus CMCP6
  CDS (1)..(579): transl_table=11
atgaacgagcagttgaccgatcaagtattgattgagcgagttcagagtggcgataagcaagcattcaatcttttggtggtgaagtaccaaaacaaagtctgcaatcttatttcccgatacgttagtaatcctggtgatgtccctgatgtagcgcaggaggcttttattaaagcttaccgagctattccaagttttcgtggcgaaagtgccttctatacttggttgtatcgcatcgcagtgaatacggcgaaaaaccacattgttgcccagagccgtaggccacccgccagtgatgtggatgctgatgaagctgaattatatgagacaggtaacgctttgaaagaaatttcgaaccctgagaacctcacgttgtccaatgagttgaagcaagtggtttttagtgcgatcaatgcgttaccagaagatttaaaaacagcaatgactctacgagagcttgatggcttgagctatgaggaaattgcagaagtaatggattgccctgtaggaacggtacgttcgcgtatcttccgtgctcgtgaggcggtggaaaagaaaattcaacctcttttgcaacgctag

SEQ ID NO: 331 - protein, 192 aa, Vibrio vulnificus CMCP6
MNEQLTDQVLIERVQSGDKQAFNLLVVKYQNKVCNLISRYVSNPGDVPDVAQEAFIKAYRAIPSFRGESAFYTWLYRIAVNTAKNHIVAQSRRPPASDVDADEAELYETGNALKEISNPENLTLSNELKQVVFSAINALPEDLKTAMTLRELDGLSYEEIAEVMDCPVGTVRSRIFRAREAVEKKIQPLLQR

SEQ ID NO: 332 - DNA, 582 bp, Pseudomonas syringae pv. tomato str. DC3000
  CDS (1)..(582): transl_table=11
atgctaacccaggaagaggatcaggcgcttgtcgagcgcgtacagcgcggcgatacaagagcatttgatctgctggtgctgaaatatcagcacaaaattctagggttgatcgtgcggttcgtgcacgacacccatgaggctcaagacgttgcacaggaagcttttatcaaggcttaccgtgcactcggaaactttcgcggcgacagtgctttttatacatggctgtaccgcatcgccatcaacacggcgaaaaactatttggtatcgcgaggtcggcgaccgccagatagcgatgtcaggtctgaagacgcggagttctacgatggcgatcacggcctcaaggacatcgagtcgccggaacgtgcattgctgagggatgagatcgagggcaccgtccatcggaccatccagcttctcccggaagatttacgtacggcactaactttacgtgaattcgacggtctgagttacgaagacattgcgagcgtcatgcagtgtcctgttggtaccgtgcgctctcgaatctttcgcgctcgggaagccatcgataaagccctgcagccgttgttgcaggaatcctga

SEQ ID NO: 333 - protein, 193 aa, Pseudomonas syringae pv. tomato str. DC3000
MLTQEEDQALVERVQRGDTRAFDLLVLKYQHKILGLIVRFVHDTHEAQDVAQEAFIKAYRALGNFRGDSAFYTWLYRIAINTAKNYLVSRGRRPPDSDVRSEDAEFYDGDHGLKDIESPERALLRDEIEGTVHRTIQLLPEDLRTALTLREFDGLSYEDIASVMQCPVGTVRSRIFRAREAIDKALQPLLQES

SEQ ID NO: 334 - DNA, 579 bp, Vibrio parahaemolyticus RIMD 2210633
  CDS (1)..(579): transl_table=11
atgaacgagcagctgaccgatcaagtattgattgagcgagttcagaatggtgataagcaagcattcaacctgctggtaacaaagtatcagaacaaggtgtgtaatcttatttccagatacgttagtaatcctggcgatgtaccagatgtagcacaagaagcctttatcaaagcttaccgagctatccctagctttcgcggggaaagtgcgttttatacgtggctgtatcgcattgcagtgaatactgcgaaaaatcacattgtggctcaagggcgcagacccccagcgacagatgttgatgctgaagaagctgaattttacgaaacaggtagtgcacttaaagaaatttcgaaccctgagaacttaacgttgtccaaagaattgcaacgggtagtgttcagtgcaatcgaagctttacctgaagatttaaaaacagcaatgacattgcgagagcttgatggcttaagttatgaagaaattgctgaagtgatggattgcccggtaggaacggtacgttcacgtatcttccgtgctcgtgaagcggtggaaaagaaaatcaaacctcttttacagcgctag

SEQ ID NO: 335 - protein, 192 aa, Vibrio parahaemolyticus RIMD 2210633
MNEQLTDQVLIERVQNGDKQAFNLLVTKYQNKVCNLISRYVSNPGDVPDVAQEAFIKAYRAIPSFRGESAFYTWLYRIAVNTAKNHIVAQGRRPPATDVDAEEAEFYETGSALKEISNPENLTLSKELQRVVFSAIEALPEDLKTAMTLRELDGLSYEEIAEVMDCPVGTVRSRIFRAREAVEKKIKPLLQR

SEQ ID NO: 336 - DNA, 603 bp, Nitrosomonas europaea ATCC 19718
  CDS (1)..(603): transl_table=11
atgagtgatcgtgaaatcgatcagcagttggtagaacaggtacaacgaggtgacaagcgtgcgtttgacctgctggttatcaagtatcagagacgactggcgcgtttattatcgcgattcatccgtgatcctgctgaagtggaggatattactcaagagacttttatcaaggcctaccgggcattaccttcttttcgcggtgatagtgccttttatacctggttatatcggatcggggtcaatacggccaagaattttctggtatcacaaggtcgtaagcttcctgcaactgtaaatgggttcggtaccgaggaggcggaaaattttgaaggagccgatcagcttcgggaagtaaacactccggaaagtgaacttatgggcaaacaggttgcccaaaccgtaaatcaggcgcttgaagctctgcccgaggagttgcgcacggcgattattctcagggaaatcgaagggcttagttatgaagagattgctgatatcatgaattgtcctattggtacggtgcggtcccggatattcagggcacgtgaagctgtggccgacaaattaaggcctttattgggtactgataaaagtaaaagatggtga

SEQ ID NO: 337 - protein, 200 aa, Nitrosomonas europaea ATCC 19718
MSDREIDQQLVEQVQRGDKRAFDLLVIKYQRRLARLLSRFIRDPAEVEDITQETFIKAYRALPSFRGDSAFYTWLYRIGVNTAKNFLVSQGRKLPATVNGFGTEEAENFEGADQLREVNTPESELMGKQVAQTVNQALEALPEELRTAIILREIEGLSYEEIADIMNCPIGTVRSRIFRAREAVADKLRPLLGTDKSKRW

SEQ ID NO: 338 - DNA, 579 bp, Haemophilus ducreyi 35000HP
  CDS (1)..(579): transl_table=11
atgggtgaccaaataaccgatcaagtattggttgagcgtgcacagcaaggtgataaaaaagcgtttaacttactcgtcgtgcgttatcaaaacagagtagcgggtttattgactcgttacgtggcacgcgatgatattcctgatattgttcaagagtcttttattaaggcttatcgttcattagcatctttccgtggagaaagtgctttttatacctggctttatcgtattgctgtaaatacggcaaaaaaccatttaactgctttaggtagaaggccacctaaagaagatcttttagcagaagatgctgaaacttttgatgtgggggcgcaacttcgagaaagtgatactcctgaaagtatggtgctatcagaagaactaaagcatgtcgtatttaacactatagaaagcttacctgatgaactaaagacagcaattactttgcgcgagttagaaggattaagctacgaagaaattgcggaagtgatgcaatgcccagtaggtacagttcgttctcgtatcttccgagcaagagaagcgattgatgcgaaaatcaatccactgatgcaacagagttaa

SEQ ID NO: 339 - protein, 192 aa, Haemophilus ducreyi 35000HP
MGDQITDQVLVERAQQGDKKAFNLLVVRYQNRVAGLLTRYVARDDIPDIVQESFIKAYRSLASFRGESAFYTWLYRIAVNTAKNHLTALGRRPPKEDLLAEDAETFDVGAQLRESDTPESMVLSEELKHVVFNTIESLPDELKTAITLRELEGLSYEEIAEVMQCPVGTVRSRIFRAREAIDAKINPLMQQS

SEQ ID NO: 340 - DNA, 600 bp, Bordetella bronchiseptica RB50
  CDS (1)..(600): transl_table=11
atgagcgaacgcgatgtcgacgccgaacttgtcgcgcgcgtacaacgtggcgacaagaaagccttcgatctgctggtcctgaagtatcagcgcaagatcctccgcctgctggcgcgcatgatccgcgatccggccgaaatcgaggatgtcgcgcaggaagcctttatcaaggcgtaccgggccctgccgcagtttcgcggggacagcgccttctatacctggttgtatcgtatcgccatcaatacggcccgcaattggctggcctcgtccggacgccgtccgagcgcgcccaacgcaattgaaaccgaagatggtgaaacttttaacgaaaccgacaacctaaccgacataagcacgccggaatccatggccgcaacccgcgagatcgccgagacggtgaacgcggccatcgaggagttgcccgaggaattgcgcaccgccatcgtcctgcgtgagattgaaggtatgagttacgaagacatcgcccagagcatggattgcccgattggcacggttcgttcgcgcatattcagagcgcgcgaggccattgccagtcggttgcgccctttgctggacaccgatgccgagcgtcgctggtaa

SEQ ID NO: 341 - protein, 199 aa, Bordetella bronchiseptica RB50
MSERDVDAELVARVQRGDKKAFDLLVLKYQRKILRLLARMIRDPAEIEDVAQEAFIKAYRALPQFRGDSAFYTWLYRIAINTARNWLASSGRRPSAPNAIETEDGETFNETDNLTDISTPESMAATREIAETVNAAIEELPEELRTAIVLREIEGMSYEDIAQSMDCPIGTVRSRIFRAREAIASRLRPLLDTDAERRW

SEQ ID NO: 342 - DNA, 600 bp, Chromobacterium violaceum ATCC 12472
  CDS (1)..(600): transl_table=11
atgagtgatcgggacatcgatcaacagttggtggaacgtgcccagcgaggtgaaaaaagagctttcgatctgcttgttgccaagtatcagcgacgtctcgccaggctgttgtcgcgtttcatacgcgacggttctgacatcgaggatgtgacgcaggaagcgtttatcaaagcgtatcgcgccttgccgtcgttccgaggtgagagcgcgttttacacatggctgtacaggatcggcatcaatacggccaaaaatttcctcagcgccaacggacgtcgtccggtggtgaacagcgagatcgaggacgaggacggcgagagtttcgacatggcgtcgcaaattcccgacctgaacacgcccgaaaccgagctgatgaacaaggagattctggctacggtcaatgccgccgtggaggccttgccggaggagttgcgtactgccatctcgcttagggagatggaagggctgtcctacgatgagatcgccagggtgatggattgcccgataggtaccgtgcgttcgcggattttccgcgcacgcgaggcgattgctgctgagctcaggcctttgctggatacggccaagaacagaaggtggtaa

SEQ ID NO: 343 - protein, 199 aa, Chromobacterium violaceum ATCC 12472
MSDRDIDQQLVERAQRGEKRAFDLLVAKYQRRLARLLSRFIRDGSDIEDVTQEAFIKAYRALPSFRGESAFYTWLYRIGINTAKNFLSANGRRPVVNSEIEDEDGESFDMASQIPDLNTPETELMNKEILATVNAAVEALPEELRTAISLREMEGLSYDEIARVMDCPIGTVRSRIFRAREAIAAELRPLLDTAKNRRW

SEQ ID NO: 344 - DNA, 570 bp, Photorhabdus luminescens subsp. laumondii TTO1
  CDS (1)..(570): transl_table=11
atgagcgagcagttaacggatcaaatgctggtcgagcaagtgcagaaaggtgaccaaaaggcgtttaacctactggtagttagatatcagcataaagtggcgagtcttttatcccgctatgttccgcagggtgatgtgcctgacgttgctcaggaaacatttattaaggcctatcgggcattggcttcgtttcgtggtgatagtgctttttatacttggttgtatcgtattgcagtaaatactgcgaagaattatctgaccgctcaagggcgccgtccgccatccagtgatttggatgccagtgacgcagaaaattatgaaatttcgagtgcattaaaagaaatttcgaaccctgagaatttaatgttgtcagaagaattgaggcaggtggttttccgtaccattgaatctcttcccgaagatttgcgaatagcaataatgctgagggaattagatgggttaagctatgaagaaatagctaccattatgaattgcccggtaggtacggtgcgttcccgcatcttccgtgcaagggaagccattgatgataacattcaaccactgatttaa

SEQ ID NO: 345 - protein, 189 aa, Photorhabdus luminescens subsp. laumondii TTO1
MSEQLTDQMLVEQVQKGDQKAFNLLVVRYQHKVASLLSRYVPQGDVPDVAQETFIKAYRALASFRGDSAFYTWLYRIAVNTAKNYLTAQGRRPPSSDLDASDAENYEISSALKEISNPENLMLSEELRQVVFRTIESLPEDLRIAIMLRELDGLSYEEIATIMNCPVGTVRSRIFRAREAIDDNIQPLI

SEQ ID NO: 346 - DNA, 603 bp, Herminiimonas arsenicoxydans
  CDS (1)..(603): transl_table=11
ttgacgacagaacgcgatattgatcagctccttgtcgagcgcgtacagcgtggcgacaaaaaagctttcgagctgctagtgatcaaataccaacgaaaattgatgcgactggtttcgcggcttgtgcgcgaccaggctgaggctgaggatgtggtacaggaagcattcatcaaggcgtatcgggcattgccgcagtttcgcggtgattcagcgttttatacctggctttatcgcatcggtatcaacactgcaaaaaattatttggttactcagggacgtcgtgcgccgacatcaactgaagctgatatcgaagaggccgaaacttttgacgacggcgagcacctaagagatatcaacacaccagaatcgctattggctacgaagcaaatcgcgcaaacgttgaatcttgcgatggaagagttgccagaggagttgcgtatggcaattaccctgcgagagatcgaaggcttgagttacgatgaaattgccgtgtcgatgggttgccctatcggcacagtgcgtagccggattttccgggcacgcgaggcgatctcggaaaaattaaggccgttgctggatacggcgctcgataaacgttggtga

SEQ ID NO: 347 - protein, 200 aa, Herminiimonas arsenicoxydans
MTTERDIDQLLVERVQRGDKKAFELLVIKYQRKLMRLVSRLVRDQAEAEDVVQEAFIKAYRALPQFRGDSAFYTWLYRIGINTAKNYLVTQGRRAPTSTEADIEEAETFDDGEHLRDINTPESLLATKQIAQTLNLAMEELPEELRMAITLREIEGLSYDEIAVSMGCPIGTVRSRIFRAREAISEKLRPLLDTALDKRW

SEQ ID NO: 348 - DNA, 600 bp, Burkholderia vietnamiensis G4
  CDS (1)..(600): transl_table=11
gtgagtgaaaaagaaattgatcaggctctggtcgagcgcgtacagaaaggcgacaaggcggcgttcgaactcctggtctccaaataccaccgcaagatcattcggctgatctcgcgcctcgtgcgggatcccgccgaggtcgaggacgtggcccaggacgcgttcatcaaggcgtatcgtgcgctgccgcaatttcgcggtgagtccgcgttctacacgtggttgtaccggattgccgtcaacacggcgaagaactaccttgcgacgcaaggccgtcgggcgccgacctccaccgaggccgatgccgaggaggcggaaactttctccgacgcagaccaactaagggatatcaacacgccagagtcgatgttgatgagcaagcagattgccgagacggtcaacgctgcaatggccgtcctgcccgaagaattgcgtcaggcgattacgctgcgcgagatcgagggcctgagctacgaagaaatcgcggaaatgatgaactgcccgatcgggacggttcgatcgcggatcttccgggctcgcgaggcaatcgctgcaaaattgcgtccgctgctcgatacgcccgaaggcaagcgctggtaa

SEQ ID NO: 349 - protein, 199 aa, Burkholderia vietnamiensis G4
MSEKEIDQALVERVQKGDKAAFELLVSKYHRKIIRLISRLVRDPAEVEDVAQDAFIKAYRALPQFRGESAFYTWLYRIAVNTAKNYLATQGRRAPTSTEADAEEAETFSDADQLRDINTPESMLMSKQIAETVNAAMAVLPEELRQAITLREIEGLSYEEIAEMMNCPIGTVRSRIFRAREAIAAKLRPLLDTPEGKRW

SEQ ID NO: 350 - DNA, 576 bp, Klebsiella pneumoniae subsp. pneumoniae MGH 78578
  CDS (1)..(576): transl_table=11
atgagcgagcagttaacggatcaggtccttgttgaacgggtccagaaaggagatcagaaagcgtttaatttgctggtagtgcgctatcagcataaggtcgcgagcctggtttcccgctatgtaccgccgggcgatatcgctgacgttgttcaggaatcgttcgttaaggcatggcgtgcgctggactctttccggggagatagcgctttttacacctggttataccgtatcgccgtcaacacggcgaagaattatctggttgctcaggggcgccgtccgccgtccagcgatgttgacgccaacgaggcggaaaacttcgaaagcggcggggcgttgaaagaaatttcgaaccctgagaacttaatgttgtcagaagaactgagacaaatagtttttcgtaccattgaatcgctcccggaagatttacgcatggcaattacgttacgggagctggatggcctgagctatgaagagatagccgctatcatggattgtccggttgggacggtgcgttcgcgtatcttccgggcgcgagaagctattgataataaagttcaaccgcttatcaggcgttga

SEQ ID NO: 351 - protein, 191 aa, Klebsiella pneumoniae subsp. pneumoniae MGH 78578
MSEQLTDQVLVERVQKGDQKAFNLLVVRYQHKVASLVSRYVPPGDIADVVQESFVKAWRALDSFRGDSAFYTWLYRIAVNTAKNYLVAQGRRPPSSDVDANEAENFESGGALKEISNPENLMLSEELRQIVFRTIESLPEDLRMAITLRELDGLSYEEIAAIMDCPVGTVRSRIFRAREAIDNKVQPLIRR

SEQ ID NO: 352 - DNA, 576 bp, Salmonella enterica subsp. arizonae serovar 62:z4,z23:--
  CDS (1)..(576): transl_table=11
atgagcgagcagttaacggaccaggtcctggttgaacgggtccagaagggagatcagaaagcctttaatttactggtagtgcgctaccagcataaagtggcgagtctggtttctcgctatgtgccatcgggcgacgttcccgatgtcgtacaggaatcatttattaaggcctatcgcgcgctggattctttccggggggatagcgctttttatacctggttatatcgcattgcggtcaataccgcgaagaaccacctggttgctcaggggcgtcgtccgccttccagtgatgtagacgtgatcgaagcagaaaactttgaaagcggcggcgcgctgaaagaaatttcgaaccctgagaacttaatgttgtcagaagaactgagacagatagttttccgaactattgagtccctcccggaagatttacgtatggcaatcaccttacgggagctggatggcctgagctatgaagagatagcggctatcatggattgtccggtgggaacggtgcgttcacgtattttccgggcgcgggaagctattgataataaagttcaaccgcttatcaggcgttga

SEQ ID NO: 353 - protein, 191 aa, Salmonella enterica subsp. arizonae serovar 62:z4,z23:--
MSEQLTDQVLVERVQKGDQKAFNLLVVRYQHKVASLVSRYVPSGDVPDVVQESFIKAYRALDSFRGDSAFYTWLYRIAVNTAKNHLVAQGRRPPSSDVDVIEAENFESGGALKEISNPENLMLSEELRQIVFRTIESLPEDLRMAITLRELDGLSYEEIAAIMDCPVGTVRSRIFRAREAIDNKVQPLIRR

SEQ ID NO: 354 - DNA, 582 bp, Pseudomonas putida GB-1
  CDS (1)..(582): transl_table=11
atgctaacccaggaagaggatcagcagcttgtcgagcgcgttcagcgcggcgacaggcgagcgttcgatctgttggtgctgaagtatcagcacaagattctcgggttgatcgtgcggttcgttcacgacacccacgaggcccaggatgtagcacaggaagcctttatcaaggcctaccgtgcgcttggcaactttcgcggcgacagtgcgttttatacgtggctgtaccgcatcgccatcaacacggcgaagaactacctggtgtcccgtggaagacggccgccagacagcgatgtgagctccgaggatgcggagttttacgacggcgatcatggtctcaaggatctcgagtccccagagcgctcgttgttgcgggatgaaatcgaaggcactgtccatcgcaccatccagcagctgcccgaagacctgcgtacggcattgaccctgcgcgagttcgacggactgagttacgaagacattgccagtgtcatgcaatgtccggtgggtaccgtgcgctctcgaatcttccgcgctcgggaggccatagacaaagccctgcagccgttgttgcaggaaacctga

SEQ ID NO: 355 - protein, 193 aa, Pseudomonas putida GB-1
MLTQEEDQQLVERVQRGDRRAFDLLVLKYQHKILGLIVRFVHDTHEAQDVAQEAFIKAYRALGNFRGDSAFYTWLYRIAINTAKNYLVSRGRRPPDSDVSSEDAEFYDGDHGLKDLESPERSLLRDEIEGTVHRTIQQLPEDLRTALTLREFDGLSYEDIASVMQCPVGTVRSRIFRAREAIDKALQPLLQET

SEQ ID NO: 356 - DNA, 576 bp, Haemophilus somnus 2336
  CDS (1)..(576): transl_table=11
atggctgaacaactaacggatcaggctttggtagaaaaagtacagcagggagataaaaaggcctttaacttattggttgctcgttatcaaaataaagttgctggattacttactcgttatatttcacaaaacgatattcccgatgttgtacaagaatcctttataaaagcctaccgctcaattgaatcatttcgtggcgaaagtgctttttatacttggctatatcgaatagcggttaatacggcaaagaattacttaacggcacaaggacggcgtccgccaacagaggatatattagcagaagacgctgaaagttataatgttggtacaaatttaagggacgtgaatactcccgaaaatgaaatattatccggtgaattgaaaaaagttgtttttgatactatcagtaacctgcaagaagatttaaaaacagctattacactacgtgaaatggaaggattgagttacgaagaaattgcagaaattatggattgtccggtgggaaccgtacgttctcgtattttccgtgcaagagaaataatcgaaagcaaaattcaacctttgatacaacgttaa

SEQ ID NO: 357 - protein, 191 aa, Haemophilus somnus 2336
MAEQLTDQALVEKVQQGDKKAFNLLVARYQNKVAGLLTRYISQNDIPDVVQESFIKAYRSIESFRGESAFYTWLYRIAVNTAKNYLTAQGRRPPTEDILAEDAESYNVGTNLRDVNTPENEILSGELKKVVFDTISNLQEDLKTAITLREMEGLSYEEIAEIMDCPVGTVRSRIFRAREIIESKIQPLIQR

SEQ ID NO: 358 - DNA, 621 bp, Xanthomonas campestris pv. campestris
  CDS (1)..(621): transl_table=11
atggccgaagtcgatacacctcaggagctggatctggaactggtccggcgtgtgcagcgcggcgagagcgcggcgttcgatgtgttggtgcgcaagtaccagcaccggatcgtcgccctgatcgggcgctacatcgccgactggagcgaatgccaggacgtggcccaggatacgtttgtgcgcgcttaccgcgcgatcaacagttttcgtggcgacgcccagttctatacgtggctgcaccgcattgccgtgaacactgccaagaaccacctggttgcgcacaatcgccgcccgcccaccgatgacatcgacgtcagcgacgccgaacaattcgatggtgcgacccgcttgcgcgacaccgacaccccggagcgcgaattgatgcgacaggagctggaacaaacggtgatgcgtgcggtccaagccttgccggaagaactccggtcggccatcaccctgcgcgaggtggaagggctgagttacgaggagatcgcgcgaaagatggattgcccgatcggaacggtgcgctcgcgcatcttccgggcgcgcgaggccatcgacatcgagctacggcctctgctggagaccgaaagcgctacccgtgagcgacaccgtgtatga

SEQ ID NO: 359 - protein, 206 aa, Xanthomonas campestris pv. campestris
MAEVDTPQELDLELVRRVQRGESAAFDVLVRKYQHRIVALIGRYIADWSECQDVAQDTFVRAYRAINSFRGDAQFYTWLHRIAVNTAKNHLVAHNRRPPTDDIDVSDAEQFDGATRLRDTDTPERELMRQELEQTVMRAVQALPEELRSAITLREVEGLSYEEIARKMDCPIGTVRSRIFRAREAIDIELRPLLETESATRERHRV

SEQ ID NO: 360 - DNA, 576 bp, Pectobacterium atrosepticum SCRI1043
  CDS (1)..(576): transl_table=11
atgagcgagcaactggcagatcaggttctggtcgagcgagtccaaaaaggcgatcaaaaatcgtttaacttgttggtcgttcgttatcagcataaggtagcgagcctggtatcgcggtatgttccacaaggggacgtgccggatgtggtacaggaatcgtttattaaagcgtatcgcgcgttagaatcattccgtggcgatagtgcgttctatacgtggctgtatcgtattgcagtgaatacggccaagaattatctggtagctcagggccgccgcccgccttccagcgacattgatgccaatgacgcagaaaactatgaaaatgcgggcgcactgaaagaaatatcgaaccctgagaatttaatgttgtcagaggaattacgaagcatagttttccgaactatcgagtctttaccggaagatttacgtttagcgattacgctgcgtgagttggacggtttaagctacgaagagattgccgtgattatggattgtcccgtcggcactgttcgttctcgtattttccgagcgcgggaagctattgataataaagtacaaccgcttattcagcgctag

SEQ ID NO: 361 - protein, 191 aa, Pectobacterium atrosepticum SCRI1043
MSEQLADQVLVERVQKGDQKSFNLLVVRYQHKVASLVSRYVPQGDVPDVVQESFIKAYRALESFRGDSAFYTWLYRIAVNTAKNYLVAQGRRPPSSDIDANDAENYENAGALKEISNPENLMLSEELRSIVFRTIESLPEDLRLAITLRELDGLSYEEIAVIMDCPVGTVRSRIFRAREAIDNKVQPLIQR

SEQ ID NO: 362 - DNA, 627 bp, Symbiobacterium thermophilum IAM 14863
  CDS (1)..(627): transl_table=11
gtgtccaaatccctcgacgaactcctggtcgaacgggcaaaacggggggacgttgaggcgttcgagcagctgatcagccagcacgagaagacggtgtacaacatcgcctaccggctgaccggcaaccacgaagacgcctccgatctcgcccaggaagccttcatccgcgcatacagttcgttggccgacttccgcggcgactcctcctttgcgacctggctctaccgcatcgtgaacaacgtctgccttgacgaactgcgcaggcgcaagcggcagaaggttacctacctggatcaggccgtcgagatggaggacggcgaggtgtcccggcagatcgccgacacggcggacgggccggagcaggcgctggagcgcgtggaactgcagcggctgatacaggagagcatcctgcagctggacgaggagtaccgggtcgtgctggtcatgcgggaactgcaggggtactcatacaatgaaatcgcagaggcgctggacctcaacctggggacggtgaagtcacggctcaaccgcgcacggagcgccctcaaagaaaagttcatgagcctggaacttttgacgccgagagtcgtctacagggctaggaggggaaaagcccatgaactgtga

SEQ ID NO: 363 - protein, 208 aa, Symbiobacterium thermophilum IAM 14863
MSKSLDELLVERAKRGDVEAFEQLISQHEKTVYNIAYRLTGNHEDASDLAQEAFIRAYSSLADFRGDSSFATWLYRIVNNVCLDELRRRKRQKVTYLDQAVEMEDGEVSRQIADTADGPEQALERVELQRLIQESILQLDEEYRVVLVMRELQGYSYNEIAEALDLNLGTVKSRLNRARSALKEKFMSLELLTPRVVYRARRGKAHEL

SEQ ID NO: 364 - DNA, 597 bp, Symbiobacterium thermophilum IAM 14863
  CDS (1)..(597): transl_table=11
atgttatcgttgacggacgagcaattggtggaacgggcacaggaaggcgatcgctgcgcgctgggcgagttgatcagccgttacgagcagcgtacctataatctggcctaccgtttaatgggaaatcacgccgacgcatgtgacgcagcccaggaggccctggtgcgcgtctgcgtgaggcttcacaacttccggggcgattcccagttctcgacctggctctaccgggtggtgacgaacacctgcctggacgaactccggcgcaggggtcggacgcgctgcgcgtccctggatgaggccatgcccctcgacgaaggctccgtcccgcgccaggccgtcgacgactccgacgggccggtggaatatgcggagcgccacgaggtgcaggcggccgtgcagcgggccatcgggcggctcccgtacgactaccgggtcgtggtgatcctgcgcgacctccacaacctgagctaccaggagattgctaccgtcctgggcaccacgctgggcaccatcaagtcccggctgcatcgggcacggcaggccctgcgctgcatcatcgaggacaccgaggcccatcggctggacattgccggatag

SEQ ID NO: 365 - protein, 198 aa, Symbiobacterium thermophilum IAM 14863
MLSLTDEQLVERAQEGDRCALGELISRYEQRTYNLAYRLMGNHADACDAAQEALVRVCVRLHNFRGDSQFSTWLYRVVTNTCLDELRRRGRTRCASLDEAMPLDEGSVPRQAVDDSDGPVEYAERHEVQAAVQRAIGRLPYDYRVVVILRDLHNLSYQEIATVLGTTLGTIKSRLHRARQALRCIIEDTEAHRLDIAG

SEQ ID NO: 366 - DNA, 597 bp, Mannheimia succiniciproducens MBEL55E
  CDS (1)..(597): transl_table=11
ttgttattgacaagaggttatatggctgaacagctaacagatcaggctttggtagaaagagtgcagcagggggataagaaagcctttaatttgttggtttctcgttatcagaataaagtggcggggctattaacccgttatgtatcgcgtaatgatattcccgatgtagtacaggaatcattcattaaagcatatcgctctattgagtcattccggggtgaaagcgctttctatacatggctttatagaattgcagtaaatactgcaaaaaactacttaaccgctcaaggacgccgcccgccgaatgaagacattctagcggaagaagcggaaacctatgatgtaggtggaaatttaagagatgtggatacgcccgaacatgaaatgttatccgcagagctaaaaaaggttatctttgatactatcgacggtttgcaagaagaattaaaaacggcgataacattacgtgaaatggaagggttaagttacgaagagattgccgatataatggattgccccgtaggaacggtacgttcgcgtatattccgggcaagggaaattatagaaagcaaaattcgaccgctcattcaacgttaa

SEQ ID NO: 367 - protein, 198 aa, Mannheimia succiniciproducens MBEL55E
MLLTRGYMAEQLTDQALVERVQQGDKKAFNLLVSRYQNKVAGLLTRYVSRNDIPDVVQESFIKAYRSIESFRGESAFYTWLYRIAVNTAKNYLTAQGRRPPNEDILAEEAETYDVGGNLRDVDTPEHEMLSAELKKVIFDTIDGLQEELKTAITLREMEGLSYEEIADIMDCPVGTVRSRIFRAREIIESKIRPLIQR

SEQ ID NO: 368 - DNA, 579 bp, Methylococcus capsulatus str. Bath
  CDS (1)..(579): transl_table=11
atggagatgagtgaagaactggacgatgaactcgtcgggcgggtgcagcgcggcgacaaaagagctttcgacttactcgtcagaaagtatcagtacaaaatcacccagctcatttcccgctacatcaaggatccctacgaatccctggatgtggcgcaagaagcctttatcaaggcttaccgggccctgcctggatttcgcggagacagccagttctacacttggctttaccgcatcgcgatcaatacggcaaagaattacctcgtcacccacgcgcgccgtcccagggaagacgaattcgacgtcgaatcggcggaacaattcgagaatggccatcgtctaaaggatgtcgatacgcccgaagcggcgctcttgagtgacgagctggcggcaacgattcaatcggcgctagacgagttgccggaggaactcaagctggctataactctgagagagctggacggattgagttacgacgaaatcgcggaagtcatgagctgcccggtcggcaccgtccgcagccgtatcttcagggcgagagaagccatagacaaacggctccggccgttactcgactga

SEQ ID NO: 369 - protein, 192 aa, Methylococcus capsulatus str. Bath
MEMSEELDDELVGRVQRGDKRAFDLLVRKYQYKITQLISRYIKDPYESLDVAQEAFIKAYRALPGFRGDSQFYTWLYRIAINTAKNYLVTHARRPREDEFDVESAEQFENGHRLKDVDTPEAALLSDELAATIQSALDELPEELKLAITLRELDGLSYDEIAEVMSCPVGTVRSRIFRAREAIDKRLRPLLD

SEQ ID NO: 370 - DNA, 600 bp, Azoarcus sp. EbN1
  CDS (1)..(600): transl_table=11
atgagcgatcgcgaaattgatcagcagcttgtcgaacgcgttcagcgcggcgacaagcaagccttcggcttgctggtaacaaaataccaacgcaagctgcacaggctgctttcgcggttgattcgcgattctgccgaggtggaggacgtcgcccaggagacgttcatcaaggcttaccgggccttgggttctttcaggggcgacagtgctttttacacttggctttaccggatcggaatcaacaccgctaagaactacctggtctcccagagccgtcgtgccccgacttcgaccggattcgattcggaagaggcggaaaccttcgaggaaggcgacaacctgcgcgacatcaatacgcccgaacggctgatgatgacgcgccagatcgggcagacggtggacgaggcgatggaggcgctgcccgaggaactgcgcaccgcgatcatgctgagagaactggaaggccttagctacgaagagatcgcgagcatcatggactgtcccatcgggacggttcggtcccggattttccgggcgcgcgaggcaattgctgaacgactgcggccgctgctggatacggctcctgacaaacgttggtag

SEQ ID NO: 371 - protein, 199 aa, Azoarcus sp. EbN1
MSDREIDQQLVERVQRGDKQAFGLLVTKYQRKLHRLLSRLIRDSAEVEDVAQETFIKAYRALGSFRGDSAFYTWLYRIGINTAKNYLVSQSRRAPTSTGFDSEEAETFEEGDNLRDINTPERLMMTRQIGQTVDEAMEALPEELRTAIMLRELEGLSYEEIASIMDCPIGTVRSRIFRAREAIAERLRPLLDTAPDKRW

SEQ ID NO: 372 - DNA, 564 bp, Bacillus clausii KSM-K16
  CDS (1)..(564): transl_table=11
atggactcgttaacaaatcgattaattgcagatatcaaacaaggggatgagcaggctttcgccgaattggtagacctctacaaagacaaagtgtaccaagttgcctatagaatggtcggccacgtccatgaagcccaagatatcgcccaagaggcgtttttgcgtgcttataccaatttagataaatttgataccactcgaaagttctcgacttggttgttccgtattaccacaaatgtgtcaattgaccgtttgcggaagcggaagcctgatatgcatttgcaagatgcggtaaaagggatggaggaagtgacctatgaatcccaacttgccgcaacagatgaactgcctgaagaccaggttgtgaaaatggagcttcaagagtggatacaatcagagattaaccagcttcccattaaatatcgcacggccattgtgcttaagtatttagaggatctatcgttaaaagaaattagcgagattatggatatgcctgttgccaccgttaaaacgcggattcatcgggggcgtgaagcgctgcgtaaacgtatgcggcacttataa

SEQ ID NO: 373 - protein, 187 aa, Bacillus clausii KSM-K16
MDSLTNRLIADIKQGDEQAFAELVDLYKDKVYQVAYRMVGHVHEAQDIAQEAFLRAYTNLDKFDTTRKFSTWLFRITTNVSIDRLRKRKPDMHLQDAVKGMEEVTYESQLAATDELPEDQVVKMELQEWIQSEINQLPIKYRTAIVLKYLEDLSLKEISEIMDMPVATVKTRIHRGREALRKRMRHL

SEQ ID NO: 374 - DNA, 582 bp, Pseudomonas fluorescens Pf-5
  CDS (1)..(582): transl_table=11
atgctaacccaggaagaggatcagcagctggtcgagcgcgttcagcgtggcgacaagcgagcgttcgatctgctcgtgctgaagtaccagcacaaaattctcgggttgatcgtgcgtttcgtgcacgacacccatgaagcccaggatgttgcacaagaagcttttatcaaggcttaccgtgcgctaggtaattttcggggtgacagcgcgttttacacgtggctgtaccgtatcgccatcaacacggcgaaaaactatctggtttcacgcggccgcaggccgccggatagcgatgtaagttctgaggatgcggagttctatgacggcgatcatggcctgaaggatctcgaatcgccggagcgtgcgttgctgcgggatgagatcgagggcaccgtccatcgaaccatccagcaactgcctgaagatttgcgtacggccttaactttacgtgaattcgatggtctgagttacgaggacattgcgagcgtcatgcagtgtccggtgggtaccgtgcgctcccggattttccgcgctcgggaagccatcgataaagccctgcagccgttgttgcaggaaacctga

SEQ ID NO: 375 - protein, 193 aa, Pseudomonas fluorescens Pf-5
MLTQEEDQQLVERVQRGDKRAFDLLVLKYQHKILGLIVRFVHDTHEAQDVAQEAFIKAYRALGNFRGDSAFYTWLYRIAINTAKNYLVSRGRRPPDSDVSSEDAEFYDGDHGLKDLESPERALLRDEIEGTVHRTIQQLPEDLRTALTLREFDGLSYEDIASVMQCPVGTVRSRIFRAREAIDKALQPLLQET

SEQ ID NO: 376 - DNA, 627 bp, Colwellia psychrerythraea 34H
  CDS (1)..(627): transl_table=11
atgagtacaaatcaattgtcagtgttaaaggatacggctcaaaagagcgaaccaaatatagatcaacagttagttgagcgggttcagcgtggcgataaaaatgcgtttaatctgttggttactaaatatcagcataaagttgcaaatttagtcagtcgttatgttaaaaatcatagcgatgtacctgatattgtccaagaagcctttattaaggcatatcgagcattacctaactttagaggcgatagtgctttttatacttggctatatcgtattgctgttaactgtgccaaaaatcacagtgtagcattaggtcgtaagccaccaagtaatgatgtcgaaattagtgatgctgaactttatgatactggtgatgcgctaagagaaaatgcttcaccagaaaaaatattactaacagctgaaattaaaaaagtaatttttagcaccatggagtcactccctgatgatctgcgcttagcaattaactttcgagaaattgagggtttaagctacgaagaaattgcgacgataatggagtgtcccgtaggcacagtgcgctcacgtatttttagagcacgtgatgctatcgacaagaagattagacccttgttgcagaaaaataattaa

SEQ ID NO: 377 - protein, 208 aa, Colwellia psychrerythraea 34H
MSTNQLSVLKDTAQKSEPNIDQQLVERVQRGDKNAFNLLVTKYQHKVANLVSRYVKNHSDVPDIVQEAFIKAYRALPNFRGDSAFYTWLYRIAVNCAKNHSVALGRKPPSNDVEISDAELYDTGDALRENASPEKILLTAEIKKVIFSTMESLPDDLRLAINFREIEGLSYEEIATIMECPVGTVRSRIFRARDAIDKKIRPLLQKNN

SEQ ID NO: 378 - DNA, 582 bp, Pseudomonas syringae pv. phaseolicola 1448A
  CDS (1)..(582): transl_table=11
atgctaacccaggaagaggatcagcagcttgtcgagcgcgtacagcgtggcgatacgcgagcatttgatctgttggtgctgaagtatcagcacaaaattctagggttgatcgtgcgattcgtgcacgacacccatgaggctcaggacgttgcacaggaagcctttatcaaggcttaccgtgctctcggaaactttcgcggtgacagtgctttttatacttggctgtatcgcatcgccattaacacggcgaaaaactatttggtgtcgcgaggtcggcgtccaccggatagcgatgtaaggtctgaagacgcggagttctacgacggcgatcatggcctcaaggacatcgagtcgccggaacgtgcattgttgagagatgagatcgagggcaccgtccatcggaccatccagcttctcccagaagatttacgtacggcgctaactttacgtgaattcgatggtctgagttatgaagacattgcgagcgtcatgcagtgtcctgttggtaccgtgcgctctcggatcttccgcgctcgggaagccatcgataaagccctgcagccgttgttgcaggaatcctga

SEQ ID NO: 379 - protein, 193 aa, Pseudomonas syringae pv. phaseolicola 1448A
MLTQEEDQQLVERVQRGDTRAFDLLVLKYQHKILGLIVRFVHDTHEAQDVAQEAFIKAYRALGNFRGDSAFYTWLYRIAINTAKNYLVSRGRRPPDSDVRSEDAEFYDGDHGLKDIESPERALLRDEIEGTVHRTIQLLPEDLRTALTLREFDGLSYEDIASVMQCPVGTVRSRIFRAREAIDKALQPLLQES

SEQ ID NO: 380 - DNA, 600 bp, Dechloromonas aromatica RCB
  CDS (1)..(600): transl_table=11
atgagtgagcgcgaaatcgatcaggtgctggtcgaacgggcgcaaggcggagatcagcgcgccttcgaccagttggtgagcaaataccagcgtaagctggggcgtttgctgtcgcgtttcatccgtgatgcggcggaagtcgaggatgtgtcgcaggaggctttcattaaggcttatcgggccttgccttccttccgtggcgagagtgccttttacacttggttgtatcgcattggcatcaatactgcgaagaactatctggtgtcgcaggggcgaagggcgccgactagcactgagttcgactcagaggaggctgaaactttcgaagaagccagccagttacgggatatcaatactccagaaagccttcttctgtccaagcagattggtgaaacagtgaatgcagcaatggattccttgccggaggaactccgtacagcaatcgtactacgcgaactggaggggttgtcctatgaggaaatcgccggaattatgaattgtccgataggaactgtccggtcacgtatttttcgtgccagagaggctgtagctgcaaagttacgcccgttacttgatacgtcacctgacaagcgttggtaa

SEQ ID NO: 381 - protein, 199 aa, Dechloromonas aromatica RCB
MSEREIDQVLVERAQGGDQRAFDQLVSKYQRKLGRLLSRFIRDAAEVEDVSQEAFIKAYRALPSFRGESAFYTWLYRIGINTAKNYLVSQGRRAPTSTEFDSEEAETFEEASQLRDINTPESLLLSKQIGETVNAAMDSLPEELRTAIVLRELEGLSYEEIAGIMNCPIGTVRSRIFRAREAVAAKLRPLLDTSPDKRW

SEQ ID NO: 382 - DNA, 600 bp, Ralstonia eutropha JMP134
  CDS (1)..(600): transl_table=11
gtgagcgaacgcgaagccgatcagctcctagttgaacgcgtccagcagggcgacaagcgggcctttgagctgctggtggcaaagtaccaccggaagatcatccgcctgatttcgcgcctggtgagagatcccgccgaagtcgaggatgtggcgcaggatgcctttatcaaggcatatcgtgccttgccccaattccgcggggaatccgccttctacacatggctgtaccggatcgccgtgaacacggccaagaactatctggctacgcagggacgacgacccgaggcgtccaccgacatcgatacggaagaggctgaaacttttgcggacggtgagcaactaagggatatcaatacgccggagtcgatgcttcacacgcgccaagtcgccgaaacggtgaaccgagcgatggaagcgttgccggaagagttgcgtaccgccatcaccctgcgcgagatcgaaggcctcagctatgaggaaatcgcggaggcgatgggttgcccgatcggaacggtgcgttcacgcattttccgtgcgcgtgaggcgattgctgaaaaattgcgcccgctgctgggaacggcagagggcaagcgatggtag

SEQ ID NO: 383 - protein, 199 aa, Ralstonia eutropha JMP134
MSEREADQLLVERVQQGDKRAFELLVAKYHRKIIRLISRLVRDPAEVEDVAQDAFIKAYRALPQFRGESAFYTWLYRIAVNTAKNYLATQGRRPEASTDIDTEEAETFADGEQLRDINTPESMLHTRQVAETVNRAMEALPEELRTAITLREIEGLSYEEIAEAMGCPIGTVRSRIFRAREAIAEKLRPLLGTAEGKRW

SEQ ID NO: 384 - DNA, 597 bp, Thiobacillus denitrificans ATCC 25259
  CDS (1)..(597): transl_table=11
atgtcggaccgcgaactggatcagatgttggtcgaacgcgcgcagcgcggcgacaagcgtgctttcgagttgttggtgacgaagtatcaccgcaagctcggccgcctgttgtcacgcatggtgcgcgatgccgccgaggtggaagatattacgcaggaagcatttatcaaggcttatcgcgctttgcccgggttccgcggcgagagcgcgttctacacctggctgtatcgcatcgccgtcaataccgccaagaattatctggtggcgcacaagcgccagccggtatccagcgacgtgctggcggaggatgcggaaaactacgaagatggcgacttgctgcgcgacatcgcgacacccgacgcggaacttcagaccaagcagatcgccagcgcggtcaatcaggcggtcgacgcgctgcccgaggaattgaggacggccatcacattgcgagagatcgagggcatgagctacgaggaaatcgcacagatgatggaatgtccgatcggaaccgtgcgttcgcggatcttccgtgcacgcgaggccattgccgaaaaaatacgcccgatgctgggcacgagtcaggataaaaggtggtaa

SEQ ID NO: 385 - protein, 198 aa, Thiobacillus denitrificans ATCC 25259
MSDRELDQMLVERAQRGDKRAFELLVTKYHRKLGRLLSRMVRDAAEVEDITQEAFIKAYRALPGFRGESAFYTWLYRIAVNTAKNYLVAHKRQPVSSDVLAEDAENYEDGDLLRDIATPDAELQTKQIASAVNQAVDALPEELRTAITLREIEGMSYEEIAQMMECPIGTVRSRIFRAREAIAEKIRPMLGTSQDKRW

SEQ ID NO: 386 - DNA, 582 bp, Pseudomonas fluorescens PfO-1
  CDS (1)..(582): transl_table=11
atgctaacccaggaagaggatcagcagctggtcgaacgcgttcagcgtggcgacaagcgagctttcgatctgctggtgctgaagtatcagcacaaaattctcgggttgatcgtgcgttttgtgcacgacacccatgaagcccaggacgtcgcacaagaagcctttatcaaggcgtatcgagcgcttggaaatttccgcggcgacagtgcgttttatacgtggctgtaccgcatcgccatcaacacggcgaagaactatctggtttcacgcggccgtcggccgccggatagcgatgtaagttccgaggatgcagagttctatgacggcgatcacggcctgaaagatctcgagtcacctgaacgtgcattgctgcgggatgagatcgaaggcaccgtccatcgaaccattcagcaactgccagaggatttgcgcacagcgttaactttgcgcgaattcgatggtctgagttacgaggacatcgcgagcgtcatgcaatgtccggttggtaccgtgcgctcccggattttccgcgcccgggaggccatcgataaagccctgcagccgttgttgcaggaaaactaa

SEQ ID NO: 387 - protein, 193 aa, Pseudomonas fluorescens PfO-1
MLTQEEDQQLVERVQRGDKRAFDLLVLKYQHKILGLIVRFVHDTHEAQDVAQEAFIKAYRALGNFRGDSAFYTWLYRIAINTAKNYLVSRGRRPPDSDVSSEDAEFYDGDHGLKDLESPERALLRDEIEGTVHRTIQQLPEDLRTALTLREFDGLSYEDIASVMQCPVGTVRSRIFRAREAIDKALQPLLQEN

SEQ ID NO: 388 - DNA, 615 bp, Moorella thermoacetica ATCC 39073
  CDS (1)..(615): transl_table=11
atgccatccgatgaggagttgctggcccgcagcagggacggtgacgctgaggcctttgccctcctggtggaacgctaccagcggatgctctttaccatagcctaccgtttcctgggcaataccgaggatgccggcgacgcggcccaggaagccttggtgcgcgcctttaaaaacctggcggcctttcgcggccagtgttcctttaagacctggttacagcacattatcgccaatgtctgccgcgatgagctgcgccgcctgaaacggcgacccaccctttccttagacaacctcctggaaaccggcggtgggttccgggaactatcagctggcaaggttacctcgccggaagaggttttcttgaccagggaaggggaggaccggttacatagacttatccaagccctgacgccggaatatcgggtggttgttattatgagagacctccagggtttcagttacgaagagatagccagccacctgggttgccccgtggggaccgtaaaatcccgccttagccgggcgcgccattttctacggcagcacctggtacaggaacgggaacatgtagccggtctcggcgtctatatggctaaagggggtgaggggcgttga

SEQ ID NO: 389 - protein, 204 aa, Moorella thermoacetica ATCC 39073
MPSDEELLARSRDGDAEAFALLVERYQRMLFTIAYRFLGNTEDAGDAAQEALVRAFKNLAAFRGQCSFKTWLQHIIANVCRDELRRLKRRPTLSLDNLLETGGGFRELSAGKVTSPEEVFLTREGEDRLHRLIQALTPEYRVVVIMRDLQGFSYEEIASHLGCPVGTVKSRLSRARHFLRQHLVQEREHVAGLGVYMAKGGEGR

SEQ ID NO: 390 - DNA, 603 bp, Moorella thermoacetica ATCC 39073
  CDS (1)..(603): transl_table=11
ttggaccttggtgaaaaaaaggcgccggggaaaaaaaacggcgtcccttcctttgaggaattggtggttaattatcaagataaagtctataacctcagctaccagttgacgggcaatcacgccgacgcccaggacctggcccaggaggttttcgtccgggcctaccagggactggataagttccgcaatgaggccgaccctggcacctggctgcaccgcatcaccgtaaatttatatttaaacctgcggcgaaaaataacccgccacccggtggtctccctggacgctcccctcagcacggccgagggcgaggtgacccgggaggtggcggctgccggcggcgatccggtggatctggtggaagagatggagctgaagggctttgtccgcagcgccctgaaccagttaccgccggagtaccggaccgccctggtgctgcgggaactccagggctacagctatgaggaaatcgcgtccatcctgggctgctccctggggacggtaaagtcgcgcctgaaccgggcgcggcaggctatgaaagaaaaagtattacggcaaatggcggaggagaagccgcccgcgaccagggcggccccgaggtga

SEQ ID NO: 391 - protein, 200 aa, Moorella thermoacetica ATCC 39073
MDLGEKKAPGKKNGVPSFEELVVNYQDKVYNLSYQLTGNHADAQDLAQEVFVRAYQGLDKFRNEADPGTWLHRITVNLYLNLRRKITRHPVVSLDAPLSTAEGEVTREVAAAGGDPVDLVEEMELKGFVRSALNQLPPEYRTALVLRELQGYSYEEIASILGCSLGTVKSRLNRARQAMKEKVLRQMAEEKPPATRAAPR

SEQ ID NO: 392 - DNA, 600 bp, Burkholderia thailandensis E264
  CDS (1)..(600): transl_table=11
gtgagtgaaaaagaaatcgatcaggcgctggtcgaacgcgtacagaatggcgacaaggcggcgttcgaactcctggtctccaaataccaccgcaagatcatccggctgatctcgcgcctcgtgcgggatcccgcggaggtcgaggacgtggcccaggacgcgttcatcaaggcgtatcgcgcgttgccgcagtttcgcggcgagtcggcgttctacacgtggttgtaccggattgccgtcaataccgcgaagaactaccttgcgacccagggacgccgggcgcccacgtccaccgacgcggacgccgaagaggctgaaactttctccgacgccgaccaactaagggatatcaacacgcctgagtcgatgttgatgagcaagcaaatcgcccagacggtcaacgccgcgatggcgttgctgccggaagagctgcgaacggccatcacgctgcgcgagatcgaaggtctgagctacgaagagatcgcggagatgatgggatgcccgatcggcaccgttcgctcgcggatcttccgcgcccgcgaggcgatcgcggcaaaattgcggccgctgctcgatacgccggaaggcaggcgctggtaa

SEQ ID NO: 393 - protein, 199 aa, Burkholderia thailandensis E264
MSEKEIDQALVERVQNGDKAAFELLVSKYHRKIIRLISRLVRDPAEVEDVAQDAFIKAYRALPQFRGESAFYTWLYRIAVNTAKNYLATQGRRAPTSTDADAEEAETFSDADQLRDINTPESMLMSKQIAQTVNAAMALLPEELRTAITLREIEGLSYEEIAEMMGCPIGTVRSRIFRAREAIAAKLRPLLDTPEGRRW

SEQ ID NO: 394 - DNA, 654 bp, Syntrophus aciditrophicus SB
  CDS (1)..(654): transl_table=11
atgtggatggaacgttctggtttggcagagaataaaattgcgaccgttgaggacaatgacctcaaatgggtgctgctgtgtcagaaaggggatgtcgaggcgttcgggattctggtggaacggtaccagaagaagatgctgaatgtggcctaccggatgaccggcgattacgaggaatcctgcgaggtcgttcaggatgcctttctcgccgcattccggacgattaaaaagttccgcggagaagcgcgattttccacctggctctatggaattgtaattaattccacaaaaaatcgactgaagcaactgaagagggataagagccgcttttggcatgcaggcgacaaccccggcgatcccggcgatggcgcaatagacggtttcgattgcctggcggcatccggatcaggccaacaggaatcccttctcgaacatcttgaaaaaaaggaactggaggccggggtgcagaaatgcatcggcctgctggagagcgaccaccgggaaatcctgattctccgggacattcagggcttatcctatgatgagatcgtaacgattctcaagataccgccggggacggtcagatcacggctgttccgggcacggatcgccctgaaggatctgctgcttgccaggattggagagttctcatga

SEQ ID NO: 395 - protein, 217 aa, Syntrophus aciditrophicus SB
MWMERSGLAENKIATVEDNDLKWVLLCQKGDVEAFGILVERYQKKMLNVAYRMTGDYEESCEVVQDAFLAAFRTIKKFRGEARFSTWLYGIVINSTKNRLKQLKRDKSRFWHAGDNPGDPGDGAIDGFDCLAASGSGQQESLLEHLEKKELEAGVQKCIGLLESDHREILILRDIQGLSYDEIVTILKIPPGTVRSRLFRARIALKDLLLARIGEFS

SEQ ID NO: 396 - DNA, 582 bp, Saccharophagus degradans 2-40
  CDS (1)..(582): transl_table=11
atgacagcgcaaactgcgcaggattcagatcatcaacttgtgttgcgtgtgcagaagggcgataaacgcgcttttgacatgcttgttattaaatatcagcacaagattttatcgattattagccgttacattaaagataacgctgagatccacgatgttgcacaggaagcttttattaaggcttatcgtgctattggcaatttccgtggcgatagcgcgttttatacgtggatctaccgcattgctattaatacagcaaaaaactatttagtatctcgcgggcggaggccgccatcgagtgatgtagatgtagaagatgccgagttttattcgggcagcgacagccttaaagatgtggatactccagaaaaccatgcaatgcgcgatcagctggagacagtagtaaataatgctatcaaagctctgccagaggatttgcgtactgcagtgactctgagggagatggaagggctaagttacgaagaaattgccgaagtaatgagttgccctgtgggtacggttcggtcgcgtatttttcgcgctcgggaagccattgataaagaaattgcaccattgctgtga

SEQ ID NO: 397 - protein, 193 aa, Saccharophagus degradans 2-40
MTAQTAQDSDHQLVLRVQKGDKRAFDMLVIKYQHKILSIISRYIKDNAEIHDVAQEAFIKAYRAIGNFRGDSAFYTWIYRIAINTAKNYLVSRGRRPPSSDVDVEDAEFYSGSDSLKDVDTPENHAMRDQLETVVNNAIKALPEDLRTAVTLREMEGLSYEEIAEVMSCPVGTVRSRIFRAREAIDKEIAPLL

SEQ ID NO: 398 - DNA, 618 bp, Methylobacillus flagellatus KT
  CDS (1)..(618): transl_table=11
atggcagtaaccccgccagcgggtaatcgggagctagaccagcagttagttgagcgcgcacaaagtggtgataagcgtgcgttcgggttgctggtggataagtaccagcgcaagctgggacgattgctttcgcgcttgatcagggatcccgccgaagttgaggatgtcgtccaggaatccttcatcaaggcttaccgggccttgcccagcttccgtggtgatagtgcgttttatacctggttgtaccgtattggcatcaacactgcgaagaattaccttgtcgcgatgggacgcagaccccaggccacaggggatatcgagatcgaagacgcagaaaattttgatgatggcaatgaattgcgcaccatggatacccctgagacggaattgatgggcaaagagattgcccaaactgtgaacgacaccgtcgctatgttgccagaggaattacgtactgcgattaccttgcgcgagatagaaggccttagctacgaggaaattgccaccatgatggactgccccatagggacggtacgttctcgtattttccgtgctcgtgaaacgattgcccagaagttgcgtcctttattggacacccccgaaaacaggagatggtaa

SEQ ID NO: 399 - protein, 205 aa, Methylobacillus flagellatus KT
MAVTPPAGNRELDQQLVERAQSGDKRAFGLLVDKYQRKLGRLLSRLIRDPAEVEDVVQESFIKAYRALPSFRGDSAFYTWLYRIGINTAKNYLVAMGRRPQATGDIEIEDAENFDDGNELRTMDTPETELMGKEIAQTVNDTVAMLPEELRTAITLREIEGLSYEEIATMMDCPIGTVRSRIFRARETIAQKLRPLLDTPENRRW

SEQ ID NO: 400 - DNA, 600 bp, Ralstonia metallidurans CH34
  CDS (1)..(600): transl_table=11
gtgagtgaacgcgaagccgatcagcttctagttgaacgcgtccagcagggcgacaaacgggcctttgagttgctggtgaccaaatatcaccgcaagatcatccgcctgatctcccgccttgtccgagaccccgccgaagtggaggatgtggcgcaagatgcctttatcaaggcatatcgcgcgctgccccagttccggggcgaatccgctttctacacgtggctgtaccggatcgccgtcaacacggccaagaactacctggccacccagggacggcggccggaagcgtccagcgatatcgatgccgaagaggctgaaacttttgcggacggtgagcaactaagggatatcaatacgccggagtcgatgctccacacgcgccaggttgccgatacggtgaaccgcgccatggaggcattgccggaagaattacgcaccgccattacgctgcgcgagatcgaaggcctcagctatgaggagatcgcggaggcgatggggtgtccgatcggtacggtgcgctcgcggattttccgggcgcgcgaagcgatcgccgagaagttgcgcccgctgctgggaacggcagagggcaagcggtggtag

SEQ ID NO: 401 - protein, 199 aa, Ralstonia metallidurans CH34
MSEREADQLLVERVQQGDKRAFELLVTKYHRKIIRLISRLVRDPAEVEDVAQDAFIKAYRALPQFRGESAFYTWLYRIAVNTAKNYLATQGRRPEASSDIDAEEAETFADGEQLRDINTPESMLHTRQVADTVNRAMEALPEELRTAITLREIEGLSYEEIAEAMGCPIGTVRSRIFRAREAIAEKLRPLLGTAEGKRW

SEQ ID NO: 402 - DNA, 630 bp, Acidobacteria bacterium Ellin345
  CDS (1)..(630): transl_table=11
atggagaccatccaacccaaagtagatgagcccatcagcgaagagatgaggctcgtgaacgccgcccgggaaggcgacgttggcgcattcgaggaactggtccggaagtacgatcggaacgtttttcgaattgccaaccacatcacgcaaaaccgcgaagacgcggaagacgtggtgcaggatgcgttcctgaaggcgttccagaacctgggacagttccaggggcagtcgaaattttatacgtggctagtacgcatcgcggtcaatgaggccttgatgcggttaaggcgtcgccgtccggaacggatggtgtcgctggatgaagatatcaacacgggagaggacaccattccgcgagaagttgcggactgggcaccgaacccggagcagttgtataaccaagccgaactgaaggaaattctgcagaagacgattcaaggacttccgccgagcttccggacggtgttcgtgctgcgtgacgttgaagggctttcgacggaagagaccgcggacgctttgaatttaagcattccggcggtaaagtcgaggctgctacgtgcacgcttgcagttgcgcgagagattgacgaagtactttaaaaagcagcgtggtggagatggaaaacagtga

SEQ ID NO: 403 - protein, 209 aa, Acidobacteria bacterium Ellin345
METIQPKVDEPISEEMRLVNAAREGDVGAFEELVRKYDRNVFRIANHITQNREDAEDVVQDAFLKAFQNLGQFQGQSKFYTWLVRIAVNEALMRLRRRRPERMVSLDEDINTGEDTIPREVADWAPNPEQLYNQAELKEILQKTIQGLPPSFRTVFVLRDVEGLSTEETADALNLSIPAVKSRLLRARLQLRERLTKYFKKQRGGDGKQ

SEQ ID NO: 404 - DNA, 636 bp, Myxococcus xanthus DK 1622
  CDS (1)..(636): transl_table=11
gtgctaggttgccgcacctacttggcaaccgacgacctcactctcgtcaagcgcgtccggaccggcgaccagcgcgctttcaaactcctcgtcgagcgttaccagcgcaaggtgtacgccgttgcgttgggcatgctgaaggacaaggaggaagcgatggacgtctcccaggaggcgttcgtcaaggtctacaagtatctggaccacttcaagggcgactcgtccttctacacgtggctctaccgcatcaccgtcaacatctgcatcgacgtcatccgcaagcgtggcggaggcggcgaggtcgtggagttcgacgagagccagtccgtggacctgtccgaggcccgaatcggcgccctgggcagccggctgggcaccaatccccagaagagcgccctgcgccgcgaactggcggagaagatccaggaggccctggccacggtgccggagaagcatcgggccatcctcctgctgcgggaaatcgagggcatgtcctacgacgacctcgcccgcaccctggacatccccaagggcacggtgatgagccggcttttccatgcccgggccaaggttcagaaaatcctcagtgaatacctggagttggacgaagcgaagagcggcgtgggcagtgattga

SEQ ID NO: 405 - protein, 211 aa, Myxococcus xanthus DK 1622
MLGCRTYLATDDLTLVKRVRTGDQRAFKLLVERYQRKVYAVALGMLKDKEEAMDVSQEAFVKVYKYLDHFKGDSSFYTWLYRITVNICIDVIRKRGGGGEVVEFDESQSVDLSEARIGALGSRLGTNPQKSALRRELAEKIQEALATVPEKHRAILLLREIEGMSYDDLARTLDIPKGTVMSRLFHARAKVQKILSEYLELDEAKSGVGSD

SEQ ID NO: 406 - DNA, 579 bp, Shewanella sp. MR-4
  CDS (1)..(579): transl_table=11
atgagtggacaaataagtgatcaacaattagttgagcgcgtacaacggggagataaaaacgcttttaacctgttggtgcttaaatatcagagtaaagtggtgagcttgatttcacgctatgtgcgtaaccaagccgacgttaccgatgtggcacaggaagcgtttatcaaagcttatcgagctttgccaaactttcgtggagaaagtgcgttttatacctggttgtaccgcatagccgtaaacacggctaagaattatctcgtgtcacaggggcgcagagcgcctgcaaatgatgtggatgccgaggatgccgaatactatgaaggcagtgatgcgctaaaggagtttgcctccccagagcgactaatgttatcggacgaaatcaaaaaagtggttttcgagacattagaaaccttgccggaagaattacgtatggcgatttcgctacgtgaactcgatgggatgagttacgaggatattgccatcatcatggattgccctgtggggactgtaagatctcgtatctttcgtgcccgtgaagcaatcgacaaaaaactccagccattgctggaagagtaa

SEQ ID NO: 407 - protein, 192 aa, Shewanella sp. MR-4
MSGQISDQQLVERVQRGDKNAFNLLVLKYQSKVVSLISRYVRNQADVTDVAQEAFIKAYRALPNFRGESAFYTWLYRIAVNTAKNYLVSQGRRAPANDVDAEDAEYYEGSDALKEFASPERLMLSDEIKKVVFETLETLPEELRMAISLRELDGMSYEDIAIIMDCPVGTVRSRIFRAREAIDKKLQPLLEE

SEQ ID NO: 408 - DNA, 579 bp, Shewanella sp. MR-7
  CDS (1)..(579): transl_table=11
atgagtggacaaataagtgatcaacaattagttgagcgcgtacaacggggagataaaaacgcttttaacctgttggtgcttaaatatcagagtaaagtagtgagcttgatttcacgctatgtgcgtaaccaagccgacgttaccgatgtggcacaggaagcgtttatcaaagcttatcgagctttgccaaactttcgtggagaaagtgcgttttatacctggttgtaccgcatagccgtaaacacggctaagaattacctcgtgtcacaggggcgcagagcgcctgcaaatgatgtggatgccgaggatgccgaatactatgaaggcagtgacgcgctaaaggagtttgcctccccagagcgactaatgttatcggacgaaatcaaaaaagtggttttcgagacattagagtccttgccggaagaattacgtatggcgatttcgctgcgtgaactcgatgggatgagttacgaagatattgccatcatcatggattgccctgtgggtactgtaagatctcgtatctttcgtgcccgtgaagcaatcgacaaaaaactccagccattgctggaagagtaa

SEQ ID NO: 409 - protein, 192 aa, Shewanella sp. MR-7
MSGQISDQQLVERVQRGDKNAFNLLVLKYQSKVVSLISRYVRNQADVTDVAQEAFIKAYRALPNFRGESAFYTWLYRIAVNTAKNYLVSQGRRAPANDVDAEDAEYYEGSDALKEFASPERLMLSDEIKKVVFETLESLPEELRMAISLRELDGMSYEDIAIIMDCPVGTVRSRIFRAREAIDKKLQPLLEE

SEQ ID NO: 410 - DNA, 576 bp, Alkalilimnicola ehrlichei MLHE-1
  CDS (1)..(576): transl_table=11
gtgagttcgggcgtcggcgaccaggagctggtggagcgcgctcaggccggagacaagcgggccttcgacgcgctggtgatcaagtaccagcaaaaggtggtgaagttggtctcgcgctatgtgcgcgagcccagtgacgcgctggatattgcccaggaggcgttcatcaaggcctatcgggcactgccgcgtttccggggcgacagcagcttctacacctggctgtaccggatcgccatcaacaccgccaagaaccatctggtcgcgcagggtcgccgtccgcccgactcggacgtcgatgccgaagacgcagaacgctacgacatcgactcggggctgcgcgaccatgacacccctgagggctacgcccggcgggacgagatcgaacgcacggtggtggatgccatcgagagtcttccagaggatctgcgcaccgcgatcactttgcgcgagctggaaggcctgacgtacgaggagattgcccaggcaatggactgcccagtgggtacggtgcgttcccgtatcttccgggcccgtgaggccatcgataaacggctcaggccattggttgactga

SEQ ID NO: 411 - protein, 191 aa, Alkalilimnicola ehrlichei MLHE-1
MSSGVGDQELVERAQAGDKRAFDALVIKYQQKVVKLVSRYVREPSDALDIAQEAFIKAYRALPRFRGDSSFYTWLYRIAINTAKNHLVAQGRRPPDSDVDAEDAERYDIDSGLRDHDTPEGYARRDEIERTVVDAIESLPEDLRTAITLRELEGLTYEEIAQAMDCPVGTVRSRIFRAREAIDKRLRPLVD

SEQ ID NO: 412 - DNA, 639 bp, Solibacter usitatus Ellin6076
  CDS (1)..(639): transl_table=11
atggataaagacgacgcaatggcaccttccagtctggcaggaatcgaagaatccgcgttggtgacacaagcccgcgaaggcgatacagccgcctttgccgaactcgtgcgccgctacgaaggcaaaatcttccgtcttgcccagcacattacccagaaccgcgaggatgccgaggatgtgctccaggagagcttcatgaaagcctatgagcacctggaacagttcaagggagattccaagttttatacctggattgtgcggatcgcagtgaaccaggcgctcatgaaactgcgccgccgcaagaccgacaaatccgtgtcgatcgatgaaaccatcgacaccggcgaagatactgtggtccgcgaaatcgccgcgtggggagaagatcccgaacagagtttctcccgtgaggaactcggcagcattctggacaaggcgatcgagggtttggaaccactttatcgaagcgttttcgtccttcgcgacatcgaagaactgtcgacggaagaaacagccgaagctcttggcctttcggtacccgccgtaaagagtagattgttgagggcccggttgcaacttcgggagaagctcacacgcttcttcaaacgcaagggagacgacgcgtttgcttacatgtaa

SEQ ID NO: 413 - protein, 212 aa, Solibacter usitatus Ellin6076
MDKDDAMAPSSLAGIEESALVTQAREGDTAAFAELVRRYEGKIFRLAQHITQNREDAEDVLQESFMKAYEHLEQFKGDSKFYTWIVRIAVNQALMKLRRRKTDKSVSIDETIDTGEDTVVREIAAWGEDPEQSFSREELGSILDKAIEGLEPLYRSVFVLRDIEELSTEETAEALGLSVPAVKSRLLRARLQLREKLTRFFKRKGDDAFAYM

SEQ ID NO: 414 - DNA, 594 bp, Magnetococcus sp. MC-1
  CDS (1)..(594): transl_table=11
gtgaacgaagccgatgagatcttggtagaaaaaaccaagcagggcgataaaaaagcctatgaggtgctggtgcgcaaataccagggccgcgttgcgtcggtgatctctcgtacggtttctgacccggtgcgggtgcaggaccttacccaagaagcctttcttaaagcctatcgagcgttacatcactttcgtggagatgccgccttttatacgtggttgtaccgcattgccgtcaacacggcgaaaaattttgtcatgtcccaggatcgcggtattcccatgagcgatatggatctagaggatgctgatcgcctttcgcctcaattgcgtgactatgataccccagaaaatcaggtgctgcgtggcgagttaatggatgccctaaaggttgccattgaagagctggcccccaccatgaaacaggccatcgccctgcgggatctggagggtaaatcttatgaagagattgccgagatcatgggttgccccattggcacggtgcgttcgcgtattttccgtgggcggcaagagattgttaataaattgaaagatcatcttcccaacggcaacttggccggtcatcacgggctgtaa

SEQ ID NO: 415 - protein, 197 aa, Magnetococcus sp. MC-1
MNEADEILVEKTKQGDKKAYEVLVRKYQGRVASVISRTVSDPVRVQDLTQEAFLKAYRALHHFRGDAAFYTWLYRIAVNTAKNFVMSQDRGIPMSDMDLEDADRLSPQLRDYDTPENQVLRGELMDALKVAIEELAPTMKQAIALRDLEGKSYEEIAEIMGCPIGTVRSRIFRGRQEIVNKLKDHLPNGNLAGHHGL

SEQ ID NO: 416 - DNA, 600 bp, Azoarcus sp. BH72
  CDS (1)..(600): transl_table=11
atgagcgatcgcgaaatcgatcagcaacttgtcgaacgcgtgcagcgtggcgacaagcaggccttcggcttgttggtttccaaataccagcgcaagctgcatcggctgctttcgaggctgatccgtgatccggccgaggtcgaggacgtggcgcaggagaccttcatcaaggcctaccgtgcgctcggttcctttcgcggggacagcgccttctacacctggctctaccgcatcggaatcaacacggcgaagaattacctcgtgtcccaggggcggcgtgcgccgacctccacggggttcgactcggaggaagctgaaactttcgaggacggggatcagctgcgcgacatcaacacgccggagcgcttgatgatgacgcagcagatcggggaaacggtcgacgcggcgatggcggggcttcccgaagaattgcggacggcgatcatgctgcgcgagttcgaggggctgagctacgaagagatcgccaacatcatggattgcccgatagggacggtgcggtcgcggatcttccgtgcccgcgaagcgattgcagaacggttgcgcccgctgctcgacacggcgccggacaaacgttggtag

SEQ ID NO: 417 - protein, 199 aa, Azoarcus sp. BH72
MSDREIDQQLVERVQRGDKQAFGLLVSKYQRKLHRLLSRLIRDPAEVEDVAQETFIKAYRALGSFRGDSAFYTWLYRIGINTAKNYLVSQGRRAPTSTGFDSEEAETFEDGDQLRDINTPERLMMTQQIGETVDAAMAGLPEELRTAIMLREFEGLSYEEIANIMDCPIGTVRSRIFRAREAIAERLRPLLDTAPDKRW

SEQ ID NO: 418 - DNA, 636 bp, Acidovorax sp. JS42
  CDS (1)..(636): transl_table=11
atgacgaccccatcgcccgcgccccaagagcccgccgacagtgatctgcgattggtcgagcgcaccgtcgcgggggaccagcgggcttatgaacttctggtcatcaaataccagcggcgcatcgagcgcctcgtggcgcgtatggtgcgcgataccgatctggtggccgacatcacgcaggaaacctttctgcgtgcctaccgagccttgtaccagttccgtggagaggcacagttctatacctggctctaccgcatcgccgtgaacaccgccaagaaggcgctggtagacatgaaacgcaatccggttgtcacggagagcgctcttcgcggcagcagcgactccgaagatgaaacttccttcctggatcgtgaactaatcagcgacgaaacccccgaaaccgtgttggcggcccaggaaatcgctgccgctgtcaatgcggccatggaggcattgcccgaggatttgcggcaggccgtgactctgcgggagatcgaggggttgagttacgaggaaattgccgtagccatggaatgccccatcggtacggtgcgctcgcggatcttccgtgcgcgcgaggcaatttccgcgcgggtcaagcctttgctggagaggcgctccggcaagcggtggtag

SEQ ID NO: 419 - protein, 211 aa, Acidovorax sp. JS42
MTTPSPAPQEPADSDLRLVERTVAGDQRAYELLVIKYQRRIERLVARMVRDTDLVADITQETFLRAYRALYQFRGEAQFYTWLYRIAVNTAKKALVDMKRNPVVTESALRGSSDSEDETSFLDRELISDETPETVLAAQEIAAAVNAAMEALPEDLRQAVTLREIEGLSYEEIAVAMECPIGTVRSRIFRAREAISARVKPLLERRSGKRW

SEQ ID NO: 420 - DNA, 570 bp, Haemophilus influenzae R2866
  CDS (1)..(570): transl_table=11
atggctgaacagctaacagatcaggctttggtagaaagagtacagcaaggggataaaaaagccttcaatttgttggtttcgcgttatcaaaataaagtagcagggcttttgacccgatatgtatcgcgtaacgatattcctgatgtggtgcaagaatcctttataaaggcttatcgctcaattgaatcttttcgtggcgaaagtgctttctatacatggctttatcgaattgccgttaatacggcaaaaaattatttaacggctcaaggtcgccgtccaccaaatgaagatattttggcagaagatgctgaaaattatgatgtgggaacacaccttagggatgtggatacacccgaaaatgagatgttgtctagtgagttggaaagagttgtttttgatactattcataacttaccagaagatttaaaaactgcgattacgttacgagaactagaaggtttaagttacgaagatattgcagaaattatggattgtcctgttggtacggttcgttcccgaatcttccgagcaagggaaatgatcgaaaataaaattcaacctctaatgtag

SEQ ID NO: 421 - protein, 189 aa, Haemophilus influenzae R2866
MAEQLTDQALVERVQQGDKKAFNLLVSRYQNKVAGLLTRYVSRNDIPDVVQESFIKAYRSIESFRGESAFYTWLYRIAVNTAKNYLTAQGRRPPNEDILAEDAENYDVGTHLRDVDTPENEMLSSELERVVFDTIHNLPEDLKTAITLRELEGLSYEDIAEIMDCPVGTVRSRIFRAREMIENKIQPLM

SEQ ID NO: 422 - DNA, 582 bp, Pseudoalteromonas tunicata D2
  CDS (1)..(582): transl_table=11
atgaacgagcaggatttagatttagcgctagtaataaaagtgcagcagggagacaaaaacgcttttaatttgttggtcagaaaatatcaaaacaaagtggccagtttgatttctcgatatgtatcaaaccaaagcgatgtagctgatgttgcacaagaagcctttattaaagcgtaccgtgcaattcctggctttcgaggtgaaagtgctttttatacctggctttaccgaattgctgttaactgcgcaaaaaactaccttgttgctcaaggacgcaaaccgcccgcaaatgatgttgacgctgaagaggctgaatattatgaaggcgcatcggctatgcactctaatgcgtcgcctgaaaatttgctgatgagtgatgaagtaaaaaaagtaatttacgatgcaatcaataatttgcctgaagacctaaaaaccgcgataaccttgcgtgaattagagggtatgagctatgaagatatagccgttattatggattgtccggttggaactgtgcgttcaaggattttcagagcgcgtgaagcagttgatttaaaattaaacccattaataaataatgcatag

SEQ ID NO: 423 - protein, 193 aa, Pseudoalteromonas tunicata D2
MNEQDLDLALVIKVQQGDKNAFNLLVRKYQNKVASLISRYVSNQSDVADVAQEAFIKAYRAIPGFRGESAFYTWLYRIAVNCAKNYLVAQGRKPPANDVDAEEAEYYEGASAMHSNASPENLLMSDEVKKVIYDAINNLPEDLKTAITLRELEGMSYEDIAVIMDCPVGTVRSRIFRAREAVDLKLNPLINNA

SEQ ID NO: 424 - DNA, 579 bp, Photobacterium sp. SKA34
  CDS (1)..(579): transl_table=11
atgagcgagcagcaaactgatcaggtattaattgagcgagtacagcggggagataagcaagctttcaaccttctggttattaaataccagaataaagtttgtaaccttgtatcacgttatgtcagtaattctggtgatgtaccagatgtggcgcaagaggcgtttattaaagcgtaccgagcgttgccaacattccgtggtgaaagtgccttctatacatggctctaccgaattgcagttaatactgcaaaaaactatttagtcgctcaggggcgtcgtccgccagcatctgatgttgatgcagaagatgcggaatactatgaaagtggtagcgcgctgaaagaaatttcgaaccctgagaaccaaatgttgtcagatgaattgaagcgggttgtttttagcacgattgaagcgctaccagatgatctcaaaaccgcaatctcattacgtgaactggatggtctaagttatgaggaaattgcagaggttatgggatgtccagtaggtacagttcgctctcgtatattccgtgcacgtgaggcggttgaaaaacgtatccgtcctctcatgcagcaataa

SEQ ID NO: 425 - protein, 192 aa, Photobacterium sp. SKA34
MSEQQTDQVLIERVQRGDKQAFNLLVIKYQNKVCNLVSRYVSNSGDVPDVAQEAFIKAYRALPTFRGESAFYTWLYRIAVNTAKNYLVAQGRRPPASDVDAEDAEYYESGSALKEISNPENQMLSDELKRVVFSTIEALPDDLKTAISLRELDGLSYEEIAEVMGCPVGTVRSRIFRAREAVEKRIRPLMQQ

SEQ ID NO: 426 - DNA, 585 bp, Oceanobacter sp. RED65
  CDS (1)..(585): transl_table=11
atggattctgacgaccaattggtagccagagtaaaaaagggcgataagcgcgcttttgacttactggttttaaagtatcagcacaaaataatgtctctgatttctcgctacgtgcaggactcagcggagatacaagatgtggcgcaagaagctttcattaaagcttatcgcgcattgaagaatttccgtggagacagtcaattttatacttggctataccgaattgcggtgaacactgcgaagaattacttggtaagtcagggacgtcgtccgcctcaacaagatattgatgtggatgatgcggaacaatttaacccaagtgcgtctctaaaggatgtagctagccctgatcggttgttagcgagagatgagctgaaagctaaagtctttgaagccatggaggctttgccggatgagctaaggactgcaatcaatcttcgtgagctagaaggaatgagttacgaagagatcagtgaggttatggactgtcccatcggaacggtgcgctcacgtattttccgagcacgtgaggcgattgataaagccatcacgccgttaatggaacaaaccgagaaaacagcatag

SEQ ID NO: 427 - protein, 194 aa, Oceanobacter sp. RED65
MDSDDQLVARVKKGDKRAFDLLVLKYQHKIMSLISRYVQDSAEIQDVAQEAFIKAYRALKNFRGDSQFYTWLYRIAVNTAKNYLVSQGRRPPQQDIDVDDAEQFNPSASLKDVASPDRLLARDELKAKVFEAMEALPDELRTAINLRELEGMSYEEISEVMDCPIGTVRSRIFRAREAIDKAITPLMEQTEKTA

SEQ ID NO: 428 - DNA, 579 bp, Vibrio sp. Ex25
  CDS (1)..(579): transl_table=11
atgaacgagcagctgaccgatcaagtattgattgagcgagttcagaatggcgataagcaagcattcaacctgctggtaacgaagtaccagaacaaggtatgtaatcttatttccagatacgttagtaatcctggcgatgtaccagatgtagcacaagaagcgtttattaaagcttaccgagctattcccagctttcgtggggagagtgcgttttatacgtggctgtatcgcattgcagtgaatactgcgaaaaatcacattgttgctcaagggcgtagacctccagcgacagatgtcgatgctgaagatgctgaattttacgaaacaggtagtgcacttaaagaaatatcgaaccctgagaacttaacgttgtccaaagaattgcaacgggtggtgttcagtgcaatcgaagctttacctgaagatttaaaaaccgcaatgacattacgagagctcgatggcttgagttatgaagaaattgcagaagtgatggattgcccggtaggaacggtacgatcgcgtatcttccgtgctcgtgaggcggtggaaaagaaaatcagacctcttttgcaacgctag

SEQ ID NO: 429 - protein, 192 aa, Vibrio sp. Ex25
MNEQLTDQVLIERVQNGDKQAFNLLVTKYQNKVCNLISRYVSNPGDVPDVAQEAFIKAYRAIPSFRGESAFYTWLYRIAVNTAKNHIVAQGRRPPATDVDAEDAEFYETGSALKEISNPENLTLSKELQRVVFSAIEALPEDLKTAMTLRELDGLSYEEIAEVMDCPVGTVRSRIFRAREAVEKKIRPLLQR

SEQ ID NO: 430 - DNA, 582 bp, Alteromonadales bacterium TW-7
  CDS (1)..(582): transl_table=11
atgagcgagcaggaattggatttagtgctagtaagaagagtgcagcagggcgataaaaatgccttcaatctattagtaaagaagtatcaaaacaaaattgcaggtttgatctctcgttatgtatcaaatcaaggcgatattgctgatgtagcgcaagaagcttttataaaagcttaccgtgcacttcccaactttagaggcgacagtgctttctatacttggttataccgtattgccgttaattgtgctaaaaattatttagttgctcaggggcgtaagccgccagctaatgatattgacgctgaagaagctgaattttatgattgtggtgactcgatgcgttcaaacgcatcacctgaaaaccttttattaagtgaagaggttcgcgctgtaatttttaatacaattgatagtttgcctgaagaccttaaaaccgcaataactctcagagaaattgagggtatgagctatgaagaaatagctgtggtaatggattgccctgtaggcacagtacgttcgcgtatatttcgtgcccgtgaagcaattgataacaaattaaacccattaataggcgagtcttag

SEQ ID NO: 431 - protein, 193 aa, Alteromonadales bacterium TW-7
MSEQELDLVLVRRVQQGDKNAFNLLVKKYQNKIAGLISRYVSNQGDIADVAQEAFIKAYRALPNFRGDSAFYTWLYRIAVNCAKNYLVAQGRKPPANDIDAEEAEFYDCGDSMRSNASPENLLLSEEVRAVIFNTIDSLPEDLKTAITLREIEGMSYEEIAVVMDCPVGTVRSRIFRAREAIDNKLNPLIGES

SEQ ID NO: 432 - DNA, 702 bp, marine gamma proteobacterium HTCC2143
  CDS (1)..(702): transl_table=11
atgggactacttggaagaaagtacaataactcaaagccgtttgctgaaaaaagcaacgatcggcgtttggcaacaggggattcaatgatcagctcgcaggagtcagatcagcagttggtagagcgcgtgcaaaaaggtgataacactgcctttgatttgttggttcttaaatatcaacataaaatatttggcttgatatctcgctatgtcagagactcagatgagattcaggacgttgcacaagaagcttttattaaggcctaccgcgcgctgccaaaatttcgtggagatagtgcgttctacacatggctgtatagaattgctattaatacggccaagaatcatctggtttcgagaagtcggcgtccgccagctactgatgtcgatgttgaagatgcagaatactacgaatccgcatcatctctgcgcgatatagagaatccagaaaatgccctttatggagaagagttgaagcaggtcgttgagagtgctatgaaagaattgccagaggatctgcgtacagcggtaacattgcgggaatttgatggtctcagttacgaagatattgccgacgtgatggaatgccccgtagggaccgttaggtccagaatatttagagcgcgtgaagcgatagacaagcgagtaaaacagcaaatttttggtgctgaatcggacgatcatctgacgctggttaaaaattaa

SEQ ID NO: 433 - protein, 233 aa, marine gamma proteobacterium HTCC2143
MGLLGRKYNNSKPFAEKSNDRRLATGDSMISSQESDQQLVERVQKGDNTAFDLLVLKYQHKIFGLISRYVRDSDEIQDVAQEAFIKAYRALPKFRGDSAFYTWLYRIAINTAKNHLVSRSRRPPATDVDVEDAEYYESASSLRDIENPENALYGEELKQVVESAMKELPEDLRTAVTLREFDGLSYEDIADVMECPVGTVRSRIFRAREAIDKRVKQQIFGAESDDHLTLVKN

SEQ ID NO: 434 - DNA, 636 bp, marine gamma proteobacterium HTCC2080
  CDS (1)..(636): transl_table=11
atggatattacgatgaattttgtcgctgctggtcaaaaacctttagaaggcggttacgtgacagctcgggaaaccgatcagcaactggtagtgagagctcagcggggggatacacgagccttcgatttactggtgctcaagtatcaggggcgcatagcgacactcgttgcgcgttttgtaaatgacgctgccgaagtagaggatgtgacacaagaggcttttatcaaggccttcagagcactgccaaaatttcgaggtgagagcgcgttttatacttggctgtatcgaattgcttcaaatgccgcaaagaattatctagtggcaaggggacggagacctgctacaactgccgacgtccaggatgctgagtattttgaggaaggcgatgcgcttcgcgaaatagagacgccagaaaatgcctactttggcagtgagctggcaaagacggtacagaccgcactggagggcttgcctgaggaactgcgtgcagcactaagtctcagggagtttgatgggctaagctatgaggaaatagcggatgtcatggcgtgccctgtgggcacagtacggtcgagaatatttagggcgcgcgaggtggtagatagtcgtgtccgagagcaattggcaggcgagtaa

SEQ ID NO: 435 - protein, 211 aa, marine gamma proteobacterium HTCC2080
MDITMNFVAAGQKPLEGGYVTARETDQQLVVRAQRGDTRAFDLLVLKYQGRIATLVARFVNDAAEVEDVTQEAFIKAFRALPKFRGESAFYTWLYRIASNAAKNYLVARGRRPATTADVQDAEYFEEGDALREIETPENAYFGSELAKTVQTALEGLPEELRAALSLREFDGLSYEEIADVMACPVGTVRSRIFRAREVVDSRVREQLAGE

SEQ ID NO: 436 - DNA, 687 bp, Marinobacter sp. ELB17
  CDS (1)..(687): transl_table=11
atgcattccattctcaagcaggccggaactcaggccaccgaaccagcgagtgccggcaaaccgtccatgacgtccagtatcgatcagacagcccccgaccagggcgacagccagactgacttgcagttggtgcgcaaggtacgcaatggcgaccgtgctgcctttgatttgctggtgttgaaataccagtcgcgagtggcgtctatcatcagtcgctatgtattcgatagccacgaagtgatggatcttacccaagaaactttcgttaaagcctttcgcgctattgaccgttttcgcggtgacagcgcattttacacttggctttaccgcatagcggttaatacagccaaaaattatctggaagcgcgcagccggcgccctcagagcagtgcggattcggcggacgcggaaaactacgtcgatggccaacgcctgcgggatattgcgtcacctgagaagctgctgcagcgcgaccagctacagcaggccttgaacaaagccatagacgcactgccggaagaattgcgttcggcgtttttgttacgagaatatgatggcctgagttacgaagacattgcccgcatactggaatgcccgattggcacggtgcgttcccgtatttttcgggcccgggatgcggtagatcgccatcttggccccttgctcaactattctgcaagcaattga

SEQ ID NO: 437 - protein, 228 aa, Marinobacter sp. ELB17
MHSILKQAGTQATEPASAGKPSMTSSIDQTAPDQGDSQTDLQLVRKVRNGDRAAFDLLVLKYQSRVASIISRYVFDSHEVMDLTQETFVKAFRAIDRFRGDSAFYTWLYRIAVNTAKNYLEARSRRPQSSADSADAENYVDGQRLRDIASPEKLLQRDQLQQALNKAIDALPEELRSAFLLREYDGLSYEDIARILECPIGTVRSRIFRARDAVDRHLGPLLNYSASN

SEQ ID NO: 438 - DNA, 579 bp, Moritella sp. PE36
  CDS (1)..(579): transl_table=11
atgagtgcaaaagagacggacttgcaattagttgagcgagttcaaggcggtgacaaagccgcatttaatttattggtgactaaataccaacagaaagttgcgaacctgatctcacgctacgtttcagcaagtggcgacgttgccgatgtgactcaggaagtgtttattaaagcgtatcgcgcgttgccgaattttagaggtgatagtgcgttttatacttggctatatcgtattgccagtaataccgctaagaactatttaattgcgcaaagtagacgaccacctgctaacgatattgatgccgcagatgcggagttttacgatggtaacgatggcatgcgtgagtcatcaacaccagagcgtattattctagctgaagaaatgaaagcggttattttttcagtcattgacgggttacctgatgaattacgtaccgcgataacattgcgtgaaatggaaggcatgagttatgacgatattagtattgtcatgagctgcccagtgggtactgttcgctcacgtatttttagagcacgtgaagcgattgaagtaaaattaaaaccgttacttcaacagtaa

SEQ ID NO: 439 - protein, 192 aa, Moritella sp. PE36
MSAKETDLQLVERVQGGDKAAFNLLVTKYQQKVANLISRYVSASGDVADVTQEVFIKAYRALPNFRGDSAFYTWLYRIASNTAKNYLIAQSRRPPANDIDAADAEFYDGNDGMRESSTPERIILAEEMKAVIFSVIDGLPDELRTAITLREMEGMSYDDISIVMSCPVGTVRSRIFRAREAIEVKLKPLLQQ

SEQ ID NO: 440 - DNA, 600 bp, Thauera sp. MZ1T
  CDS (1)..(600): transl_table=11
atgagcgatcgggaactcgatcagcaactcgtcgagcgtgttcaacgtggcgacaagcaggcgttcggtctgctggtatccaagtaccagcgcaagctgaacagattgctgtcgaggctgatccgcgactcggcagaagtcgaggacgtggcgcaagagaccttcatcaaggcttatcgagcgctgggttcgtttcggggtgacagtgccttctacacctggctgtaccgcatcggcatcaacacggcgaagaactacctggtctcccaggggcgcagggccccgacctcgacgagtttcgattctgaagaggcggagaccttcgaggaaggcgatcagttgcgcgacatcaacacgcccgagcggctgctgatgacccgccagatcggcgaaaccgtggaggacgcgatggccgcactgcccgaggaactgaggacggcgatcatgcttcgcgagctcgaagggctcagttacgaggagatcgccggcatcatggaatgcccgattggcacggtgcgctcgcggatcttccgtgcgcgcgaagcgatagcagaacgtctgcggcccctgctggacacggccccggacaaacgttggtag

SEQ ID NO: 441 - protein, 199 aa, Thauera sp. MZ1T
MSDRELDQQLVERVQRGDKQAFGLLVSKYQRKLNRLLSRLIRDSAEVEDVAQETFIKAYRALGSFRGDSAFYTWLYRIGINTAKNYLVSQGRRAPTSTSFDSEEAETFEEGDQLRDINTPERLLMTRQIGETVEDAMAALPEELRTAIMLRELEGLSYEEIAGIMECPIGTVRSRIFRAREAIAERLRPLLDTAPDKRW

SEQ ID NO: 442 - DNA, 603 bp, Verrucomicrobium spinosum DSM 4136
  CDS (1)..(603): transl_table=11
atggtctgcatcatgtccgaacggcccctcaaccccgatcccgaccaggaacttgtcgaacgctcccaaaacggggatacacgcgctttcgatgacctggtcaggaaatacacgcccaagctgtacggattggtttacaacatgacctccaaccgggaggacacggcggatctcctgcaggacatctttgccaaggcctaccggtcgctaaagcgctttcaggggaagagcacgttctacacgtggatctactcgatcagtgtcaatatgacactcaactttctcaagaagcgggggcgctacaccaagctgagcctggatgacgtggacaatggaatccaaaatgatcctgactttatcaagctcacgtccggggggaatcccctgaaggatgtaaacatccacgaacttcaaaaacgtttgaacgaggccatgatgaagctgtccgaagaccatcgcacagtggtcacgttatacgacatccagggcttgcaacatgccgacattagcaagatcctgggggtgagtgaaggaactgtgcgttccagacttttttatgcccatcgacagcttcagaattatcttgaggaattccgcaagtaa

SEQ ID NO: 443 - protein, 200 aa, Verrucomicrobium spinosum DSM 4136
MVCIMSERPLNPDPDQELVERSQNGDTRAFDDLVRKYTPKLYGLVYNMTSNREDTADLLQDIFAKAYRSLKRFQGKSTFYTWIYSISVNMTLNFLKKRGRYTKLSLDDVDNGIQNDPDFIKLTSGGNPLKDVNIHELQKRLNEAMMKLSEDHRTVVTLYDIQGLQHADISKILGVSEGTVRSRLFYAHRQLQNYLEEFRK

SEQ ID NO: 444 - DNA, 609 bp, Verrucomicrobium spinosum DSM 4136
  CDS (1)..(609): transl_table=11
atgtccatttctcccagcagcttgaatgatgttgatgctgcggactcggacttggttcggagggcacaggctggcgacgcgcgggcgtttgacagcctggtgacacgctaccgtggaaaggtttacggcatgtgctaccatctcgtccagaatgaacaagacgcctgggatctggcgcaggaggcctttatcaaggcctggcgcgccctgccgtcgttcaagggcgatgcctcgttttacacctggatctaccggatcgctcacaactccacctacgactggctccgcaagcgcaagatcgagggggcgggtgagttcgatgacgaacgccaggccggggtggcagcgggagccgagactgtgcccaaaggagagcaccggccggacgaagcgcttaaaaatcgcgagctcgggacgcgtattcaacaagcaatcgatcaactcagcccggaccaccgcaccgccattctcctcagggaggtggaggggttcagctacgaggagatcgcccagatcatggagagctccatgggaacggtgatgtcccgcctcttttacgcacgcaagaaacttcaagaactgctcaaagacgcctatgaaaacgcctga

SEQ ID NO: 445 - protein, 202 aa, Verrucomicrobium spinosum DSM 4136
MSISPSSLNDVDAADSDLVRRAQAGDARAFDSLVTRYRGKVYGMCYHLVQNEQDAWDLAQEAFIKAWRALPSFKGDASFYTWIYRIAHNSTYDWLRKRKIEGAGEFDDERQAGVAAGAETVPKGEHRPDEALKNRELGTRIQQAIDQLSPDHRTAILLREVEGFSYEEIAQIMESSMGTVMSRLFYARKKLQELLKDAYENA

SEQ ID NO: 446 - DNA, 579 bp, Shewanella violacea
  CDS (1)..(579): transl_table=11
atgagtggacaaataagtgatcaacaactagttgagcgtgttcagcagggggataaaaatgcatttaatctcttggtactcaagtatcagaacaaggtcatgaatctgattgcacgatatgtgcgaaatcaggctgacgttgctgatgttgctcaggaagcttttattaaagcctatcgagcactaccaaactttcgaggtgagagtgcattttatacctggttgtaccgaattgcggtaaacaccgctaagaatcatctggttgcgcaggggcgacgtgctcctgccaatgatgtcgatgtagaggaagccgaatattatgatggcagtgatgcgttaaaggagtttgcttctcccgaacgtttattaatggccgatgatattcaaaaagttgttttcgatgcactagactcattaccagaagagttaaaaacggctatctcattacgagaactcgatggtatgagttacgaggagatagcaaacgttatggattgtccagttggcacggtaagatctcgtatcttcagagcccgggaagcgatcgataaaaaacttcagcctttgctggaagaatag

SEQ ID NO: 447 - protein, 192 aa, Shewanella violacea
MSGQISDQQLVERVQQGDKNAFNLLVLKYQNKVMNLIARYVRNQADVADVAQEAFIKAYRALPNFRGESAFYTWLYRIAVNTAKNHLVAQGRRAPANDVDVEEAEYYDGSDALKEFASPERLLMADDIQKVVFDALDSLPEELKTAISLRELDGMSYEEIANVMDCPVGTVRSRIFRAREAIDKKLQPLLEE

SEQ ID NO: 448 - DNA, 576 bp, Yersinia enterocolitica
  CDS (1)..(576): transl_table=11
atgagcgagcagttaacggatcagatgctggttgaacgggtccagaaaggtgatcagcaatcgttcaatttactggtaattcgataccagcataagggtgcgagcctcgtatcccgatacgtgcctcagggcgatgtccctgatgtagttcaagaatcttttattaaggcctatcgagccctggaatcgtttcgtggcgacagtgccttttatacttggctgtaccgtattgctgttaatacggcgaaaaattatttagtcgctcaggggcggcgtccaccatccagtgatgtggatgcaaatgatgctgaaaattacgaaaatgcaggtgcattgaaagaaatatcgaaccctgagaacttaatgttgtcagaagaattgaggcagatagtttttaaaaccatagagtctcttcctgaagatctccggatggcgattacactcagggagttagatggtctaagctatgaagagatagctgttattatggactgtccggtcggtactgttcgttcccgtatcttccgtgccagagaggctatcgataacaaagttcagccgctgattcagcgataa

SEQ ID NO: 449 - protein, 191 aa, Yersinia enterocolitica
MSEQLTDQMLVERVQKGDQQSFNLLVIRYQHKGASLVSRYVPQGDVPDVVQESFIKAYRALESFRGDSAFYTWLYRIAVNTAKNYLVAQGRRPPSSDVDANDAENYENAGALKEISNPENLMLSEELRQIVFKTIESLPEDLRMAITLRELDGLSYEEIAVIMDCPVGTVRSRIFRAREAIDNKVQPLIQR

SEQ ID NO: 450 - DNA, 576 bp, Xenorhabdus nematophilus
  CDS (1)..(576): transl_table=11
atgagcgagcagttaacggatcaaatgttggttgaacgggtccaaaagggcgaccaaaaagcatttaatttgctggttataagataccagcataaagtggcgagtctaattgctcgttacgtacctcaaggcgatgttcctgatgttgctcaagaggcttttatcaagacttatcgggcactttcttctttccggggtgatagtgctttttatacgtggttgtatcgtatagccgttaatactgcgaagaattatttagtggctcaggggcgtcgcccgccatccagcgatttggatgccaacgatgcggaaatttacgattcatcaagttcattaaaagaaatttcgaaccccgagaacttaatgttgtctgaagagttgaaggaagtggttttccgcacaattgagtcgcttccggaagatttgaggatagcaattacgctgagggagttggatggattgagttatgaagaaatagccgacatcatggagtgccctgtaggtacggttcgttcaagaattttccgtgcgagggaagccattgataataaagttcaaccactaattcaacagtag

SEQ ID NO: 451 - protein, 191 aa, Xenorhabdus nematophilus
MSEQLTDQMLVERVQKGDQKAFNLLVIRYQHKVASLIARYVPQGDVPDVAQEAFIKTYRALSSFRGDSAFYTWLYRIAVNTAKNYLVAQGRRPPSSDLDANDAEIYDSSSSLKEISNPENLMLSEELKEVVFRTIESLPEDLRIAITLRELDGLSYEEIADIMECPVGTVRSRIFRAREAIDNKVQPLIQQ

SEQ ID NO: 452 - DNA, 582 bp, Azotobacter vinelandii
  CDS (1)..(582): transl_table=11
atgttaaaccaggagcaagatcagcaattggtcgagcgagtgcagcgtggtgacaggcgagccttcgatttgctggtgctgaaataccagcacaagattctcggtttgatcgtgcgttttgtgcatgatgctcatgaggctcaggatgttgctcaagaggctttcatcaaagcctatcgtgcacttggcaattttcgtggtgacagcgctttctatacatggctgtatcgcattgccatcaatactgcgaaaaatcatctggtggcccgtggacgacgtcctccagacagcgatgtgagtgcaggtgatgccgagttttatgagggtgatcatgccctcaaggatatcgaatcaccggagcgctctttgctgagggatgaaatcgaggccactgtgcaccgcaccattcagcagttgccggaggacttgcgtacggcgctgacgctacgcgagttcgatggattgagttacgaagatattgccagcgtcatgcaatgtccggttggaaccgtgcgttcacgcatttttcgggcgcgtgaagcgatagataaagcgctgcagccattactgcaggaaacctaa

SEQ ID NO: 453 - protein, 193 aa, Azotobacter vinelandii
MLNQEQDQQLVERVQRGDRRAFDLLVLKYQHKILGLIVRFVHDAHEAQDVAQEAFIKAYRALGNFRGDSAFYTWLYRIAINTAKNHLVARGRRPPDSDVSAGDAEFYEGDHALKDIESPERSLLRDEIEATVHRTIQQLPEDLRTALTLREFDGLSYEDIASVMQCPVGTVRSRIFRAREAIDKALQPLLQET

SEQ ID NO: 454 - DNA, 570 bp, Haemophilus influenzae
  CDS (1)..(570): transl_table=11
atggctgaacagctaacagatcaggctttggtagaaagagtacagcaaggggataaaaaagccttcaatttgttggtttcgcgttatcaaaataaagtagcagggcttttgacccgatatgtatcgcgtaacgatattcctgatgtggtgcaagaatcctttataaaggcttatcgctcaattgaatcttttcgtggcgaaagtgctttctatacatggctttatcgaattgccgttaatacggcaaaaaattatttaacggctcaaggtcgccgtccaccaaatgaagatattttggcagaagatgctgaaaattatgatgtgggaacacaccttagggatgtggatacacccgaaaatgagatgttgtctagtgagttagaaagaattgtttttgatactattcataacttaccagaagatttaaaaactgcgattacgttacgagaactagaaggtttaagttacgaagatattgcagaaattatggattgtcctgttggtacggttcgttcccgaatcttccgagcaagggaaatgatcgaaaataaaattcaacctctaatgtag

SEQ ID NO: 455 - protein, 189 aa, Haemophilus influenzae
MAEQLTDQALVERVQQGDKKAFNLLVSRYQNKVAGLLTRYVSRNDIPDVVQESFIKAYRSIESFRGESAFYTWLYRIAVNTAKNYLTAQGRRPPNEDILAEDAENYDVGTHLRDVDTPENEMLSSELERIVFDTIHNLPEDLKTAITLRELEGLSYEDIAEIMDCPVGTVRSRIFRAREMIENKIQPLM

SEQ ID NO: 456 - DNA, 576 bp, Salmonella typhi
  CDS (1)..(576): transl_table=11
atgagcgagcagttaacggaccaggtcctggttgaacgggtccagaagggagatcagaaagcctttaacttactggtagtgcgctaccagcataaagtggcgagtctggtttcccgctatgtgccatcgggcgacgttcccgatgtcgtacaggaatcatttattaaggcctatcgcgcgctggattctttccggggggatagcgctttttatacctggttgtatcgtattgcggtcaataccgcgaagaactacctggttgcgcaggggcgtcgtccgccttccagtgatgtagacgcgattgaagcagaaaactttgaaagcggcggcgcgctgaaagaaatttcgaaccctgagaacttaatgttgtcagaagaactgagacagatagttttccgaactattgagtccctcccggaagatttacgtatggcaatcaccttacgggagctggatggcctgagctatgaagagatagcggctatcatggattgcccggtggggacggtgcgttcacgtatcttccgggcgcgggaagctattgataataaagttcaaccgcttatcaggcgttga

SEQ ID NO: 457 - protein, 191 aa, Salmonella typhi
MSEQLTDQVLVERVQKGDQKAFNLLVVRYQHKVASLVSRYVPSGDVPDVVQESFIKAYRALDSFRGDSAFYTWLYRIAVNTAKNYLVAQGRRPPSSDVDAIEAENFESGGALKEISNPENLMLSEELRQIVFRTIESLPEDLRMAITLRELDGLSYEEIAAIMDCPVGTVRSRIFRAREAIDNKVQPLIRR

SEQ ID NO: 458 - DNA, 582 bp, Pseudomonas aeruginosa
  CDS (1)..(582): transl_table=11
atgctaacccaggaacaggatcagcaactggttgaacgggtacagcgcggagacaagcgggctttcgatctgctggtactgaaataccagcacaagatactgggattgatcgtgcggttcgtgcacgacgcccaggaagcccaggacgtagcgcaggaagccttcatcaaggcataccgtgcgctcggcaatttccgcggcgatagtgctttttatacctggctgtatcggatcgccatcaacaccgcgaagaaccacctggtcgctcgcgggcgtcggccaccggacagcgatgtgaccgcagaggatgcggagttcttcgagggcgaccacgccctgaaggacatcgagtcgccggaacgggcgatgttgcgggatgagatcgaggccaccgtgcaccagaccatccagcagttgcccgaggatttgcgcacggccctgaccctgcgcgagttcgaaggtttgagttacgaagatatcgccaccgtgatgcagtgtccggtggggacggtacggtcgcggatcttccgcgctcgtgaagcaatcgacaaagctctgcagcctttgttgcgagaagcctga

SEQ ID NO: 459 - protein, 193 aa, Pseudomonas aeruginosa
MLTQEQDQQLVERVQRGDKRAFDLLVLKYQHKILGLIVRFVHDAQEAQDVAQEAFIKAYRALGNFRGDSAFYTWLYRIAINTAKNHLVARGRRPPDSDVTAEDAEFFEGDHALKDIESPERAMLRDEIEATVHQTIQQLPEDLRTALTLREFEGLSYEDIATVMQCPVGTVRSRIFRAREAIDKALQPLLREA

SEQ ID NO: 460 - DNA, 564 bp, Bacillus subtilis
  CDS (1)..(564): transl_table=11
atggaaatgatgattaaaaaaagaattaaacaagtcaaaaaaggcgaccaggatgcatttgcggacatcgtagatatttacaaagataaaatttatcagctttgctaccgtatgcttggcaatgtgcatgaggcggaggatattgcacaggaagctttcatcagagcgtacgttaatatcgacagttttgatattaaccggaaattttcaacttggctttatcgaatcgcgaccaatttgaccattgaccgcattcgcaaaaagaagccggattattacctcgacgcagaggtggctggtacggaaggcttgaccatgtattctcaaatcgtcgcagatggtgttttgcctgaagatgcagttgtatcgctggagctctcaaacacgatacagcagaaaattttaaagcttcctgacaaatacagaacagtcatcgtattaaagtatattgacgaactctcattaattgaaatcggggagattctaaacattcctgtggggactgtgaaaacgcggattcacagaggcagagaggctcttagaaaacaattaagggatctttaa

SEQ ID NO: 461 - protein, 187 aa, Bacillus subtilis
MEMMIKKRIKQVKKGDQDAFADIVDIYKDKIYQLCYRMLGNVHEAEDIAQEAFIRAYVNIDSFDINRKFSTWLYRIATNLTIDRIRKKKPDYYLDAEVAGTEGLTMYSQIVADGVLPEDAVVSLELSNTIQQKILKLPDKYRTVIVLKYIDELSLIEIGEILNIPVGTVKTRIHRGREALRKQLRDL

SEQ ID NO: 462 - DNA, 22 bp, Artificial sequence
  primer
atgagcgagcagttaacggacc

SEQ ID NO: 463 - DNA, 25 bp, Artificial sequence
  primer
ttaacgcctgataagcggttgaact

SEQ ID NO: 464 - protein, 184 aa, Artificial sequence
  consensus sequence
  Variant (2)..(3): Xaa in position 2 to 3 is any amino acid
  Variant (6)..(6): Xaa in position 6 is any amino acid
  Variant (8)..(8): Xaa in position 8 is any amino acid
  Variant (10)..(10): Xaa in position 10 is any amino acid
  Variant (13)..(14): Xaa in position 13 to 14 is any amino acid
  Variant (17)..(18): Xaa in position 17 to 18 is any amino acid
  Variant (21)..(22): Xaa in position 21 to 22 is any amino acid
  Variant (24)..(25): Xaa in position 24 to 25 is any amino acid
  Variant (27)..(29): Xaa in position 27 to 29 is any amino acid
  Variant (31)..(32): Xaa in position 31 to 32 is any amino acid
  Variant (34)..(41): Xaa in position 34 to 41 is any amino acid
  Variant (42)..(42): Xaa in position 42 is any or no amino acid
  Variant (44)..(45): Xaa in position 44 to 45 is any amino acid
  Variant (48)..(48): Xaa in position 48 is any amino acid
  Variant (50)..(50): Xaa in position 50 is any amino acid
  Variant (55)..(58): Xaa in position 55 to 58 is any amino acid
  Variant (62)..(62): Xaa in position 62 is any amino acid
  Variant (64)..(64): Xaa in position 64 is any amino acid
  Variant (73)..(74): Xaa in position 73 to 74 is any amino acid
  Variant (76)..(76): Xaa in position 76 is any amino acid
  Variant (80)..(80): Xaa in position 80 is any amino acid
  Variant (82)..(83): Xaa in position 82 to 83 is any amino acid
  Variant (84)..(85): Xaa in position 84 to 85 is any or no amino acid
  Variant (87)..(106): Xaa in position 87 to 106 is any amino acid
  Variant (107)..(122): Xaa in position 107 to 122 is any or no amino acid
  Variant (125)..(141): Xaa in position 125 to 141 is any amino acid
  Variant (142)..(142): Xaa in position 142 is any or no amino acid
  Variant (145)..(149): Xaa in position 145 to 149 is any amino acid
  Variant (151)..(152): Xaa in position 151 to 152 is any amino acid
  Variant (156)..(157): Xaa in position 156 to 157 is any amino acid
  Variant (159)..(159): Xaa in position 159 is any amino acid
  Variant (163)..(163): Xaa in position 163 is any amino acid
  Variant (166)..(167): Xaa in position 166 to 167 is any amino acid
  Variant (169)..(169): Xaa in position 169 is any amino acid
  Variant (172)..(172): Xaa in position 172 is any amino acid
DXXLVXRXQXGDXXAFXXLVXXYXXKXXXLXXRXXXXXXXXXDXXQEXFXKAYRXXXXFRGXSXFYTWLYRIXXNXAKNXLXXXXRXXXXXXXXXXXXXXXXXXXXXXXXXXXXXXXXXXXXPEXXXXXXXXXXXXXXXXXXLPXXXXXAXXLREXXGXSYEXIAXXMXCPXGTVRSRIFRARE

SEQ ID NO: 465 - protein, 35 aa, Artificial sequence
  protein pattern
  Variant (2)..(2): Xaa in position 2 is Ile, Leu or Val
  Variant (3)..(3): Xaa in position 3 is Ala, Ser, Thr or Val
  Variant (5)..(5): Xaa in position 5 is Asp or Glu
  Variant (6)..(6): Xaa in position 6 is Ala, Ser, Thr or Val
  Variant (8)..(8): Xaa in position 8 is Ile, Leu or Val
  Variant (9)..(9): Xaa in position 9 is Lys or Arg
  Variant (10)..(10): Xaa in position 10 is Ala, Thr or Val
  Variant (11)..(11): Xaa in position 11 is Phe, Trp or Tyr
  Variant (12)..(13): Xaa in position 12 to 13 is any amino acid
  Variant (14)..(14): Xaa in position 14 is Ile or Leu
  Variant (15)..(16): Xaa in position 15 to 16 is any amino acid
  Variant (18)..(18): Xaa in position 18 is any amino acid
  Variant (20)..(20): Xaa in position 20 is Asp, Glu or Gln
  Variant (21)..(21): Xaa in position 21 is Ala or Ser
  Variant (22)..(22): Xaa in position 22 is any amino acid
  Variant (28)..(28): Xaa in position 28 is any amino acid
  Variant (31)..(31): Xaa in position 31 is Ala, Gly or Thr
  Variant (32)..(32): Xaa in position 32 is any amino acid
  Variant (34)..(34): Xaa in position 34 is any amino acid
  Variant (35)..(35): Xaa in position 35 is Ala or Cys
DXXQXXFXXXXXXXXXFXGXXXFYTWLXRIXXNXX

SEQ ID NO: 466 - protein, 50 aa, Artificial sequence
  protein pattern
  Variant (2)..(3): Xaa in position 2 to 3 is any amino acid
  Variant (4)..(4): Xaa in position 4 is Asp, Glu or Thr
  Variant (5)..(5): Xaa in position 5 is any amino acid
  Variant (6)..(6): Xaa in position 6 is Lys or Arg
  Variant (7)..(7): Xaa in position 7 is any amino acid
  Variant (9)..(9): Xaa in position 9 is Phe, Ile, Leu, Met or Val
  Variant (10)..(10): Xaa in position 10 is any amino acid
  Variant (13)..(14): Xaa in position 13 to 14 is any or no amino acid
  Variant (16)..(17): Xaa in position 16 to 17 is any or no amino acid
  Variant (19)..(19): Xaa in position 19 is any amino acid
  Variant (20)..(20): Xaa in position 20 is Asn, Ser or Thr
  Variant (22)..(23): Xaa in position 22 to 23 is Asp or Glu
  Variant (25)..(25): Xaa in position 25 is Ala or Ser
  Variant (26)..(27): Xaa in position 26 to 27 is any amino acid
  Variant (28)..(28): Xaa in position 28 is Leu or Met
  Variant (29)..(29): Xaa in position 29 is any amino acid
  Variant (30)..(30): Xaa in position 30 is Cys or Val
  Variant (31)..(31): Xaa in position 31 is Asn, Pro or Ser
  Variant (32)..(32): Xaa in position 32 is Ile, Leu or Val
  Variant (36)..(36): Xaa in position 36 is Lys or Arg
  Variant (39)..(39): Xaa in position 39 is Ile or Leu
  Variant (40)..(40): Xaa in position 40 is any amino acid
  Variant (42)..(42): Xaa in position 42 is Ala or Gly
  Variant (44)..(44): Xaa in position 44 is Asp, Glu, Asn or Gln
  Variant (45)..(45): Xaa in position 45 is any amino acid
  Variant (46)..(46): Xaa in position 46 is Ile, Leu, Met or Val
  Variant (47)..(49): Xaa in position 47 to 49 is any amino acid
  Variant (50)..(50): Xaa in position 50 is Ile, Leu or Val
LXXXXXXAXXLRXXEXXGXXYXXIXXXXXXXXGTVXSRXXRXRXXXXXXX

SEQ ID NO: 467 - protein, 32 aa, Artificial sequence
  protein pattern
  Variant (2)..(8): Xaa in position 2 to 8 is any amino acid
  Variant (9)..(10): Xaa in position 9 to 10 is any or no amino acid
  Variant (12)..(12): Xaa in position 12 is any or no amino acid
  Variant (14)..(14): Xaa in position 14 is Asp or Glu
  Variant (15)..(16): Xaa in position 15 to 16 is any amino acid
  Variant (17)..(17): Xaa in position 17 is Ala or Ser
  Variant (18)..(18): Xaa in position 18 is Phe or Tyr
  Variant (19)..(19): Xaa in position 19 is Asp, Glu, Gly or Asn
  Variant (20)..(20): Xaa in position 20 is any amino acid
  Variant (23)..(23): Xaa in position 23 is any amino acid
  Variant (24)..(24): Xaa in position 24 is Lys or Arg
  Variant (26)..(27): Xaa in position 26 to 27 is any amino acid
  Variant (28)..(28): Xaa in position 28 is Lys or Arg
  Variant (29)..(31): Xaa in position 29 to 31 is any amino acid
  Variant (32)..(32): Xaa in position 32 is Ile, Leu, Met or Val
DXXXXXXXXXQXGXXXXXXXLVXXYXXXXXXX

SEQ ID NO: 468 - DNA, 1122 bp, Escherichia coli
  CDS (1)..(1122): transl_table=11
atggttgctgaattgaccgcattacgcgatcaaattgatgaagtcgataaagcgctgctgaatttattagcgaagcgtctggaactggttgctgaagtgggcgaggtgaaaagccgctttggactgcctatttatgttccggagcgcgaggcatctatgttggcctcgcgtcgtgcagaggcggaagctctgggtgtaccgccagatctgattgaggatgttttgcgtcgggtgatgcgtgaatcttactccagtgaaaacgacaaaggatttaaaacactttgtccgtcactgcgtccggtggttatcgtcggcggtggcggtcagatgggacgcctgttcgagaagatgctgaccctctcgggttatcaggtgcggattctggagcaacatgactgggatcgagcggctgatattgttgccgatgccggaatggtgattgttagtgtgccaatccacgttactgagcaagttattggcaaattaccgcctttaccgaaagattgtattctggtcgatctggcatcagtgaaaaatgggccattacaggccatgctggtggcgcatgatggtccggtgctggggctacacccgatgttcggtccggacagcggtagcctggcaaagcaagttgtggtctggtgtgatggacgtaaaccggaagcataccaatggtttctggagcaaattcaggtctggggcgctcggctgcatcgtattagcgccgtcgagcacgatcagaatatggcgtttattcaggcactgcgccactttgctacttttgcttacgggctgcacctggcagaagaaaatgttcagcttgagcaacttctggcgctctcttcgccgatttaccgccttgagctggcgatggtcgggcgactgtttgctcaggatccgcagctttatgccgacatcattatgtcgtcagagcgtaatctggcgttaatcaaacgttactataagcgtttcggcgaggcgattgagttgctggagcagggcgataagcaggcgtttattgacagtttccgcaaggtggagcactggttcggcgattacgcacagcgttttcagagtgaaagccgcgtgttattgcgtcaggcgaatgacaatcgccagtaa

SEQ ID NO: 469 - protein, 373 aa, Escherichia coli
MVAELTALRDQIDEVDKALLNLLAKRLELVAEVGEVKSRFGLPIYVPEREASMLASRRAEAEALGVPPDLIEDVLRRVMRESYSSENDKGFKTLCPSLRPVVIVGGGGQMGRLFEKMLTLSGYQVRILEQHDWDRAADIVADAGMVIVSVPIHVTEQVIGKLPPLPKDCILVDLASVKNGPLQAMLVAHDGPVLGLHPMFGPDSGSLAKQVVVWCDGRKPEAYQWFLEQIQVWGARLHRISAVEHDQNMAFIQALRHFATFAYGLHLAEENVQLEQLLALSSPIYRLELAMVGRLFAQDPQLYADIIMSSERNLALIKRYYKRFGEAIELLEQGDKQAFIDSFRKVEHWFGDYAQRFQSESRVLLRQANDNRQ

SEQ ID NO: 470 - DNA, 1125 bp, Proteus mirabilis
  CDS (1)..(1125): transl_table=11
atggctgaagaattacaaaatttgcgagagcaaattgatcaggtggataaaacattgctttctttactcgccaaaagaatgcaattggtagcagaagtgggagaagttaaaaatcgccacgggttacctatctatgcaccagatagagaagccgcaatgcttgcttctcgacgtaatgaagcagaaaaaatgggtatttctgctgatttaattgaagatgttttacgtcgagtaatgagagagtcatatagcaaagaaaatgataaaggctttaaaacacttaatccccaattaggcaaaattgtcattgtgggggggaacggaaaaatggggagacttttttctcgtctctttacactttctggctatcaagtggaaagtcttgaagcggatgagtggcaaagtaaatctccggctatttttgcggatgctggtatggtgataatcagtgtcccaatccatttaacggttgatgttattgagcaattaccgcccttgccagaaaattgtttattggtagatttagcctcaatcaagcaagcgcctttagaggcgatgttaaaagcacataatggccctgttttaggactacatccaatgtttggtccagatgtgccaagtttagcaaaacaagttatcgcttattgtgaagggcgagatttatcacattttgagtggttgcttgagcaacttatggtgtggggagcaagagtagaggctattactgcacaagagcacgataaaaatatgagttttatccaagcattgcgacattttactacttttgcatatgggcaacatttggtgaaagagaatgtcgatttagccagtttattaagattatcttctcccatctatcgtttagagctagcgatgattggtaggctctttgctcaagatccacaattatatgccgatattattttatcttcacaagaaaacattaacttgatccgtagatatcatcattcattaggtgaagctatagccttattagatataaacacaaaagatgaatttattggctcatttaataatgtaagtgattggttcggtgattatgcttcacaatttatgaaagagagtggtgcgttattacaaaaagccaatgatagccggatttag

SEQ ID NO: 471 - protein, 374 aa, Proteus mirabilis
MAEELQNLREQIDQVDKTLLSLLAKRMQLVAEVGEVKNRHGLPIYAPDREAAMLASRRNEAEKMGISADLIEDVLRRVMRESYSKENDKGFKTLNPQLGKIVIVGGNGKMGRLFSRLFTLSGYQVESLEADEWQSKSPAIFADAGMVIISVPIHLTVDVIEQLPPLPENCLLVDLASIKQAPLEAMLKAHNGPVLGLHPMFGPDVPSLAKQVIAYCEGRDLSHFEWLLEQLMVWGARVEAITAQEHDKNMSFIQALRHFTTFAYGQHLVKENVDLASLLRLSSPIYRLELAMIGRLFAQDPQLYADIILSSQENINLIRRYHHSLGEAIALLDINTKDEFIGSFNNVSDWFGDYASQFMKESGALLQKANDSRI

SEQ ID NO: 472 - DNA, 1122 bp, Klebsiella pneumoniae subsp. pneumoniae MGH 78578
  CDS (1)..(1122): transl_table=11
atggttgctgaactgaccgcgttacgcgatcaaattgatgaagtggataaagcgttgcttagcctgctggctaagcgtctggagctggtggccgaagtcggcgaggtgaagagccagtatggcctgccgatttacgtcccggagcgcgagtcggcgatgctcgcctcccgacgtgaagaggcggctgcgctcggcgtaccaccggatctgatcgaggacgttctgcgtcgcgtgatgcgggaatcctattccagcgaaaacgacaaaggcttcaaaaccctgcagccgaatctgcggccggtggtgatcgtcggcggcggtgggcagatggggcgtctgtttgagaagatgttaacgctgtccggctaccaggtgcgtattctggaaaaaaacgattgggcccgggcggcggatatcgtcgccgatgccggcatggttatcgtcagcgtaccgattcacaccaccgtggagacgatcggcaggctgccgccccttccggcggattgcattctggttgaccttgcctcggtgaaagcggagccgctgcaggcgatgctggcggcgcatcagggcccggttcttggcctgcacccgatgttcggtccggacagcggcagcctggcgaagcaggtggtggtctattgtgatggccgccagccggaggcctatcagtggttcctcgaacaaatccaggtttggggcgcgcggctgcaccgcatcagcgccgttgagcacgatcagaacatggcctttattcaggcgctgcgccactttgccaccttcgcctatggcctgcacctggcggaagagaatgtacgtcttgagcaactgctggcgctctcgtcacccatttaccgactggagctggcgatggtaggccgtctgtttgcccaggatccgcagctgtacgccgatattattatgtcatcggaaaacaacctggcgctgattaagcgctactaccagcgtttcggcgaagcgatcggcctgctggagcagggcgataagcaggcgtttatcgacagcttccgtaaagtcgaacactggtttggcgattacgctcagcgtttccagagcgagagccgcacgctgctgcgtcaggcgaacgataatcggcagtaa

SEQ ID NO: 473 - protein, 373 aa, Klebsiella pneumoniae subsp. pneumoniae MGH 78578
MVAELTALRDQIDEVDKALLSLLAKRLELVAEVGEVKSQYGLPIYVPERESAMLASRREEAAALGVPPDLIEDVLRRVMRESYSSENDKGFKTLQPNLRPVVIVGGGGQMGRLFEKMLTLSGYQVRILEKNDWARAADIVADAGMVIVSVPIHTTVETIGRLPPLPADCILVDLASVKAEPLQAMLAAHQGPVLGLHPMFGPDSGSLAKQVVVYCDGRQPEAYQWFLEQIQVWGARLHRISAVEHDQNMAFIQALRHFATFAYGLHLAEENVRLEQLLALSSPIYRLELAMVGRLFAQDPQLYADIIMSSENNLALIKRYYQRFGEAIGLLEQGDKQAFIDSFRKVEHWFGDYAQRFQSESRTLLRQANDNRQ

SEQ ID NO: 474 - DNA, 1128 bp, Vibrio cholerae O1 biovar eltor str. N16961
  CDS (1)..(1128): transl_table=11
atggccgtagagttgaatcagttacgcgaccaaatcgatgaagtcgataagcagatggtggagctactggcgcgccgtctggcattggtggagcaggtcgggcaagtgaaaagtcgatatgggttaccgatttatgctcccgatcgtgaagcggcaatgctcgcttcacgtcgagcggaagcggaaagcaaaggtgttccgccccaactgattgaagatattttgcgccgaaccatgcgtgaatcctacgccagtgaaaaggactccggctttaaatgccttaatcctgagttacgttccgtggtgatcgtcggtggtaacggtcagcttgggcgactatttggccgtatgtttaaactctctggctatcaagtcaaagtgctgggcagccaagattgggacaaagcggatgaactgctcagtgatgctggcttagtggtggtcacggtacctatccatttgacgctcggtgttatcgaaaagctgcgccagttaccggacgattgcattttgtgcgatctcacctcaatcaaagccaagccgcttgccgccatgctacaagtgcacaaaggtccagtggttgggctgcaccctatgtttggtccagacgttccaagcttggcgaagcaggtgattgtttactgtgatggtcgaggcaatgaacactaccaatggctcttgcaacagtttgctatttggggcgcaagcttgtgccagattgatgcggatgaacatgatcgtggtatgacacttattcaagcactgcgccacttcacttcctttgcttatggcttgcatctgaccaaagagaacccgaacttggcacaactgctgaaactcagttcaccgatttaccgtttagagcttgccatggtcggacggctatttgggcaagatccccatctgtacggcgatattattctctcatcaccagaaaatattgagatgatccagcgttttcatcgctgcttaagcgatgcggttgagttggtgagcgcgggcgataaggcgagttttgtggctcaatttgaacgagttagccagtggtttggtgattattcacagcagtttatgcatgagagccaaaacttgctcaaacaagcgaatgatgcgatccacagaggttaa

SEQ ID NO: 475 - protein, 375 aa, Vibrio cholerae O1 biovar eltor str. N16961
MAVELNQLRDQIDEVDKQMVELLARRLALVEQVGQVKSRYGLPIYAPDREAAMLASRRAEAESKGVPPQLIEDILRRTMRESYASEKDSGFKCLNPELRSVVIVGGNGQLGRLFGRMFKLSGYQVKVLGSQDWDKADELLSDAGLVVVTVPIHLTLGVIEKLRQLPDDCILCDLTSIKAKPLAAMLQVHKGPVVGLHPMFGPDVPSLAKQVIVYCDGRGNEHYQWLLQQFAIWGASLCQIDADEHDRGMTLIQALRHFTSFAYGLHLTKENPNLAQLLKLSSPIYRLELAMVGRLFGQDPHLYGDIILSSPENIEMIQRFHRCLSDAVELVSAGDKASFVAQFERVSQWFGDYSQQFMHESQNLLKQANDAIHRG

SEQ ID NO: 476 - DNA, 1125 bp, Pasteurella multocida subsp. multocida str. Pm70
  CDS (1)..(1125): transl_table=11
gtggatacgttaaataagttaagaacacagattgatcaagttgatcgtcagttattacagcttttagcacagcgacttgagttagtgaaacaagtcggtgaagtcaagcatcaacaaggtctgccgatttatgtgccagaacgtgaagcggagatgctcaacgcccgccgtgcggaagctgaaacgttaggggtatctgctgatttaattgaagatgtattacgtcgtatcatgcgagaatcttatgcgcgggaaaaccaatttggttttaaaaccgtgaatccggcgatcaaaaaaatcgtgatcgtaggtgggggagggaaacttggtagcttgtttgcacgttatttcacattgtctggttactatgttgagattttagagcaacaggattggcaaagtgcggacaagattttgaacgaaacagatgtgattgttgtttcggtaccgatcgccaaaaccgtcgaaacaattaaacgtttgaagccttatttgacagataatatgctgttggtggatttaacttcagttaagcgtgcaccattacaagcgatgttagacgtgcacgctggcgcggtattaggtttacatccaatgtttggtccggatatcgccagcatggcaaaacaagtgattgtacgctgtgatggtcgttttgaatcacgttatcaatggctgatcacccaaatacaaatttggggggcaaaattctaccaagttgaggcgactgaacacgatcatagtatgacgtatgtacaagcgttgcgacacttttccacttttgctaatggcttacatttatcaaaacaaccggttcaattagcgaatttattggcactttcttcgccaatttattgcttagaattggcgatgattgggcgtttatttgcgcaagatgcagaactttatgccgatattattttagataagcctgaaaatctcgcggtcattgagagtttaaagcaaagttatgaagaaagtttggcattttttacccatggtgataagcaggcattcattgacagctttgaacaagttaaacaatggtttggtgaatactcggagcagtttctgaaagaaagtcgccagttgctccaacaagcaaatgattatcgacaaatttaa

SEQ ID NO: 477 - protein, 374 aa, Pasteurella multocida subsp. multocida str. Pm70
MDTLNKLRTQIDQVDRQLLQLLAQRLELVKQVGEVKHQQGLPIYVPEREAEMLNARRAEAETLGVSADLIEDVLRRIMRESYARENQFGFKTVNPAIKKIVIVGGGGKLGSLFARYFTLSGYYVEILEQQDWQSADKILNETDVIVVSVPIAKTVETIKRLKPYLTDNMLLVDLTSVKRAPLQAMLDVHAGAVLGLHPMFGPDIASMAKQVIVRCDGRFESRYQWLITQIQIWGAKFYQVEATEHDHSMTYVQALRHFSTFANGLHLSKQPVQLANLLALSSPIYCLELAMIGRLFAQDAELYADIILDKPENLAVIESLKQSYEESLAFFTHGDKQAFIDSFEQVKQWFGEYSEQFLKESRQLLQQANDYRQI

SEQ ID NO: 478 - DNA, 1122 bp, Escherichia coli O157:H7 EDL933
  CDS (1)..(1122): transl_table=11
atggttgctgaattgaccgcattacgcgatcaaattgatgaagtcgataaagcgctgctgaatttattagcgaagcgtctggaactggttgctgaagtgggcgaggtgaaaagccgctttggactgcctatttatgttccggagcgagaggcatctatgttggcctcgcgtcgtgcagaggcggaagctctgggtgtaccgccagatctgattgaggatgttttgcgtcgggtgatgcgtgaatcttactccagtgaaaacgacaaaggatttaaaacgctttgtcctgcgttacgcccggtagttatcgttggcggcggcggtcagatgggacgtctgttcgagaagatgctgacactctcgggttatcaggtgcggattctggagcaacatgactgggatcgagcggctgatattgttgccgatgccggaatggtgattgttagtgtgccaatccacgttactgagcaagttattggcaaattaccgcctttaccgaaagattgtattctggttgatctggcatcagtgaaaaatggaccattacaggccatgctggcggcgcacgatggcccggtactggggttacacccaatgttcggtccggacagcggtagcctggcaaagcaagttgtggtctggtgtgatggacgtaaaccggaagcataccaatggtttctggagcaaattcaggtctggggcgctcggttgcatcgtattagcgccgtcgagcacgatcagaatatggcgtttattcaggcactgcgccactttgctacttttgcttacgggctgcacctggcagaagaaaatgttcagcttgagcaacttctggcgctctcttcgccgatttaccgccttgagctggcgatggtcgggcgactgttcgctcaggatccgcagctttatgccgacattattatgtcgtcagagcgtaatctggcgttaatcaaacgttactataagcgtttcggcgaggcgattgagttgctggagcagggcgataagcaggcgtttattgacagtttccgcaaggtggagcactggttcggcgattacgcacagcgttttcagagtgaaagccgcgtgttattgcgtcaggcgaatgacaatcgccagtaa

SEQ ID NO: 479 - protein, 373 aa, Escherichia coli O157:H7 EDL933
MVAELTALRDQIDEVDKALLNLLAKRLELVAEVGEVKSRFGLPIYVPEREASMLASRRAEAEALGVPPDLIEDVLRRVMRESYSSENDKGFKTLCPALRPVVIVGGGGQMGRLFEKMLTLSGYQVRILEQHDWDRAADIVADAGMVIVSVPIHVTEQVIGKLPPLPKDCILVDLASVKNGPLQAMLAAHDGPVLGLHPMFGPDSGSLAKQVVVWCDGRKPEAYQWFLEQIQVWGARLHRISAVEHDQNMAFIQALRHFATFAYGLHLAEENVQLEQLLALSSPIYRLELAMVGRLFAQDPQLYADIIMSSERNLALIKRYYKRFGEAIELLEQGDKQAFIDSFRKVEHWFGDYAQRFQSESRVLLRQANDNRQ

SEQ ID NO: 480 - DNA, 1122 bp, Salmonella typhimurium LT2
  CDS (1)..(1122): transl_table=11
atggttgctgaattgaccgcattacgcgatcaaatagatgatgtcgataaagcgttgttgaatttactggctaagcgcctggaactggttgccaaagtcggcgaggtgaaaagccgttttggcctgcctatttacgtgccggagcgtgaggcctctatgctggcttcacgacgggcggaagcagaagcgatcggtgtcccgcccgatctcattgaagatgtcctgcgccgggtaatgcgtgaatcttactccagcgaaaatgataaggggttcaaaacgctttgtccttctctgcgtccggtcgtcattgtgggcggcggcggacagatggggcgtctgtttgaaaaaatgctcacgctgtcgggctatcaggtccgtattctggaacagcaggactggccgcgcgccagggacattgtcgccgatgccggaatggtgatcgtcagcgtgccgattcatgttactgaacaggtcatagcgcaactgccgcccctgccgtccgactgtattctggtcgatctggcatcggtgaaaagcggtccgttgcaggcaatgttggcggcccatgatggccccgtgttgggcttgcatccgatgtttggtccggacagcgggagcctggcgaagcaggtggtggtctggtgtgacgggcgtcaaccggaagcgtatcagtggttccttgagcaaatccaggtgtggggcgcgcggttgcatcgaattagcgctgtcgagcacgatcagaacatggcttttatccaggcgttgcgccactttgctaccttcgcttatgggctgcatctggcggaagagaacgtccagcttgagcagcttctggcgctatcatcgccgatttatcgactggagctggcgatggtcgggcgtctgttcgcccaggacccgcaactgtatgcggacattattatgtcgtcggagcgcaatctggcgcttatcaagcgttactataaacgttttggcgatgcgatcgggttactggaacagggtgataagcaggcttttatcgacagttttcgcaaagttgaacactggtttggcgattatgccagacgcttccagaatgaaagccgtgtgttattgcgtcaggcgaatgacagccgaccataa

SEQ ID NO: 481 - protein, 373 aa, Salmonella typhimurium LT2
MVAELTALRDQIDDVDKALLNLLAKRLELVAKVGEVKSRFGLPIYVPEREASMLASRRAEAEAIGVPPDLIEDVLRRVMRESYSSENDKGFKTLCPSLRPVVIVGGGGQMGRLFEKMLTLSGYQVRILEQQDWPRARDIVADAGMVIVSVPIHVTEQVIAQLPPLPSDCILVDLASVKSGPLQAMLAAHDGPVLGLHPMFGPDSGSLAKQVVVWCDGRQPEAYQWFLEQIQVWGARLHRISAVEHDQNMAFIQALRHFATFAYGLHLAEENVQLEQLLALSSPIYRLELAMVGRLFAQDPQLYADIIMSSERNLALIKRYYKRFGDAIGLLEQGDKQAFIDSFRKVEHWFGDYARRFQNESRVLLRQANDSRP

SEQ ID NO: 482 - DNA, 1122 bp, Shigella flexneri 2a str. 301
  CDS (1)..(1122): transl_table=11
atggttgctgaattgaccgcattacgcgatcaaattgatgaagtcgataaagcgctgctgaatttattagcgaagcgtctggaactggttgctgaagtgggcaaggtgaaaagccgctttggactgcctatttatgttccggagcgcgaggcatctatgttggcctcgcgtcgtgcagaggcggaagctctgggtgtaccgccagatctgattgaggatgttttgcgtcgggtgatgcgtgaatcttactccagtgaaaacgacaaaggatttaaaacactttgtccgtcactgcgtccggtggttatcgtcggcggtggcggtcagatgggacgcctgttcgagaagatgctgacactatcgggttatcaggtgcggattctggagcaacatgactgggatcgagcggctgatattgttgccgatgccggaatggtgattgttagtgtgccaatccacgttactgagcaagttatcggcaaattaccgcctttaccgaaagattgtattctggttgatctggcatcagtgaaaaatggaccattacaggccatgctggcggcgcacgatggcccggtactggggttacacccgatgttcggcccggacagcggtagcctggcaaagcaagttgtggtctggtgtgatggacgtaagccggaagcataccaatggtttctggagcaaattcaggtctggggcgctcggttgcatcgtattagcgctgtcgagcacgatcagaatatggcgtttattcaggctctgcgccactttgctacttttgcttacgggctgcacctggcagaagaaaatgttcagcttgagcaacttctggcgctctcttcgccgatttaccgccttgagctggcgatggtcgggcgactgtttgctcaggatccgcagctttatgccgacatcattatgtcgtcagagcgtaatctggcgttaatcaaacgttactataagcgtttcggcgaggcgattgagttgctggagcagggcgataagcaggcgtttattgacagtttccgcaaggtggagcactggttcggcgattacgcacagcgttttcagagtgaaagccgcgtgttattgcgtcaggcgaatgacaatcgccagtaa

SEQ ID NO: 483 - protein, 373 aa, Shigella flexneri 2a str. 301
MVAELTALRDQIDEVDKALLNLLAKRLELVAEVGKVKSRFGLPIYVPEREASMLASRRAEAEALGVPPDLIEDVLRRVMRESYSSENDKGFKTLCPSLRPVVIVGGGGQMGRLFEKMLTLSGYQVRILEQHDWDRAADIVADAGMVIVSVPIHVTEQVIGKLPPLPKDCILVDLASVKNGPLQAMLAAHDGPVLGLHPMFGPDSGSLAKQVVVWCDGRKPEAYQWFLEQIQVWGARLHRISAVEHDQNMAFIQALRHFATFAYGLHLAEENVQLEQLLALSSPIYRLELAMVGRLFAQDPQLYADIIMSSERNLALIKRYYKRFGEAIELLEQGDKQAFIDSFRKVEHWFGDYAQRFQSESRVLLRQANDNRQ

SEQ ID NO: 484 - DNA, 1140 bp, Shewanella oneidensis MR-1
  CDS (1)..(1140): transl_table=11
atgaatgaaaaaaccacatccgaattagaacatcttcgaggactgatcgacggtgtcgatcagcaattgctgcatttactgcgtaaacgcttagatttagtcgcccaagtcggcacggtaaagcacgctgcaggattacccatttatgcaccacagcgtgaagcggcaatgctggcaaaacgccgtgaagaagcccaaaccatgggcattgcgccacaattgattgaagatattttacgtcgcctaatgcgtgaatcctatcttaatgaaaaggatgttggctttaagcaagtcaagaatgatttaggttcggtagttatagtgggcggtaaaggccagcttggcgggctgtttcaacaaatgctgagactgtcaggttatcaagtgaaagtgctcgataaagatgattggcaacaagcggaatgcttatttgccgatgctggattggtattagtgacagtgcctattgccatcacctgcgacattatccgtgaaaagctaactcagttaccacgggactgtattctagccgatttaacctccatcaagacggaacccatgcaggcgatgttggccgctcataaggggcctgttgtcggctttcatccgatgtttggtccagatgtcggtagcttagctaagcaggttgtggtggtgtgtcatgggcgcgaagctgataaataccaatggttactcgaacaaattgccatttggggcgcacggattgtcgaagctgagcctgaatgtcacgataatgcgatgcaactggtgcaggcgatgcgccatttctcaacctttgtctatggcttaaatctttgcaaagaagaggcggatatagagactttattgaaatttagctcgccaatctaccgcttagagttagcgatggtgggccgtttatttgcccaaagcccggagctttacgctgatattatttttgctcagcaggagagccagcatgcgattggcgattatctggataactatcgcgaagccttagaattgctgaaacggggcgatagagaggagtttatcaatcagttccaaatggttgccaagtggtttggtgattttgcaccgcagtttcagcgcgaaagtcgcatgatgctgcaatcggtaagtgatatgaaaacgaactga

SEQ ID NO: 485 - protein, 379 aa, Shewanella oneidensis MR-1
MNEKTTSELEHLRGLIDGVDQQLLHLLRKRLDLVAQVGTVKHAAGLPIYAPQREAAMLAKRREEAQTMGIAPQLIEDILRRLMRESYLNEKDVGFKQVKNDLGSVVIVGGKGQLGGLFQQMLRLSGYQVKVLDKDDWQQAECLFADAGLVLVTVPIAITCDIIREKLTQLPRDCILADLTSIKTEPMQAMLAAHKGPVVGFHPMFGPDVGSLAKQVVVVCHGREADKYQWLLEQIAIWGARIVEAEPECHDNAMQLVQAMRHFSTFVYGLNLCKEEADIETLLKFSSPIYRLELAMVGRLFAQSPELYADIIFAQQESQHAIGDYLDNYREALELLKRGDREEFINQFQMVAKWFGDFAPQFQRESRMMLQSVSDMKTN

SEQ ID NO: 486 - DNA, 1128 bp, Vibrio vulnificus CMCP6
  CDS (1)..(1128): transl_table=11
atggcagttgaactgaacgcattgcgtgaacagattgatgcagtagacaaacagatgttggagctattggctcagcgcttggcattggtagagcaagttggccatgtgaaaagccaacatggcttaccgatttatgcacccgatagagaagcggcgatgctggcttctcgtcgtgcagaagccgaaaaaatcggtgtgccaccacagcttattgaagatattttgcgacgtaccatgcgcgaatcttatgccagtgaaaaagactccggttttaaatgtttgaatcctgagctgcgctctgtggtaattattggcggccatggtcaattaggtggcctgtttgctcgcatgtttaccctctcgggttaccaggtcaaaatcttaggcagtaaggattggcacctcgctgatgagatattggatggggcaggattggtggtggttaccgtgccgattcatttaacccaaggagtgattgaaaagctgacccaactaccatcggattgcatcttgtgtgaccttacttcgatcaagtcgaagccgctgaaaaccatgctcgatgtgcactctgggccggttgttggtttgcaccctatgtttggtcccgatgtgccgagtttagccaagcaagtgattgtctactgtgatggtcgaggtgctgagcaatatcagtggttactgcagcagtttaagatttggggggcaagcttgtgccaaattgaggccagcgaacacgaccatggcatgacgttaattcaagcgttaaggcactttacgtcctttgcgtacggcatgcatttgagtcaggaaaatccaagtctcgataaactgctgaaactgagctcgcctatttaccgtcttgagttagcgatggtagggcgtctgtttgcccaagatccaaacttgtatggcgacattattctttcgtcgcaagagaacatcgacatgatcaagcgtttccatcgccgctttggcgaggcactagagatgttagatcagcacgataaagcgcgttttgttgaacgtttcacgcaagtgagtgattggtttggggggtattcgcagcagtttatggcggaaagccaaaatttactcaaacaagcgaatgacaacttgcatcgtgattaa

SEQ ID NO: 487 - protein, 375 aa, Vibrio vulnificus CMCP6
MAVELNALREQIDAVDKQMLELLAQRLALVEQVGHVKSQHGLPIYAPDREAAMLASRRAEAEKIGVPPQLIEDILRRTMRESYASEKDSGFKCLNPELRSVVIIGGHGQLGGLFARMFTLSGYQVKILGSKDWHLADEILDGAGLVVVTVPIHLTQGVIEKLTQLPSDCILCDLTSIKSKPLKTMLDVHSGPVVGLHPMFGPDVPSLAKQVIVYCDGRGAEQYQWLLQQFKIWGASLCQIEASEHDHGMTLIQALRHFTSFAYGMHLSQENPSLDKLLKLSSPIYRLELAMVGRLFAQDPNLYGDIILSSQENIDMIKRFHRRFGEALEMLDQHDKARFVERFTQVSDWFGGYSQQFMAESQNLLKQANDNLHRD

SEQ ID NO: 488 - DNA, 1128 bp, Vibrio parahaemolyticus RIMD 2210633
  CDS (1)..(1128): transl_table=11
atggcagttgaacttaacgcattgcgcgatcagattgatgcagtcgacaaacaaatgcttgagcttttggctcagcgtttagagctggtagaaaaagttggggaagtaaaaagtgaacacggtttgcctatttacgcccctgatcgtgaagcggcgatgctggcgtctcgccgagcagaagctgagaaaatgggtgtcccacctcagcttatcgaagacattcttcgtcgtaccatgcgtgagtcttatgccagtgagaaagattccggttttaagtgtttgaacccagaattacgttcagtggtcattattggtggtaatggccagttaggcggtctgtttggccgcatgttcaagctatcaggttaccaagtgaaagttttgggtagcaaagattggggtcgtgcggatgagattctcaaagacgcaggcttagtggttgtcaccgtaccgattcacctgacggaaggggtgattgaaaaactgggcaacttgccacaagactgcattctgtgtgacctgacgtctatcaagtcaaagccgctgcaagcgatgttgaatgtgcacgctggacctgtggttggtttacacccgatgttcggccctgatgttcctagccttgccaagcaggtgattgtttactgtgatggacgtggtaaagagcaataccaatggttgttgcaacagtttggtatttggggcgcgagcttgtgtcagattgatgcgcaagagcacgatcatggcatgacgttaatccaagcgctgcgccacttcacgtcatttgcttacggaatgcaccttagcaaagagaacccgaatattgagcaactgttgaaactgagctcgccaatctaccgtcttgaattggcaatggtggggcgtctgtttggtcaggatccaaatctctacggtgacatcattctcgcatcgcaagagaacatcgatatgatcaagcgtttccatcaacgctttggggaagcgcttgcgattttagacagcaaagacaaggctaaatttgtagaaagttttgagcaggtgagtgattggtttggccaatactctcagcaatttatgaacgagagccaaaacttactgaaacaggcgaatgacaatatccatcgtggataa

SEQ ID NO: 489 - protein, 375 aa, Vibrio parahaemolyticus RIMD 2210633
MAVELNALRDQIDAVDKQMLELLAQRLELVEKVGEVKSEHGLPIYAPDREAAMLASRRAEAEKMGVPPQLIEDILRRTMRESYASEKDSGFKCLNPELRSVVIIGGNGQLGGLFGRMFKLSGYQVKVLGSKDWGRADEILKDAGLVVVTVPIHLTEGVIEKLGNLPQDCILCDLTSIKSKPLQAMLNVHAGPVVGLHPMFGPDVPSLAKQVIVYCDGRGKEQYQWLLQQFGIWGASLCQIDAQEHDHGMTLIQALRHFTSFAYGMHLSKENPNIEQLLKLSSPIYRLELAMVGRLFGQDPNLYGDIILASQENIDMIKRFHQRFGEALAILDSKDKAKFVESFEQVSDWFGQYSQQFMNESQNLLKQANDNIHRG

SEQ ID NO: 490 - DNA, 1134 bp, Candidatus Blochmannia floridanus
  CDS (1)..(1134): transl_table=11
atgatggatagattaaattttttacgtagtgaaattgataaaatagatcaaagtttgttaaatttattatctaaaagattatcattagtttctcaggtaggtgaaattaaaagtcaacttggtttatttatttatgatccggaaagagaaaagatgattttatctcaaagaaaacaggaagcattaaaattaggtatttctcctaatttggtcagagatatattacgtcgaattatgcgagagtcttattcttatgaaaatgaaaaaggatttaaaaagttatatccaagttctaggccagtggtgattattgggggtaatggccgaatgggacaatttttctttaaaatgttaactttatcaggatatcaagtaagaattttagatcaagatgattggatacatgctaagtctatattaactaatgttggtgtagtgtttattagtgtacctatttattcggtaatcaaagtaattaatcaattacctcatttatcgaatgattgtattatcgtggatttgtcttctgtaaaaaagagttctttaacagctatattaaagattcatactggaccagttttaggattacatccaatgtttagtccggatactactattaccgctagtatgataaaaaaagttgtaatttgttgtgacggtcgttatcctcaagaatatcaatggttattgcagcagttaaaattatggggagcaaaagtatattattgtaattttattgaacatgataagtatatgagttttatacaaagtttatgtcattttacaatttttgttatgggatatcatttgtttaaagaaaatattgatttaaaaaaaattttatctttttcttccccaatgtttcaattggaattaatattaataggccgattatttacacaaaatcctcaattatatgcagatattattatgtcatctaaaaataatattattgtaattaagcgttattataaaagattaggaaaaatgttaatgttattggaacaaaataataaagaagaatttataaatcaatttaaaaaaattaaatgttggttagatagttatgctggtatttttttaaaagatagctcaaatttattaaaatatattaatgatattcaggaatattaa

SEQ ID NO: 491 - protein, 377 aa, Candidatus Blochmannia floridanus
MMDRLNFLRSEIDKIDQSLLNLLSKRLSLVSQVGEIKSQLGLFIYDPEREKMILSQRKQEALKLGISPNLVRDILRRIMRESYSYENEKGFKKLYPSSRPVVIIGGNGRMGQFFFKMLTLSGYQVRILDQDDWIHAKSILTNVGVVFISVPIYSVIKVINQLPHLSNDCIIVDLSSVKKSSLTAILKIHTGPVLGLHPMFSPDTTITASMIKKVVICCDGRYPQEYQWLLQQLKLWGAKVYYCNFIEHDKYMSFIQSLCHFTIFVMGYHLFKENIDLKKILSFSSPMFQLELILIGRLFTQNPQLYADIIMSSKNNIIVIKRYYKRLGKMLMLLEQNNKEEFINQFKKIKCWLDSYAGIFLKDSSNLLKYINDIQEY

SEQ ID NO: 492 - DNA, 1128 bp, Vibrio vulnificus YJ016
  CDS (1)..(1128): transl_table=11
atggcagttgaactgaacgcattgcgtgaacagattgatgcagtagacaaacagatgttggcgctattggctcagcgcttggcattggtagagcaagttggccatgtgaaaagccaacatggcttaccgatttatgcacccgatagagaagcggcgatgctggcctctcgtcgtgcagaagccgaaaaaatcggcgtacctccacagctcattgaggacattttgcgccgaaccatgcgtgaatcttatgccagtgagaaagattctgggtttaaatgtctcaatccggacttgcgttctgtggtgatcattggtggtcatggccagttgggtggtctgtttgctcgcatgtttaccctctcgggttaccaggtcaaaatcttaggcagtaaggattggcaccgcgctgatgagatattggatggggcaggattggtggtggttaccgtgccgattcatttaacccaaggggtgattgaaaagctgacccaactgccatcggattgcattttgtgtgacctcacttcgatcaagtcgaagccgctgaaaaccatgctcgatgtgcactctgggccggttgttggtttgcaccctatgtttggtcccgatgtgccgagtttagccaagcaagtgattgtctactgtgatggtcgaggtgctgagcaatatcagtggttactgcagcagtttaagatttggggggcaagcttgtgccaaattgaggccagcgaacacgaccacggcatgacgttaattcaagcattaaggcactttacttcctttgcctatggcatgcatttgagtcaggaaaatccaagtctcgataaactgctgaaactgagctcgcccatttaccgtcttgagttagcgatggtagggcgtctgtttgcccaagacccaaacttgtatggcgacattattctttcgtcgcaagagaacatcgacatgatcaagcgtttccatcgccgctttggcgaggcactagagatgttagatcagcacgataaagcgcgttttgttgaacgtttcacgcaagtgagtgattggtttggggggtattcgcagcagtttatggcggaaagccaaaacttactcaaacaagcgaatgacaacttgcatcgtgattaa

SEQ ID NO: 493 - protein, 375 aa, Vibrio vulnificus YJ016
MAVELNALREQIDAVDKQMLALLAQRLALVEQVGHVKSQHGLPIYAPDREAAMLASRRAEAEKIGVPPQLIEDILRRTMRESYASEKDSGFKCLNPDLRSVVIIGGHGQLGGLFARMFTLSGYQVKILGSKDWHRADEILDGAGLVVVTVPIHLTQGVIEKLTQLPSDCILCDLTSIKSKPLKTMLDVHSGPVVGLHPMFGPDVPSLAKQVIVYCDGRGAEQYQWLLQQFKIWGASLCQIEASEHDHGMTLIQALRHFTSFAYGMHLSQENPSLDKLLKLSSPIYRLELAMVGRLFAQDPNLYGDIILSSQENIDMIKRFHRRFGEALEMLDQHDKARFVERFTQVSDWFGGYSQQFMAESQNLLKQANDNLHRD

SEQ ID NO: 494 - DNA, 1122 bp, Erwinia carotovora subsp. atroseptica SCRI1043
  CDS (1)..(1122): transl_table=11
atggtagctgaactgaccgcattacgtgatcagatagatgaggtagataaggagcttgtcgcgctcttatcacgtcggttgcgtttggtggcggaagtgggtgaagtgaaaagccgctatggtttgcccatttatgcgcccgatcgtgaagcggccatgctcagctcacgtcgtaacgaggcggcgtcgatgggggttccaccggatcttattgaagatatcctgcggcgcaccatgcgcgaatcctattccagcgaaaacgacaaaggttttaaaacgctgtgtccacaattgcgtccggtcgtcatcattggtggccgtggtcaaatgggcaatttgtttgagaagatgctgacgctatcgggatatcaggtgaggatcctggagcaagatgactggccgcgcgctgatgagctgttgtctgatgcaggtatggtgattgtcagcgtgccgattcacgttaccgaacaggttattgccagtctgcctatcttgccggatgactgtattctggtcgatctggcatcggtaaaaaatggcccgcttcaggcgatgctggcggcgcataatggtccggtactcggtttgcaccctatgtttgggccagacagcggcagccttgccaaacaggttgtcgtttattgcgatggccgacagccggaggcctatcagtggttactggaacagattcaggtatggggcgcgcgtctgcatcgcattagcgcagttgaacacgatcagaacatgatgttcattcaagcgctgcgccacttcgctacatttgcctatggcctgcatttagcggaagagaatgtgcagcttgaacagctattagcactgtcatcgccaatctatcgattggaattgatcatggttggtaggttgtttgcgcaggatccgcagctttatgccgacattattatgtcttcagaggataatttggcgttgattaagcgttactacaaacgttttggcgaagccattgagttactggagcaaacagataaagcggaatttattagcagcttcaaaaaagttgaacactggttcggcgattatgccaagcgttttcaggcggagagccgagtgcttttacgtcaggcaaacgacattcgccaataa

SEQ ID NO: 495 - protein, 373 aa, Erwinia carotovora subsp. atroseptica SCRI1043
MVAELTALRDQIDEVDKELVALLSRRLRLVAEVGEVKSRYGLPIYAPDREAAMLSSRRNEAASMGVPPDLIEDILRRTMRESYSSENDKGFKTLCPQLRPVVIIGGRGQMGNLFEKMLTLSGYQVRILEQDDWPRADELLSDAGMVIVSVPIHVTEQVIASLPILPDDCILVDLASVKNGPLQAMLAAHNGPVLGLHPMFGPDSGSLAKQVVVYCDGRQPEAYQWLLEQIQVWGARLHRISAVEHDQNMMFIQALRHFATFAYGLHLAEENVQLEQLLALSSPIYRLELIMVGRLFAQDPQLYADIIMSSEDNLALIKRYYKRFGEAIELLEQTDKAEFISSFKKVEHWFGDYAKRFQAESRVLLRQANDIRQ

SEQ ID NO: 496 - DNA, 1131 bp, Mannheimia succiniciproducens MBEL55E
  CDS (1)..(1131): transl_table=11
gtggaagcactcaaagaaatcagagccgaaatcgatcaattggatcgagagttgttagaagtttttgccaaacgtttagcgttagtcaaaaaggtcggagaaattaaacatcaacaaggtttgccgatttatgtaccggaacgcgaagcagatatgctggcggctcggcgttcagaagcggaaaaaatgggcatacctgcggatttaattgaagatgtgttacgtcgtgttatgcgggagtcttacgctaacgaacatgaacacggttttaaaaccgttaatccggcgattaaaaaaattgttattgtaggcggtaaaggcaaattaggcggcttattcgggcgttttctgacggcttcaggctactttgtggaagcgttgggaagcaaagattgggacaacgcaaaggctattttggccggtgcaaatgcggtaatcgtttgtgtgcctatcgtaaaaaccttggaaaccattgaacgcttaaaaccttatttaacggaagatatgttattgacggatctaacctccgtaaaacgccgcccgttggaaaaaatgctggaaattcatcaaggcgcggtcgtaggcttgcatccgatgtttgggcccgatatcgcaagcatggcaaaacaggtggttgtacgttgcgacgggcgttatccggagcgttatcaatggctgttggaacaaattcaaatgtggggcgcgcgaatttatcaggcggatgccgccgagcatgaccacagcatgacctatattcaagcattacgtcattttgccacctttgccaacggtttacatctttcaagacaaccggtgaaattagctaatttattagccttatcttcaccgatttatcgtctggaacttgcgatgatcgggcgtttgtttgcgcaagacggtagtttatatgccgatattattatggataagccggaaaacctggaagtaatcgaaagtttaaaacaaagctatgaagacagcttaaaattctttgaaaacggtgatagagaaggctttattaaaacctttaacaaagtgagagaatggttcggcgattattcggaacaatttatgaaagaaagccgtcaactgctgcaacaagctaacgattatcgtcataatagtctctga

SEQ ID NO: 497 - protein, 376 aa, Mannheimia succiniciproducens MBEL55E
MEALKEIRAEIDQLDRELLEVFAKRLALVKKVGEIKHQQGLPIYVPEREADMLAARRSEAEKMGIPADLIEDVLRRVMRESYANEHEHGFKTVNPAIKKIVIVGGKGKLGGLFGRFLTASGYFVEALGSKDWDNAKAILAGANAVIVCVPIVKTLETIERLKPYLTEDMLLTDLTSVKRRPLEKMLEIHQGAVVGLHPMFGPDIASMAKQVVVRCDGRYPERYQWLLEQIQMWGARIYQADAAEHDHSMTYIQALRHFATFANGLHLSRQPVKLANLLALSSPIYRLELAMIGRLFAQDGSLYADIIMDKPENLEVIESLKQSYEDSLKFFENGDREGFIKTFNKVREWFGDYSEQFMKESRQLLQQANDYRHNSL

SEQ ID NO: 498 - DNA, 1125 bp, Haemophilus influenzae 86-028NP
  CDS (1)..(1125): transl_table=11
atggaagtccttaaagatttacgttctgaaattgattcgcttgatcgcgaacttatccaactttttgctaaacgtcttgagttggtttctcaagtcggtaaagtgaaacatcaacatggattacctatttatgcgccagagcgtgaaatagcaatgctccaagcacgtcgtttagaggctgaaaaagcaggcatttcagccgatttaattgaagatgttctacgccgttttatgcgtgaatcctatgccaatgaaaaccaatttggttttaaaactatcaattctgatattcacaaaattgttatcgtgggcggttatggtaaattaggtggcttatttgcccgttatttacgtgcatctggctatccaatttctattttagatcgcgaagattgggcggtggctgaaagtattttagcgaatgctgatgtcgtgatcgtttccgtccccatcaatattactttggaaacgattgagcgactaaaaccttatttaacagaaaatatgttgcttgcagatttaacttctgttaagcgtgaaccgctagcgaaaatgcttgaagttcattctggtgcagttttaggtttacatccaatgtttggtgcagacattgcaagtatggcaaaacaagtggttgtacgttgtgatggacgttttcctgaacgttatgaatggttacttgagcaaattcaaatttggggcgcaaaaatttatcaaaccaatgccacagaacacgatcacaatatgacttatatacaagccttgcgccatttttcgacttttgcgaatggtttacacctttccaaacagcccattaatctcgctaatttattggcgctttcttctcctatttatcgcttagaacttgcgatgatcggtcgcttatttgcgcaagatgcagagctttacgcagatattattatggataagccagaaaatttagcggtaattgaaacgctaaaacaaacttacgacgaagccttaactttctttgaaaagaatgatcgtcaaggttttattgatgctttccacaaggtgcgtgactggtttggcgattattctgaacaattcttaaaagaaagccgtcagctattacagcaggcaaatgatttgaaacaagggtag

SEQ ID NO: 499 - protein, 374 aa, Haemophilus influenzae 86-028NP
MEVLKDLRSEIDSLDRELIQLFAKRLELVSQVGKVKHQHGLPIYAPEREIAMLQARRLEAEKAGISADLIEDVLRRFMRESYANENQFGFKTINSDIHKIVIVGGYGKLGGLFARYLRASGYPISILDREDWAVAESILANADVVIVSVPINITLETIERLKPYLTENMLLADLTSVKREPLAKMLEVHSGAVLGLHPMFGADIASMAKQVVVRCDGRFPERYEWLLEQIQIWGAKIYQTNATEHDHNMTYIQALRHFSTFANGLHLSKQPINLANLLALSSPIYRLELAMIGRLFAQDAELYADIIMDKPENLAVIETLKQTYDEALTFFEKNDRQGFIDAFHKVRDWFGDYSEQFLKESRQLLQQANDLKQG

SEQ ID NO: 500 - DNA, 1146 bp, Colwellia psychrerythraea 34H
  CDS (1)..(1146): transl_table=11
atgaaaaattcagatcccgattttgataaaaagttaacaagtttacgtgacgaaattgatgaaattgatagtgatttagtcaaattattgcaaagacgccttgctgttaccagtaaagttggtcaactaaaaagtggtgttggcagacccatttatgatgctaaacgcgaggcgagtttatttgctaaacgtcgccagcaggcaagtgaggctggtctatcacctgacttaattgaagatgttttacgccgtttaatgcgtgactcttatgtcagtcaagatgctagtggttatcgctgcgttaacccagaatgtaaaaaggttgtggtagtgggcggtaaagggcaattaggctctgtttttgtcgacctttttcaacgttctgattaccaagttgctattattgagcaaaatgattggcccaacagtgaagctattttagctgatgcgagcttagtcattgttgctgtgcctattcgcctgacgactatggttattaatcatcttaataacttaccaaaagagtgtattcttgccgatttaaccagtattaaagagtcgcctttgtttgaaatgaaaaaggtacatgctggtcctgttgttggcttacaccctatgtttggtccagatgtcacaggcttaattaaacaaaccattattagttgtgaagggcgtaaccctgaacaatatcaatggctcattgagcagtttgaagtgtggggcgctaaaatttatccggtgcaagcgcatgaacatgaccaagcgatgtcaatggtacaagttatgcgacatttctctactatcgcttacggctatcacttgatgagtgaaggggctgatattgagaacctagtagcgatgagttcacctatctatcgattagagttgattatggtagggcgattatttgctcaagatcctaccctttatgcggatattatttttgctaacaaagataatgtcagcatgatgaaacgctttgcttaccgatttttagaactacttgaagatgtcagccttgatgataaagatgcctttgttgatatgtttaataatgtttcgggttggtttggtgattatgccggagattttctcgaagaaagtaaatcgatgttattaaaagctaatgagctgaaaaaacattaa

SEQ ID NO: 501 - protein, 381 aa, Colwellia psychrerythraea 34H
MKNSDPDFDKKLTSLRDEIDEIDSDLVKLLQRRLAVTSKVGQLKSGVGRPIYDAKREASLFAKRRQQASEAGLSPDLIEDVLRRLMRDSYVSQDASGYRCVNPECKKVVVVGGKGQLGSVFVDLFQRSDYQVAIIEQNDWPNSEAILADASLVIVAVPIRLTTMVINHLNNLPKECILADLTSIKESPLFEMKKVHAGPVVGLHPMFGPDVTGLIKQTIISCEGRNPEQYQWLIEQFEVWGAKIYPVQAHEHDQAMSMVQVMRHFSTIAYGYHLMSEGADIENLVAMSSPIYRLELIMVGRLFAQDPTLYADIIFANKDNVSMMKRFAYRFLELLEDVSLDDKDAFVDMFNNVSGWFGDYAGDFLEESKSMLLKANELKKH

SEQ ID NO: 502 - DNA, 1125 bp, Haemophilus somnus 129PT
  CDS (1)..(1125): transl_table=11
atggacgttttaaaaaatttaagaacagaaattgattgcttagatcgtgaattactacaccttttttctcaacgcttagaattagtcagaaaagtaggcaaagtgaaacatcaatatggattaccgatttatgtacctgaacgtgaaaatgaaatgttacaggctcgtcgcaatgaagcggaaaagttaggtgtttcaccggatttaattgaagatgttttgcgtcgtttgatgcgggaatcttatactagagaaaatcaatacggttttaaaacagcaaatcctgaaataaaaaaaatcgtcattgttggaggaaagggaaaattaggggcattatttgctcgttatttgtcttcttctggttatcaaattgctgtcttagagaaacaggattggcaaagtgcggataaaattttacaaaatgcaaatgtagttattgtttgtgtcccaattgcacaaactttaaatgtgattgaccgtctgaagccttatctaaccgaaaatatgctattaacagatttaacctcagtcaaacgtcaaccgttggaaaaaatgttacaagtgcatcaaggtgcggtattgggattacatccaatgtttggtccggatattaccaatatggcaaagcaagttgtagtacgttgtgacggtcgctaccctgaaaaataccaatggtttttggaacaaattcaaatgtggggagcgaaaatttatcaagttgatgcaaccgaacatgataaaagtatgacgtatgtacaagccttacgtcatttttcaacctttgcaaatggtttgcatttatcaaaacaacctattgagttggcacaattgcttgccctatcttcacccatttatcgtcttgaattagccatgatcggacgtttatttgctcaagatgcggaactttatgcagatattattatggacaaatcggagaatttggaagtgattaagagtctaaaacaaagctatgaagaaagtctaaatttctttgaacataataataagcagggatttattgactgttttaatcaagtgcgggaatggtttggtgagtattcagagcaatttttgaaagaaagtcggcaattattacaacaggcaaatgattacaaaagtatttga

SEQ ID NO: 503 - protein, 374 aa, Haemophilus somnus 129PT
MDVLKNLRTEIDCLDRELLHLFSQRLELVRKVGKVKHQYGLPIYVPERENEMLQARRNEAEKLGVSPDLIEDVLRRLMRESYTRENQYGFKTANPEIKKIVIVGGKGKLGALFARYLSSSGYQIAVLEKQDWQSADKILQNANVVIVCVPIAQTLNVIDRLKPYLTENMLLTDLTSVKRQPLEKMLQVHQGAVLGLHPMFGPDITNMAKQVVVRCDGRYPEKYQWFLEQIQMWGAKIYQVDATEHDKSMTYVQALRHFSTFANGLHLSKQPIELAQLLALSSPIYRLELAMIGRLFAQDAELYADIIMDKSENLEVIKSLKQSYEESLNFFEHNNKQGFIDCFNQVREWFGEYSEQFLKESRQLLQQANDYKSI

SEQ ID NO: 504 - DNA, 1140 bp, Shewanella sp. MR-4
  CDS (1)..(1140): transl_table=11
atgaacgaaaaaaccacaactgaattagaacaccttcgaggtctcatcgatggtgtcgaccaacaattgctgcatttactacgtaaacgcttagatttagtcgctcaggtgggaacggtaaaacacgccgcaggcctgccaatttatgcgccgcaacgcgaagcggctatgctggcaaaacgccgcgaagaagccaagaacatgggcatagcgccacaactgattgaagatattttgcgccgcttgatgcgtgaatcctatctcaacgagaaggatgtcggctttaagcaagtaaaaaacgatctcggttcagtcgtgattgttggtggtaagggtcagcttggtggactgttccaacaaatgctgacgctctcgggttatcaggttaaagtgcttgataaagacgactggcagcaggcggaaaccttatttgccgacgccggattggtactggtgactgtgcctatcgccatcacctgcgacattatccgtgagaaactgacccaattaccgcaggaatgtatcttagccgacttaacctcaatcaagactgaacctatgaatgccatgttggccgctcacaaggggcctgttgtcggctttcatcccatgtttggcccagatgtcggcagtttggctaagcaggtggtggtggtgtgccatggccgcgaagccgataaataccaatggttgctcgagcaaattggaatttggggcgcacggattgtagaagctgagcctgaacgtcacgacaatgcgatgcaattggtacaggcgatgcgccacttctcgacctttgtgtatggcttgaacctttgcaaagaagaagcggatattgaaaccctgctgcaatttagctcacctatctatcgcttagaactcgccatggtcgggcgcttgtttgcccaaagcccggagctttatgccgatattatttttgcccagcaggatagccagcatgcgattggcgattatttggataactatcgcgaagcattagagctattaaagcggggcgatagggacgcgtttatcagccagttccaaacggtagcaaaatggtttggtgattttgctcctcagtttcagcgtgaaagtcgcatgatgctgcaatcggtcagtgatatgaaaacgaactga

SEQ ID NO: 505 - protein, 379 aa, Shewanella sp. MR-4
MNEKTTTELEHLRGLIDGVDQQLLHLLRKRLDLVAQVGTVKHAAGLPIYAPQREAAMLAKRREEAKNMGIAPQLIEDILRRLMRESYLNEKDVGFKQVKNDLGSVVIVGGKGQLGGLFQQMLTLSGYQVKVLDKDDWQQAETLFADAGLVLVTVPIAITCDIIREKLTQLPQECILADLTSIKTEPMNAMLAAHKGPVVGFHPMFGPDVGSLAKQVVVVCHGREADKYQWLLEQIGIWGARIVEAEPERHDNAMQLVQAMRHFSTFVYGLNLCKEEADIETLLQFSSPIYRLELAMVGRLFAQSPELYADIIFAQQDSQHAIGDYLDNYREALELLKRGDRDAFISQFQTVAKWFGDFAPQFQRESRMMLQSVSDMKTN

SEQ ID NO: 506 - DNA, 1140 bp, Shewanella sp. ANA-3
  CDS (1)..(1140): transl_table=11
atgaacgaaaaaaccacaactgaattagaacaccttcgcggactcatcgatggtgtcgaccagcaattgctgcatttactgcgtaaacgcttagatttagtcgcgcaggtgggcacggttaaacacgccgcaggcctgccgatttatgcgccgcaacgtgaagcggcaatgttggcaaaacgccgcgaagaagccaaaaccatgggcattgcgccgcaactgattgaagatattttgcgccgtttgatgcgtgagtcctacctcaatgagaaggatgttggctttaagcaagtgaaaaacgatctcggttcggtcgtgattgttggtggtaagggccagcttggtggattgtttcaacaaatgctgtcgctctcgggttaccaggtcaaagtgctggataaagacgactggcagcaagctgaaaccttatttgccgacgccggattggtattggtgactgtgcctatcgccatcacctgcgacattatccgtgagaaactgacccaattaccgcaggaatgtatcttagccgacttaacctcgatcaagactgaacccatgaatgccatgttggccgctcacaaagggcccgttgtcgggtttcatcccatgtttggcccagatgtcggcagtttggctaagcaggttgtagtggtgtgccatgggcgtggagccgataaataccaatggctgctggaacaaattgggatttggggcgcgcggattgtcgaagcagaacctgaacgtcacgacaatgcgatgcagctggtacaggcgatgcgtcacttctcgacctttgtgtatggcttgaatctttgcaaagaagaagcggatattgaaaccctgctgcaatttagctcacctatctatcgcttagagctcgccatggtagggcgtttgtttgcccaaagccccgaactctatgccgatattatttttgcccagcaggatagccagcatgcaattggcgattatttggataactaccgtgaggcattagagctattaaagcggggcgatagggacgcgtttatcagccagttccaaacggttgcaaaatggtttggtgattttgcaccgcagtttcagcgtgaaagtcgcatgatgctgcaatcggtcagtgatatgaaaacaaactga

SEQ ID NO: 507 - protein, 379 aa, Shewanella sp. ANA-3
MNEKTTTELEHLRGLIDGVDQQLLHLLRKRLDLVAQVGTVKHAAGLPIYAPQREAAMLAKRREEAKTMGIAPQLIEDILRRLMRESYLNEKDVGFKQVKNDLGSVVIVGGKGQLGGLFQQMLSLSGYQVKVLDKDDWQQAETLFADAGLVLVTVPIAITCDIIREKLTQLPQECILADLTSIKTEPMNAMLAAHKGPVVGFHPMFGPDVGSLAKQVVVVCHGRGADKYQWLLEQIGIWGARIVEAEPERHDNAMQLVQAMRHFSTFVYGLNLCKEEADIETLLQFSSPIYRLELAMVGRLFAQSPELYADIIFAQQDSQHAIGDYLDNYREALELLKRGDRDAFISQFQTVAKWFGDFAPQFQRESRMMLQSVSDMKTN

SEQ ID NO: 508 - DNA, 1080 bp, Nostoc punctiforme PCC 73102
  CDS (1)..(1080): transl_table=11
atgcctctgaaatcctcttattcagatcagcttaaaaaaactgaccagagcttgatcgccttacttagcgatcgcatatcattattagcatcagaacagccttctttagatgaacaactggctagtgtcgctcccctactcgctcaagctggtattcctgagtctgtttgggcaggtgtagtaaatagttgtcatgccagccttacccctaaatctgctataaaccatgccagtcctcgacaagttaccatcatcggtggacgcggcaggatgggaagattatttcaagagcagctttcgctagtaggtcataatgttagcattcttgaacatgaagattgggaatatgcagagcaactgttaagtcaagcagaattagtattagtaagtgttcctattgaacatacggttgatgttatcaagcgggcagcaaaatatcttgcctcaaatacagctttgtgtgacatcacaagtattaaaacacagccaactcaagcaatgctcgaacaccattgtggtcccgtcatgggtttacatccaatgtttgggccaaatattaaatcgtttttgggacaaaaggtggtcgtgtgtccaggtcgaaatgatgattcatttcaatggttattagactttcttaaaagtaaaggtggtgaattaattgtttgcacgcctgaagaacacgatcggatgatggtgattattcaagcaacgcagcatttttgtagatttagtctgggcgttttcttagcacaagcaagggtggagatagagcagagtttaacaatgtcaactcctaattatcgtcaagaaattgatattgtgaaacgtttgtttgctcaaaatcctaatttatgtgttgatattatgctagctactgaagaaagatgtaatgctattagttttttagctaatacttacagccgtttggctagactggtggctaggaaggatagagaggcattaattaaagagtttgaaaatactcaaagtttttttgaagggaaaattaacagttttctccagcctttaaatacaacggctctcaaaagagattttaagccacagaatattggcatttga

SEQ ID NO: 509 - protein, 359 aa, Nostoc punctiforme PCC 73102
MPLKSSYSDQLKKTDQSLIALLSDRISLLASEQPSLDEQLASVAPLLAQAGIPESVWAGVVNSCHASLTPKSAINHASPRQVTIIGGRGRMGRLFQEQLSLVGHNVSILEHEDWEYAEQLLSQAELVLVSVPIEHTVDVIKRAAKYLASNTALCDITSIKTQPTQAMLEHHCGPVMGLHPMFGPNIKSFLGQKVVVCPGRNDDSFQWLLDFLKSKGGELIVCTPEEHDRMMVIIQATQHFCRFSLGVFLAQARVEIEQSLTMSTPNYRQEIDIVKRLFAQNPNLCVDIMLATEERCNAISFLANTYSRLARLVARKDREALIKEFENTQSFFEGKINSFLQPLNTTALKRDFKPQNIGI

SEQ ID NO: 510 - DNA, 1137 bp, Haemophilus somnus 2336
  CDS (1)..(1137): transl_table=11
atgaaaatagctatggacgttttaaaaaatttaagaacagaaattgattgcttagatcgtgaattactacaccttttttctcaacgcttagaattagtcagaaaagtaggcaaagtgaaacatcaatatggattaccgatttatgtacctgaacgtgaaaatgaaatgttacaggctcgtcgcaatgaagcggaaaagttaggtgtttcaccggatttaattgaagatgttttgcgtcgtttgatgcgggaatcttatactagagaaaatcaatacggttttaaaacagcaaatcctgaaataaaaaaaatcgtcattgttggaggaaagggaaaattaggggcattatttgctcgttatttgtcttcttccggttatcaaattgctgtcttagagaaacaggattggcaaagtgcggataaaattttacaaaatgcaaatgtagttattgtttgtgtcccaattgcacaaactttaaatgtgattgaccgtctaaagccttatctaaccgaaaatatgctattaacagatttaacctcagtcaaacgtcaaccgttggaaaaaatgttacaagtgcatcaaggtgcggtattaggattacatccaatgtttggtccggatattaccaatatggcaaagcaagtggtagtacgttgtgacggtcgctaccctgaaaaataccaatggtttttggaacaaattcaaatgtggggagcgaaaatttatcaagttgatgcaaccgaacatgataaaagtatgacgtatgtacaagccttacgtcatttttcaacctttgcaaatggtttgcatttatcaaaacaacctattgagttggcacaattgcttgccctatcttcacccatttatcgtcttgaattagccatgatcggacgtttatttgctcaagatgcggaactttatgcagatattattatggacaaatcggagaatttggaagtgattaagagtctaaaacaaagctatgaagaaagtctaaatttctttgaacataataacaagcaggggtttattgactgttttaatcaagtgcgggaatggtttggtgagtattcagagcaatttttgaaagaaagtcggcaattattacaacaggcgaatgattacagaagcatttga

SEQ ID NO: 511 - protein, 378 aa, Haemophilus somnus 2336
MKIAMDVLKNLRTEIDCLDRELLHLFSQRLELVRKVGKVKHQYGLPIYVPERENEMLQARRNEAEKLGVSPDLIEDVLRRLMRESYTRENQYGFKTANPEIKKIVIVGGKGKLGALFARYLSSSGYQIAVLEKQDWQSADKILQNANVVIVCVPIAQTLNVIDRLKPYLTENMLLTDLTSVKRQPLEKMLQVHQGAVLGLHPMFGPDITNMAKQVVVRCDGRYPEKYQWFLEQIQMWGAKIYQVDATEHDKSMTYVQALRHFSTFANGLHLSKQPIELAQLLALSSPIYRLELAMIGRLFAQDAELYADIIMDKSENLEVIKSLKQSYEESLNFFEHNNKQGFIDCFNQVREWFGEYSEQFLKESRQLLQQANDYRSI

SEQ ID NO: 512 - DNA, 1140 bp, Pseudoalteromonas tunicata D2
  CDS (1)..(1140): transl_table=11
atgtcatcaccccttcaaatacaactgactgaattacgtgatcaaatcgatcagtgtgatacacaattagttgaaatgcttgcgcgacgcaataaattaacagagcaggtcggtcagttaaaaaaagaatttggttcaccagtttatgtgcctgcccgtgaagcccaactaataactgcgcgcagagagcaagccaatcaatatggtgtgaatcctgatttagttgaagatattttacgtcgtatgatgcgagagtcgtatcaaaatcagcaagccgagctcgcttgtgttgcccctgatatctcaccttgtgtcatcgtgggtggagaaggtgcgatgggcagattatttgctcgccagcttagtcgctcaggcattgaagtgcgcatcttagacaaagcacaacaagcagatcagcaagccattcttgatggtgctaagttagtgttaatttctgtgccaattaatgcagtagttaatgtagttgcaaagctccctaaactagctgcggattgtttgttagttgatattaccagtgtgaaacaaaaaccgcttgaagccatgctcagtcaccatcaaggggaagttttaggcttacatccaatgtttggccctgatattgaacattgggtgaaacaaacgattgttgtatgccaaggacgcggtggcgaaaaaagtactcaattactcaaccagcttgctatctggggcagtcagttagtcgaaatgccagcagacaaacatgatgaagcaatgcaaattgtgcaagtgatgcgccatctaaccacttttgtttatggccaatttttagcaaaacaaccacatagccttgatgaaattaaactgtgctcatcaccaatatatcagttagagcttatgatggttggacgcttatttgctcagtcgccagagctttataccgacattatgatggctcaatttgataatgttgcacctttgctaacatcttaccaagagacttatcaagctacgttagataagcttaaagagggtgataaagagggattaatggctgctttttctgaagctaaaacgtttttctctgattcggcgcagcactttttaactcaaagcaaagcgttacttaataaagcaaatgatgccaaagtgcttgattaa

SEQ ID NO: 513 - protein, 379 aa, Pseudoalteromonas tunicata D2
MSSPLQIQLTELRDQIDQCDTQLVEMLARRNKLTEQVGQLKKEFGSPVYVPAREAQLITARREQANQYGVNPDLVEDILRRMMRESYQNQQAELACVAPDISPCVIVGGEGAMGRLFARQLSRSGIEVRILDKAQQADQQAILDGAKLVLISVPINAVVNVVAKLPKLAADCLLVDITSVKQKPLEAMLSHHQGEVLGLHPMFGPDIEHWVKQTIVVCQGRGGEKSTQLLNQLAIWGSQLVEMPADKHDEAMQIVQVMRHLTTFVYGQFLAKQPHSLDEIKLCSSPIYQLELMMVGRLFAQSPELYTDIMMAQFDNVAPLLTSYQETYQATLDKLKEGDKEGLMAAFSEAKTFFSDSAQHFLTQSKALLNKANDAKVLD

SEQ ID NO: 514 - DNA, 1131 bp, Photobacterium sp. SKA34
  CDS (1)..(1131): transl_table=11
atggttgctgagttaagcaaattaagagatcaaattgatgatgtagatcgtcaaatggttgagctattggctcaacgactcgcgttagttgagcaggtcggcgtcgtgaaaagtcagcatggcttacctatttatgccccagatcgtgaagccgcaatgttggcatctcgtcgtgaagaggcggaacgtcaaggggtaccagcggatcttatcgaagatgtacttcgtcgaacgatgcgtgaatcttattcgagcgaaaatgattctggctttaaatgtttaaatccacaattgcgaccaattgttattgttggtggtcatggtcagttagggaaattgttttgtcgtttgtttgaactgtcgggttaccaagttaaaacattaggtagccaagactgggatcgtgccgatgaaatattgcatgatgcaggtatggtcgttgtttctgttcctatccatttaacagagatggtgattgcaaaactcgataatttacctaaagactgtttacttgctgatttaacatcgattaaaagtggtccattacaagcgatgttagaagtgcataaaggacctgtggttgggttacacccaatgtttggtcctgatattccaagtcttgcgaaacaggttattgtgtactgtgatggacgaaatccagaaagttaccaatgggtgttggagcagtttcaaatttggggcgcatcactgaatcgaattagtgcgattgaacatgatcaggggatgaccttgatccaagcattacgtcactttacgtcgtttgtttatggtgttcaccttgctgaagaagatccaaagttagagcaattaatgtcgttaagttcacctatctatcgcttagaactcgcgatggtaggacgtttgtttgctcaagatgcgcaattgtacggtgatattattatgtcagcgccacagaatattgcgatgatcaaacgtttccatcagcgctttggtgaagcaattgaaatgctagatgctcaagataaagatgcgtttaagcaagcttttggtcaagtatcaggatggtttggcgattacgccgaacattttttatcagagagccagggactgcttaggcaggcgaacgattcaactcaccgtaaatcgtag

SEQ ID NO: 515 - protein, 376 aa, Photobacterium sp. SKA34
MVAELSKLRDQIDDVDRQMVELLAQRLALVEQVGVVKSQHGLPIYAPDREAAMLASRREEAERQGVPADLIEDVLRRTMRESYSSENDSGFKCLNPQLRPIVIVGGHGQLGKLFCRLFELSGYQVKTLGSQDWDRADEILHDAGMVVVSVPIHLTEMVIAKLDNLPKDCLLADLTSIKSGPLQAMLEVHKGPVVGLHPMFGPDIPSLAKQVIVYCDGRNPESYQWVLEQFQIWGASLNRISAIEHDQGMTLIQALRHFTSFVYGVHLAEEDPKLEQLMSLSSPIYRLELAMVGRLFAQDAQLYGDIIMSAPQNIAMIKRFHQRFGEAIEMLDAQDKDAFKQAFGQVSGWFGDYAEHFLSESQGLLRQANDSTHRKS

SEQ ID NO: 516 - DNA, 1128 bp, Vibrio sp. Ex25
  CDS (1)..(1128): transl_table=11
atggcagttgaacttaacgcattgcgcgatcagattgatgcagtcgacaagcaaatgttggagctattagctcagcgtttggcgctcgtagagaaagttggggaagtaaaaagcgaacatggtttgcctatttatgcccctgatcgtgaagcggcgatgctggcttctcgccgagcagaagctgagaaaatgggaattcctccacagcttattgaagatattctgcgtcgtaccatgcgtgagtcttatgccagtgaaaaagactccggttttaagtgtttgaaccctgaattacgctcagtggtcattattggtggtaatggccagttaggcggcctgtttgggcgtatgtttaagttatctggttatcaagtcaaagtgcttggtagcaaagactgggatcgtgcggatgacatcctaaaagatgcgggcttggtggtggttactgtgccaattcacctaacagaaggtgtgattgaaaagctaggtaatctgccacaagactgtattctgtgtgacctgacttctataaaatctaagccactgcaagcaatgttgaatgtgcaccaaggaccggtggttggtttacacccaatgtttggcccagatgtgccgagccttgccaagcaggtgattgtgtactgtgatgggcgtggaaatgatcaataccaatggttgctgcaacagtttggtatttggggcgcgagcttgtgccagattgatgcgcaagagcacgatcatggcatgacgttaatccaagcgctgcgtcacttcacctcatttgcttacggcatgcatctaagcaaagagaacccgaacattgagcaactgttaaagttgagctcaccgatctaccgcctggagttggcgatggtagggcgtctgtttggtcaggatccaaacctctacggtgacattattctctcatcgcaagaaaacatcgacatgattaagcgattccaccaacgcttcggcgaagcacttgcgattttggatagcaaagataaagccaaatttgtcgaaagctttgagcaggtgagtgagtggtttggtgattattcacaacaatttatgaatgagagccaaaacttactcaaacaggcgaatgataatattcatcgcggttaa

SEQ ID NO: 517 - protein, 375 aa, Vibrio sp. Ex25
MAVELNALRDQIDAVDKQMLELLAQRLALVEKVGEVKSEHGLPIYAPDREAAMLASRRAEAEKMGIPPQLIEDILRRTMRESYASEKDSGFKCLNPELRSVVIIGGNGQLGGLFGRMFKLSGYQVKVLGSKDWDRADDILKDAGLVVVTVPIHLTEGVIEKLGNLPQDCILCDLTSIKSKPLQAMLNVHQGPVVGLHPMFGPDVPSLAKQVIVYCDGRGNDQYQWLLQQFGIWGASLCQIDAQEHDHGMTLIQALRHFTSFAYGMHLSKENPNIEQLLKLSSPIYRLELAMVGRLFGQDPNLYGDIILSSQENIDMIKRFHQRFGEALAILDSKDKAKFVESFEQVSEWFGDYSQQFMNESQNLLKQANDNIHRG

SEQ ID NO: 518 - DNA, 1134 bp, Alteromonadales bacterium TW-7
  CDS (1)..(1134): transl_table=11
gtggcaaatataagtgatttggcccaactaagacaaggtatagatgaatgcgatgcgcagcttgttgccttactagctaaacgtaatggtattacccaaaaaattggtgaaatcaaacagcaaacaggtgcgcctttacatgcaccagagcgtgaagctgaattactagcggctaggcgccaagaagcaattaatcaaaatgtaagtcctgatctagttgaagatattctcaggcggatgatgcgtgaagcatatcaaaaccaacaggctaaattagcgtgtgcagcgccatcactttcacctattgttattgtgggcggtcaaggggcgatggggcagttatttgcccaacaatttatgcgctcaggttatgacgtcaaaatattagataaagagcagcaagatgatgcccaaagcattttaaccggtgcaaaactggtaatgataagtgtacctattaatgctttagagtctgtggttgctaaactaccaaaactagatgatgactgtttactcgttgatataacctcggtaaagcaatcgccaattaaagcattaaaagcagctcatagtggtccagttgttggtttacaccctatgtttgggcctgatatttcacattgggtaaaacaaacagtagttgtatgtgagggaagggagcataaggcggcgaaaggtctattagagcagttacaagtatgggggtgtcagcttgtagagctagatgctaaaaagcacgatgaagccatgcaaataattcaggtaatgcgacatttaacaacgtttgtttatgggcagtttttagcaaagcaaagccatactttagcagagttacgaagttgctcgtcgccgatatatcaattagagctaatgatggtagggcgtttgtttgcgcaatcgcctgagctttattccgatataatgttggctcagtttgatgacgttgaaagtttgttagctcaataccaagatacctttgcacaaacgcttgaaaagcttagggtaggtgataaagcagccttaatggaggcatttgcagatgctaaatcatatttttcagactcaactgcgcattttttaacacaaagccgcagtttacttaataaagcgaatgacgctaaagtgctcgactag

SEQ ID NO: 519 - protein, 377 aa, Alteromonadales bacterium TW-7
MANISDLAQLRQGIDECDAQLVALLAKRNGITQKIGEIKQQTGAPLHAPEREAELLAARRQEAINQNVSPDLVEDILRRMMREAYQNQQAKLACAAPSLSPIVIVGGQGAMGQLFAQQFMRSGYDVKILDKEQQDDAQSILTGAKLVMISVPINALESVVAKLPKLDDDCLLVDITSVKQSPIKALKAAHSGPVVGLHPMFGPDISHWVKQTVVVCEGREHKAAKGLLEQLQVWGCQLVELDAKKHDEAMQIIQVMRHLTTFVYGQFLAKQSHTLAELRSCSSPIYQLELMMVGRLFAQSPELYSDIMLAQFDDVESLLAQYQDTFAQTLEKLRVGDKAALMEAFADAKSYFSDSTAHFLTQSRSLLNKANDAKVLD

SEQ ID NO: 520 - DNA, 1122 bp, Enterobacter agglomerans
  CDS (1)..(1122): transl_table=11
atggtggctgaactgaccgcgttacgcgatcaaattgacagtgtagataaagcgctgctggatctgctggctaagcgactggaactggtggccgaggtaggtgaggtgaagagccgttacggcctgcctatctatgtgcctgagcgtgaggcgtcgatgctggcttcgcgtcgcaaagaggccgaagcgctcggcgtaccaccggatctgattgaggatgtgctgcgtcgcgtgatgcgggaatcctataccagcgagaatgataaaggctttaaaaccctctgtcctgaactgcgcccggtggtgattgtcggtggtaagggccagatgggccggctgtttgaaaaaatgctcgggctatcaggctacacggttaaaacgctggataaagaggactggcctcaggctgagactctgctcagcgatgccggaatggtgatcattagcgtgccgattcacctgaccgagcaggtgattgcccaactgccaccactgccggaagattgtattctggtcgatctggcgtcagtcaaaaaccggcctctgcaggcaatgctggctgcccataacgggcctgtactgggtctgcatccgatgtttggcccggacagcggcagcctggcaaaacaggtggtggtctggtgtgatggaagacaaccggaagcgtatcagtggttcctggagcagattcaggtctggggtgcgcgtctgcatcgtatcagcgctgttgagcatgaccagaacatggcattcattcaggcgctgcgtcactttgctaccttcgcttatggtctgcatttagccgaagagaacgtcaatctggatcagctgctggcgctctcgtcgcccatttaccggcttgaactggcgatggtggggcggttgttcgctcaggatccgcaactctatgcggatatcatcatgtcttcagagagtaatctggcgctgataaaacgctattaccagcggtttggtgaagcgattgcgctgctggagcagggcgacaagcaggcgtttatcgccagctttaaccgggttgaacagtggtttggcgatcacgcaaaacgcttcctggtcgaaagccgaagcctgttgcgatcggccaatgacagccgcccataa

SEQ ID NO: 521 - protein, 373 aa, Enterobacter agglomerans
MVAELTALRDQIDSVDKALLDLLAKRLELVAEVGEVKSRYGLPIYVPEREASMLASRRKEAEALGVPPDLIEDVLRRVMRESYTSENDKGFKTLCPELRPVVIVGGKGQMGRLFEKMLGLSGYTVKTLDKEDWPQAETLLSDAGMVIISVPIHLTEQVIAQLPPLPEDCILVDLASVKNRPLQAMLAAHNGPVLGLHPMFGPDSGSLAKQVVVWCDGRQPEAYQWFLEQIQVWGARLHRISAVEHDQNMAFIQALRHFATFAYGLHLAEENVNLDQLLALSSPIYRLELAMVGRLFAQDPQLYADIIMSSESNLALIKRYYQRFGEAIALLEQGDKQAFIASFNRVEQWFGDHAKRFLVESRSLLRSANDSRP

SEQ ID NO: 522 - DNA, 1134 bp, Haemophilus influenzae
  CDS (1)..(1134): transl_table=11
gtgagttttatggaagcccttaaagatttacgttctgaaattgattcgcttgatcgcgaacttatccaactttttgctaaacgtcttgagttggtttctcaagtcggtaaagtgaaacatcaacatggattacctatttatgcgccagaacgtgaaatagcaatgctccaagcacgtcgtttagaagctgaaaaagcaggcatttcagccgatttaattgaagatgttctacgccgttttatgcgtgaatcctatgccaatgaaaaccaatttggttttaaaactatcaattctgatattcacaaaattgttattgtgggcggttatggtaaattaggcggcttatttgcccgttatttacgtgcatctggctatccaatttctattttagatcgcgaagattgggcggtggctgaaagtattttagcgaatgctgatgtcgtgatcgtttccgtccctattaatctcaccttagaaacaattgaacgcttaaaaccttatttaacggaaaacatgctacttgcagatttaacctctgttaagcgtgaaccgctagcgaaaatgcttgaagttcatactggtgctgttttaggtttacatccaatgtttggtgcagatattgcaagtatggcaaaacaagtggttgtgcgttgtgatggacgttttcctgaacgttatgaatggttacttgagcaaattcaaatttggggtgcaaaaatttatcaaaccaatgccacagaacacgatcataatatgacttatatacaagccttgcgccatttttcgacttttgcgaatggtttacacctttccaaacagcccattaatctcgctaatttattggcactttcttcccctatttatcggttagaacttgcgatgataggtcgtttatttgcgcaagatgcagagctttacgcagatattattatggataagtcagaaaatttagcggtaattgaaacgctaaaacaaacttacgacgaagccttaactttctttgaaaataatgatcgtcaaggttttattgatgctttccacaaggtgcgtgactggtttggcgattattccgaacaatttttaaaagaaagccgtcagctattgcaacaggcaaatgatttgaaacaagggtag

SEQ ID NO: 523 - protein, 377 aa, Haemophilus influenzae
MSFMEALKDLRSEIDSLDRELIQLFAKRLELVSQVGKVKHQHGLPIYAPEREIAMLQARRLEAEKAGISADLIEDVLRRFMRESYANENQFGFKTINSDIHKIVIVGGYGKLGGLFARYLRASGYPISILDREDWAVAESILANADVVIVSVPINLTLETIERLKPYLTENMLLADLTSVKREPLAKMLEVHTGAVLGLHPMFGADIASMAKQVVVRCDGRFPERYEWLLEQIQIWGAKIYQTNATEHDHNMTYIQALRHFSTFANGLHLSKQPINLANLLALSSPIYRLELAMIGRLFAQDAELYADIIMDKSENLAVIETLKQTYDEALTFFENNDRQGFIDAFHKVRDWFGDYSEQFLKESRQLLQQANDLKQG

SEQ ID NO: 524 - DNA, 24 bp, Artificial sequence
  primer
atggttgctgaattgaccgcatta

SEQ ID NO: 525 - DNA, 23 bp, Artificial sequence
  primer
ttactggcgattgtcattcgcct

SEQ ID NO: 526 - protein, 372 aa, Artificial sequence
  consensus sequence
  Variant (2)..(3): Xaa in position 2 to 3 is any amino acid
  Variant (6)..(7): Xaa in position 6 to 7 is any amino acid
  Variant (10)..(11): Xaa in position 10 to 11 is any amino acid
  Variant (13)..(17): Xaa in position 13 to 17 is any amino acid
  Variant (20)..(21): Xaa in position 20 to 21 is any amino acid
  Variant (24)..(24): Xaa in position 24 is any amino acid
  Variant (27)..(28): Xaa in position 27 to 28 is any amino acid
  Variant (31)..(32): Xaa in position 31 to 32 is any amino acid
  Variant (34)..(36): Xaa in position 34 to 36 is any amino acid
  Variant (42)..(42): Xaa in position 42 is any amino acid
  Variant (44)..(44): Xaa in position 44 is any amino acid
  Variant (47)..(48): Xaa in position 47 to 48 is any amino acid
  Variant (51)..(52): Xaa in position 51 to 52 is any amino acid
  Variant (55)..(55): Xaa in position 55 is any amino acid
  Variant (58)..(60): Xaa in position 58 to 60 is any amino acid
  Variant (62)..(65): Xaa in position 62 to 65 is any amino acid
  Variant (70)..(70): Xaa in position 70 is any amino acid
  Variant (74)..(74): Xaa in position 74 is any amino acid
  Variant (80)..(81): Xaa in position 80 to 81 is any amino acid
  Variant (83)..(84): Xaa in position 83 to 84 is any amino acid
  Variant (85)..(85): Xaa in position 85 is any or no amino acid
  Variant (89)..(97): Xaa in position 89 to 97 is any amino acid
  Variant (100)..(100): Xaa in position 100 is any amino acid
  Variant (103)..(103): Xaa in position 103 is any amino acid
  Variant (105)..(106): Xaa in position 105 to 106 is any amino acid
  Variant (108)..(108): Xaa in position 108 is any amino acid
  Variant (111)..(116): Xaa in position 111 to 116 is any amino acid
  Variant (120)..(120): Xaa in position 120 is any amino acid
  Variant (122)..(123): Xaa in position 122 to 123 is any amino acid
  Variant (125)..(127): Xaa in position 125 to 127 is any amino acid
  Variant (130)..(131): Xaa in position 130 to 131 is any amino acid
  Variant (132)..(132): Xaa in position 132 is any or no amino acid
  Variant (134)..(139): Xaa in position 134 to 139 is any amino acid
  Variant (141)..(142): Xaa in position 141 to 142 is any amino acid
  Variant (144)..(146): Xaa in position 144 to 146 is any amino acid
  Variant (150)..(151): Xaa in position 150 to 151 is any amino acid
  Variant (153)..(155): Xaa in position 153 to 155 is any amino acid
  Variant (157)..(158): Xaa in position 157 to 158 is any amino acid
  Variant (160)..(161): Xaa in position 160 to 161 is any amino acid
  Variant (162)..(162): Xaa in position 162 is any or no amino acid
  Variant (164)..(168): Xaa in position 164 to 168 is any amino acid
  Variant (170)..(170): Xaa in position 170 is any amino acid
  Variant (173)..(173): Xaa in position 173 is any amino acid
  Variant (175)..(175): Xaa in position 175 is any amino acid
  Variant (177)..(178): Xaa in position 177 to 178 is any amino acid
  Variant (181)..(182): Xaa in position 181 to 182 is any amino acid
  Variant (185)..(186): Xaa in position 185 to 186 is any amino acid
  Variant (188)..(188): Xaa in position 188 is any amino acid
  Variant (190)..(190): Xaa in position 190 is any amino acid
  Variant (192)..(192): Xaa in position 192 is any amino acid
  Variant (202)..(203): Xaa in position 202 to 203 is any amino acid
  Variant (204)..(206): Xaa in position 204 to 206 is any or no amino acid
  Variant (208)..(209): Xaa in position 208 to 209 is any amino acid
  Variant (213)..(213): Xaa in position 213 is any amino acid
  Variant (215)..(215): Xaa in position 215 is any amino acid
  Variant (217)..(217): Xaa in position 217 is any amino acid
  Variant (220)..(223): Xaa in position 220 to 223 is any amino acid
  Variant (227)..(227): Xaa in position 227 is any amino acid
  Variant (229)..(229): Xaa in position 229 is any amino acid
  Variant (231)..(233): Xaa in position 231 to 233 is any amino acid
  Variant (237)..(245): Xaa in position 237 to 245 is any amino acid
  Variant (248)..(249): Xaa in position 248 to 249 is any amino acid
  Variant (251)..(253): Xaa in position 251 to 253 is any amino acid
  Variant (256)..(256): Xaa in position 256 is any amino acid
  Variant (260)..(261): Xaa in position 260 to 261 is any amino acid
  Variant (263)..(264): Xaa in position 263 to 264 is any amino acid
  Variant (266)..(267): Xaa in position 266 to 267 is any amino acid
  Variant (269)..(277): Xaa in position 269 to 277 is any amino acid
  Variant (280)..(281): Xaa in position 280 to 281 is any amino acid
  Variant (291)..(291): Xaa in position 291 is any amino acid
  Variant (293)..(293): Xaa in position 293 is any amino acid
  Variant (300)..(302): Xaa in position 300 to 302 is any amino acid
  Variant (305)..(305): Xaa in position 305 is any amino acid
  Variant (309)..(313): Xaa in position 309 to 313 is any amino acid
  Variant (315)..(317): Xaa in position 315 to 317 is any amino acid
  Variant (318)..(318): Xaa in position 318 is any or no amino acid
  Variant (320)..(336): Xaa in position 320 to 336 is any amino acid
  Variant (338)..(340): Xaa in position 338 to 340 is any amino acid
  Variant (342)..(344): Xaa in position 342 to 344 is any amino acid
  Variant (346)..(347): Xaa in position 346 to 347 is any amino acid
  Variant (349)..(350): Xaa in position 349 to 350 is any amino acid
  Variant (354)..(358): Xaa in position 354 to 358 is any amino acid
  Variant (360)..(361): Xaa in position 360 to 361 is any amino acid
  Variant (364)..(365): Xaa in position 364 to 365 is any amino acid
  Variant (368)..(369): Xaa in position 368 to 369 is any amino acid
LXXLRXXIDXXDXXXXXLLXXRLXLVXXVGXXKXXXGLPIYXPXREXXMLXXRRXEAXXXGXXXXLIEDXLRRXMRESYXXEXXXGFKXXXXXXXXXVIXGGXGXXGXLFXXXXXXSGYXVXXLXXXDWXXXAXXXXXXAXXVXXXVPIXXTXXXIXXLXXXLXXXXXLXDLXSXKXXPLXXMLXXHXGXVXGLHPMFGPDXXXXXSXXKQVXVXCXGRXXXXYQWXLXQXXXWGAXXXXXXXXXHDXXMXXXQAXRHFXXFXXGXXLXXXXXXXXXLLXXSSPIYRLELXMXGRLFAQXXXLYXDIIXXXXXNXXXXIXXXXXXXXXXXXXXXXXDXXXFXXXFXXVXXWFGXXXXXFXXESXXLLXXAND

SEQ ID NO: 527 - protein, 61 aa, Artificial sequence
  protein pattern
  Variant (2)..(3): Xaa in position 2 to 3 is any amino acid
  Variant (4)..(4): Xaa in position 4 is Ile or Val
  Variant (7)..(7): Xaa in position 7 is Leu or Met
  Variant (11)..(11): Xaa in position 11 is any or no amino acid
  Variant (13)..(13): Xaa in position 13 is any or no amino acid
  Variant (15)..(15): Xaa in position 15 is Ala or Val
  Variant (16)..(16): Xaa in position 16 is any amino acid
  Variant (18)..(19): Xaa in position 18 to 19 is any amino acid
  Variant (21)..(21): Xaa in position 21 is Ala, Cys, Ser, Thr or Val
  Variant (22)..(22): Xaa in position 22 is any amino acid
  Variant (23)..(23): Xaa in position 23 is Glu or Gln
  Variant (24)..(24): Xaa in position 24 is any amino acid
  Variant (25)..(25): Xaa in position 25 is Ala, Ile, Pro or Val
  Variant (26)..(26): Xaa in position 26 is any amino acid
  Variant (27)..(27): Xaa in position 27 is Ile or Leu
  Variant (28)..(28): Xaa in position 28 is Ala, Asp, Glu or Gln
  Variant (29)..(29): Xaa in position 29 is any amino acid
  Variant (31)..(31): Xaa in position 31 is Leu or Met
  Variant (32)..(32): Xaa in position 32 is any amino acid
  Variant (33)..(33): Xaa in position 33 is Phe, Ile or Leu
  Variant (39)..(39): Xaa in position 39 is any amino acid
  Variant (43)..(43): Xaa in position 43 is Ala or Ile
  Variant (45)..(45): Xaa in position 45 is Ile or Val
  Variant (50)..(50): Xaa in position 50 is Ala or Gly
  Variant (52)..(52): Xaa in position 52 is Asp or Ser
  Variant (53)..(53): Xaa in position 53 is Ala, Gly or Pro
  Variant (54)..(54): Xaa in position 54 is any amino acid
  Variant (57)..(57): Xaa in position 57 is Ala or Gly
  Variant (61)..(61): Xaa in position 61 is Phe, Leu or Met
MXXXQAXRHFXTXFXXGXXLXXXXXXXXXLXXXSSPIYXLELXMXGRLFXQXXXLYXDIIX

SEQ ID NO: 528 - protein, 34 aa, Artificial sequence
  protein pattern
  Variant (2)..(2): Xaa in position 2 is any amino acid
  Variant (3)..(3): Xaa in position 3 is any or no amino acid
  Variant (6)..(6): Xaa in position 6 is Ala or Thr
  Variant (8)..(8): Xaa in position 8 is Ile or Val
  Variant (10)..(11): Xaa in position 10 to 11 is any amino acid
  Variant (13)..(13): Xaa in position 13 is Leu or Met
  Variant (14)..(15): Xaa in position 14 to 15 is any amino acid
  Variant (18)..(18): Xaa in position 18 is any amino acid
  Variant (19)..(19): Xaa in position 19 is Ala, Ile or Val
  Variant (21)..(21): Xaa in position 21 is any amino acid
  Variant (23)..(23): Xaa in position 23 is Ala or Pro
  Variant (25)..(25): Xaa in position 25 is Leu or Val
  Variant (27)..(27): Xaa in position 27 is Phe or Leu
  Variant (33)..(33): Xaa in position 33 is Ala or Pro
LXXDLXSXKXXPXXXMLXXHXGXVXGXHPMFGXD

SEQ ID NO: 529 - protein, 40 aa, Artificial sequence
  protein pattern
  Variant (3)..(3): Xaa in position 3 is Ala or Val
  Variant (5)..(5): Xaa in position 5 is Asp, Glu or Gln
  Variant (8)..(8): Xaa in position 8 is any amino acid
  Variant (9)..(9): Xaa in position 9 is Ala, Asp, Glu or Ser
  Variant (12)..(12): Xaa in position 12 is Ala, Asn, Gln or Ser
  Variant (13)..(13): Xaa in position 13 is any amino acid
  Variant (16)..(16): Xaa in position 16 is any amino acid
  Variant (19)..(21): Xaa in position 19 to 21 is any amino acid
  Variant (23)..(23): Xaa in position 23 is Ile or Val
  Variant (24)..(24): Xaa in position 24 is Ala, Pro or Ser
  Variant (25)..(25): Xaa in position 25 is Ala or Pro
  Variant (26)..(26): Xaa in position 26 is Asp or Gln
  Variant (31)..(31): Xaa in position 31 is Ile or Val
  Variant (35)..(35): Xaa in position 35 is any amino acid
IYXPXREXXMLXXRRXEAXXXGXXXXLIEDXLRRXMRESY

SEQ ID NO: 530 - protein, 39 aa, Artificial sequence
  protein pattern
  Variant (2)..(2): Xaa in position 2 is any amino acid
  Variant (4)..(4): Xaa in position 4 is Ile or Val
  Variant (5)..(5): Xaa in position 5 is Ala, Ile or Val
  Variant (6)..(6): Xaa in position 6 is any amino acid
  Variant (8)..(8): Xaa in position 8 is Asp, Glu or His
  Variant (11)..(12): Xaa in position 11 to 12 is any amino acid
  Variant (13)..(13): Xaa in position 13 is Asp, Glu, Gln or Ser
  Variant (14)..(14): Xaa in position 14 is any amino acid
  Variant (15)..(15): Xaa in position 15 is Phe or Tyr
  Variant (16)..(16): Xaa in position 16 is Glu or Gln
  Variant (18)..(18): Xaa in position 18 is Phe, Leu or Val
  Variant (20)..(20): Xaa in position 20 is Glu or Gln
  Variant (22)..(22): Xaa in position 22 is Phe, Ile or Leu
  Variant (23)..(23): Xaa in position 23 is any amino acid
  Variant (24)..(24): Xaa in position 24 is Ile, Leu, Met or Val
  Variant (28)..(34): Xaa in position 28 to 34 is any amino acid
  Variant (35)..(35): Xaa in position 35 is any or no amino acid
  Variant (37)..(37): Xaa in position 37 is any or no amino acid
KXVXXXCXGRXXXXXXWXLXQXXXWGAXXXXXXXXEXHD

SEQ ID NO: 531 - protein, 36 aa, Artificial sequence
  protein pattern
  Variant (4)..(4): Xaa in position 4 is any amino acid
  Variant (5)..(5): Xaa in position 5 is Ala, Ile, Leu or Val
  Variant (6)..(6): Xaa in position 6 is any amino acid
  Variant (7)..(7): Xaa in position 7 is Asn, Pro or Ser
  Variant (8)..(8): Xaa in position 8 is Ala, Asp, Glu, Asn, Gln or Ser
  Variant (9)..(9): Xaa in position 9 is Ile or Leu
  Variant (10)..(11): Xaa in position 10 to 11 is any amino acid
  Variant (12)..(12): Xaa in position 12 is Ile or Val
  Variant (15)..(15): Xaa in position 15 is Ile or Val
  Variant (18)..(18): Xaa in position 18 is any amino acid
  Variant (20)..(20): Xaa in position 20 is any amino acid
  Variant (21)..(23): Xaa in position 21 to 23 is any or no amino acid
  Variant (26)..(28): Xaa in position 26 to 28 is any amino acid
  Variant (29)..(29): Xaa in position 29 is Phe or Leu
  Variant (30)..(31): Xaa in position 30 to 31 is any amino acid
  Variant (35)..(35): Xaa in position 35 is any amino acid
  Variant (36)..(36): Xaa in position 36 is Ile or Val
GFKXXXXXXXXXVIXGGXGXXXXLFXXXXXXSGYXX

SEQ ID NO: 532 - protein, 35 aa, Artificial sequence
  protein pattern
  Variant (3)..(3): Xaa in position 3 is Asp, Glu, Gly, Ser or Thr
  Variant (4)..(4): Xaa in position 4 is any amino acid
  Variant (7)..(8): Xaa in position 7 to 8 is any or no amino acid
  Variant (10)..(10): Xaa in position 10 is any amino acid
  Variant (11)..(11): Xaa in position 11 is Ala, Glu, Gln, Ser or Thr
  Variant (12)..(12): Xaa in position 12 is Leu or Met
  Variant (13)..(13): Xaa in position 13 is Ile, Leu or Val
  Variant (14)..(14): Xaa in position 14 is any amino acid
  Variant (16)..(16): Xaa in position 16 is Phe or Leu
  Variant (17)..(18): Xaa in position 17 to 18 is any amino acid
  Variant (20)..(20): Xaa in position 20 is Leu or Met
  Variant (21)..(21): Xaa in position 21 is any amino acid
  Variant (24)..(25): Xaa in position 24 to 25 is any amino acid
  Variant (26)..(26): Xaa in position 26 is Ile or Val
  Variant (28)..(28): Xaa in position 28 is any amino acid
  Variant (29)..(29): Xaa in position 29 is Ile or Val
  Variant (31)..(33): Xaa in position 31 to 33 is any amino acid
LRXXIDXXDXXXXXLXXXRXXLVXXXGXXKXXXGL

SEQ ID NO: 533 - protein, 13 aa, Artificial sequence
  protein pattern
  Variant (2)..(3): Xaa in position 2 to 3 is any amino acid
  Variant (5)..(5): Xaa in position 5 is Ile, Leu or Val
  Variant (6)..(6): Xaa in position 6 is Ile or Val
  Variant (7)..(7): Xaa in position 7 is Ala, Cys, Ser or Thr
  Variant (11)..(12): Xaa in position 11 to 12 is any amino acid
  Variant (13)..(13): Xaa in position 13 is Thr or Val
AXXVXXXVPIXXX

SEQ ID NO: 534 - DNA, 1062 bp, Escherichia coli
  CDS (1)..(1062): transl_table=11
atggctatcgacgaaaacaaacagaaagcgttggcggcagcactgggccagattgagaaacaatttggtaaaggctccatcatgcgcctgggtgaagaccgttccatggatgtggaaaccatctctaccggttcgctttcactggatatcgcgcttggggcaggtggtctgccgatgggccgtatcgtcgaaatctacggaccggaatcttccggtaaaaccacgctgacgctgcaggtgatcgccgcagcgcagcgtgaaggtaaaacctgtgcgtttatcgatgctgaacacgcgctggacccaatctacgcacgtaaactgggcgtcgatatcgacaacctgctgtgctcccagccggacaccggcgagcaggcactggaaatctgtgacgccctggcgcgttctggcgcagtagacgttatcgtcgttgactccgtggcggcactgacgccgaaagcggaaatcgaaggcgaaatcggcgactctcacatgggccttgcggcacgtatgatgagccaggcgatgcgtaagctggcgggtaacctgaagcagtccaacacgctgctgatcttcatcaaccagatccgtatgaaaattggtgtgatgttcggtaacccggaaaccactaccggtggtaacgcgctgaaattctacgcctctgttcgtctcgacatccgtcgtatcggcgcggtgaaagagggcgaaaacgtggtgggtagcgaaacccgcgtgaaagtggtgaagaacaaaatcgctgcgccgtttaaacaggctgaattccagatcctctacggcgaaggtatcaacttctacggcgaactggttgacctgggcgtaaaagagaagctgatcgagaaagcaggcgcgtggtacagctacaaaggtgagaagatcggtcagggtaaagcgaatgcgactgcctggctgaaagataacccggaaaccgcgaaagagatcgagaagaaagtacgtgagttgctgctgagcaacccgaactcaacgccggatttctctgtagatgatagcgaaggcgtagcagaaactaacgaagatttttaa

SEQ ID NO: 535 - protein, 353 aa, Escherichia coli
MAIDENKQKALAAALGQIEKQFGKGSIMRLGEDRSMDVETISTGSLSLDIALGAGGLPMGRIVEIYGPESSGKTTLTLQVIAAAQREGKTCAFIDAEHALDPIYARKLGVDIDNLLCSQPDTGEQALEICDALARSGAVDVIVVDSVAALTPKAEIEGEIGDSHMGLAARMMSQAMRKLAGNLKQSNTLLIFINQIRMKIGVMFGNPETTTGGNALKFYASVRLDIRRIGAVKEGENVVGSETRVKVVKNKIAAPFKQAEFQILYGEGINFYGELVDLGVKEKLIEKAGAWYSYKGEKIGQGKANATAWLKDNPETAKEIEKKVRELLLSNPNSTPDFSVDDSEGVAETNEDF

SEQ ID NO: 536 - DNA, 1290 bp, Oryza sativa (japonica cultivar-group)
  CDS (1)..(1290)
atggcgaacctcctgaggcgcgcgtcgctgcggcgcgccgtcgccgccgtcgcggcagcagccgcgccctgccccgagagctataagcaagggatctgtggctctactttccactgccggtatttctcgtctaaagccaaaaagaagacaaagtccagtggaactgactctggtgaagagaatctgtcaaagaaagacttggctctacaccaggctattgatcaaataacatctgcatttgggaagggcgcaataatgtggcttggtcgttctgaaggtcgtagagaagtacctgttgtgtcaactgggtctttctctttggatttggcattgggaactggtggacttccaaagggtcgtgttatagaggtgtatggtccagaagcttcaggcaagacaactcttgcacttcacgttattgcagaagcacaaaagcatggcggttattgtgccttcgtagatgcagagcatgccttagatccagctctggctgaatcaattggggtcaacaccagtaatttacttctctctcagccagactgtggcgagcaggcactcagtcttgtggacacactgattcgaagcggctctgttgatgttgttgttgttgatagtgtagcagctcttgtccctaagagtgagcttgacggggagatgggtgatgcacatgttgctctccaggctagattgatgagccaagctcttcgcaagctgagccactctctctcactttcccagacaattttgttattcattaaccagatcaggtctaaagtgaccacatttggaggatttggaggtccaatggaggttacttctggtggaaatgcccttaaattctatgcttccgttagaatgaacatcaagcgtattggtttggtaaagaaaggcgaagagactataggtagtcaagtgcttgtgaagattgtgaaaaacaagcatgccccaccgttcaagacagcacagtttgagctggaatttggtaaagggatatgccgcagttcagagcttattgaacttggattaaagcacaagcttgtcaaaaagttgggtggtgcattttattctttcaacgaagagtcatatcgtggtaaagatgcccttaaatcttacctcaacgaaaatgaaagtatcgcaaaagaactggagacgaatttaaggaaattgatggaaactcaagcacctaaaaagcaggaggatgaaggtgatttcctgagtgatctgcctgaagagagtctcgccactgaaacatcctccgaggaggaactggcagctgtaatagaagcttaa

SEQ ID NO: 537 - protein, 429 aa, Oryza sativa (japonica cultivar-group)
MANLLRRASLRRAVAAVAAAAAPCPESYKQGICGSTFHCRYFSSKAKKKTKSSGTDSGEENLSKKDLALHQAIDQITSAFGKGAIMWLGRSEGRREVPVVSTGSFSLDLALGTGGLPKGRVIEVYGPEASGKTTLALHVIAEAQKHGGYCAFVDAEHALDPALAESIGVNTSNLLLSQPDCGEQALSLVDTLIRSGSVDVVVVDSVAALVPKSELDGEMGDAHVALQARLMSQALRKLSHSLSLSQTILLFINQIRSKVTTFGGFGGPMEVTSGGNALKFYASVRMNIKRIGLVKKGEETIGSQVLVKIVKNKHAPPFKTAQFELEFGKGICRSSELIELGLKHKLVKKLGGAFYSFNEESYRGKDALKSYLNENESIAKELETNLRKLMETQAPKKQEDEGDFLSDLPEESLATETSSEEELAAVIEA

SEQ ID NO: 538 - DNA, 1257 bp, Oryza sativa (japonica cultivar-group)
  CDS (1)..(1257)
atggccgccgccaccgtcgcagcctcctcccgcttcggccccgcccacctgcttccccgctcccgcaggaaggggagggcccccgcgccgagcgcgcgcgccacggcctgcggagccgtcgggcgaggccgccggctgcgctgcgagttcgtggccggcggcgggaacggcgcgctctccggggaggacgacccgcgcctcatagaccgccaaaaagctcttgatgcagccatgaatgacataaacagctcctttggaaaaggcagtgttacaagattaggaagcgcgggtggtgcctttgttgagacatttccaagtggctgcttgacactagattttgccttgggtggtggccttccaaaaggaagagtagtagaggtgtatggtccagaaagcagtggaaagactactctagcgctgcatgccattgctgaagtacagaaattgggaggcaatgccatgcttgtggatgcagagcatgcttttgatccagcttattctaaagcacttggggtagatattgaaaatctgattgtatgccagccagacaatggagagatggcactagaaattgcggaccgcatgtgcagatctggagctatcgatctcatctgtattgattcagtgtcagctctcactccgcgtgcagaaattgaaggtgagatagggatgcagcagatgggtttacaagcacgtctaatgagtcaagcattgagaaagatgtcaggcaatgcctcaaaggctggttgtactcttatgttcttgaatcaaataagatacaagattggagtattttatggtaatcctgaagtcactagtggagggatagctttgaaattcttcgcatcagttcgactagagatacggcccattggcaagataaaatctgccaagggagatgaagatgtgggtgtgaaggttcgtgtcagagtgcagaagagtaaagtctccagaccctacaagcaagctgaatttgagatcatctttggggagggcgttagtaaactgggatgtgttcttgattgtgctgagctgatggaagtcgttgcaaagaaaggctcatggtatagctacaaagaaatgagattgggtcaaggcagagaaaaagcactgcagtatctccgagagagccctaccatctgtgatgagatagaaaaggctgttcgagccatgataccagaaggagcaagacatatgagcctgctcgctttcgggcggtcatcattgaccgaagaagaacaagtagacgatgagtga

SEQ ID NO: 539 - protein, 418 aa, Oryza sativa (japonica cultivar-group)
MAAATVAASSRFGPAHLLPRSRRKGRAPAPSARATACGAVGRGRRLRCEFVAGGGNGALSGEDDPRLIDRQKALDAAMNDINSSFGKGSVTRLGSAGGAFVETFPSGCLTLDFALGGGLPKGRVVEVYGPESSGKTTLALHAIAEVQKLGGNAMLVDAEHAFDPAYSKALGVDIENLIVCQPDNGEMALEIADRMCRSGAIDLICIDSVSALTPRAEIEGEIGMQQMGLQARLMSQALRKMSGNASKAGCTLMFLNQIRYKIGVFYGNPEVTSGGIALKFFASVRLEIRPIGKIKSAKGDEDVGVKVRVRVQKSKVSRPYKQAEFEIIFGEGVSKLGCVLDCAELMEVVAKKGSWYSYKEMRLGQGREKALQYLRESPTICDEIEKAVRAMIPEGARHMSLLAFGRSSLTEEEQVDDE

SEQ ID NO: 540 - DNA, 1293 bp, Oryza sativa (japonica cultivar-group)
  CDS (1)..(1293)
atggccagggccctcctcctccggcgcggccaccccttcctccgccgcctcctgcggcctcccccgcctcccacctcctctgtactggaatcctgcaatagaaatgtgtcaccaagagttcagttgtggagattctctgcagaagggaaagaccagacaaattcaagtgaagatggttacagtgaggcaaacattaagaagaaggactttgcgctacaacaagctttggaccaaattaagtctgcatttggtgaggagtcaattatgtggctaaatcactcttacggtcctaaagaagttcctgtcatatctactggatcctttgcattggacatggctttaggaattggtgggctcccgaagggaagggttgttgaaatttatggtccagaggcatcaggaaaaaccactttagcacttcatatcatagctgaagcacagaagaatggaggatattgtgcttttattgatgccgagcatgccctggatccaacattagcagaatctataggtgttaaggcagaacacctgttattatctcaaccagactgtggtgaacaggcccttggtcttgctgatatcttaatccgaagtggctctattgatgttgtggttgtggacagtgtagcagctcttgttccaaaaactgaactggatggtgagatgggagatgcccatgttgcacttcaagcaaggcttatgagtcaagcacttcgcaagttgagccattctctttctcgctccaggacaatgttggtgtttattaatcaggtaagatcgaaattaagcacatttagtggattcggagcaccagcagaagtaacctgtggagggaatgccttaaagttctatgcttctgtccgcttgaacaccaaaaggattggtcttataaaaaagtcagaagaggttgtaggcacacaaattcaggtcaagattgtcaagaacaagcatgcacccccatttaagactgtacaccttgagcttgagtttggtaagggcctgagtcgtgaattggagattattgaagtaggcttcaaacacaagttcataacaaaatcaggagtattctatcacttgaacgggcaaaatttccatggaaaggatgctcttaaatgttatctcgctgaaaacaagaatgtcctggaatctctgatgtcaatgataaaggaaagcataatgcaacaggagtcccatccagatagaaacatggaggatgccaacccagatacgagcataacagaagagttcgtttcagcaacagatgaacaagtacctgaagaggttgaggcctga

SEQ ID NO: 541 - protein, 430 aa, Oryza sativa (japonica cultivar-group)
MARALLLRRGHPFLRRLLRPPPPPTSSVLESCNRNVSPRVQLWRFSAEGKDQTNSSEDGYSEANIKKKDFALQQALDQIKSAFGEESIMWLNHSYGPKEVPVISTGSFALDMALGIGGLPKGRVVEIYGPEASGKTTLALHIIAEAQKNGGYCAFIDAEHALDPTLAESIGVKAEHLLLSQPDCGEQALGLADILIRSGSIDVVVVDSVAALVPKTELDGEMGDAHVALQARLMSQALRKLSHSLSRSRTMLVFINQVRSKLSTFSGFGAPAEVTCGGNALKFYASVRLNTKRIGLIKKSEEVVGTQIQVKIVKNKHAPPFKTVHLELEFGKGLSRELEIIEVGFKHKFITKSGVFYHLNGQNFHGKDALKCYLAENKNVLESLMSMIKESIMQQESHPDRNMEDANPDTSITEEFVSATDEQVPEEVEA

SEQ ID NO: 542 - DNA, 1293 bp, Arabidopsis thaliana
  CDS (1)..(1293)
atggcgaggattctccgaaacgtttattcactgagaagctctctgttttcgtcagagttacttagaagaagtgtggttggaacatcgtttcagctccgaggctttgctgccaaagctaaaaagaaatccaagtcagatggaaatggatcatctgaagaaggtatgtcgaaaaaggagattgctcttcagcaagcacttgatcagattaccagttcatttggcaaagggtccataatgtatctcggtcgtgctgtttctcctagaaatgtcccggttttctctaccggatcttttgcccttgatgtagctttgggagttggtggccttcctaaggggcgtgttgtggagatatatggtcctgaagcatcgggaaagacaacacttgctcttcatgttattgcagaagcacaaaaacaaggaggaacctgtgtctttgtagatgctgagcatgctcttgattcgtcacttgctaaggcaatcggtgtaaatacagaaaatctgcttctatcacagcctgattgtggcgaacaggcccttagtcttgtggatactttaatccgaagtggttcagttgatgttattgtagttgacagtgtggctgctcttgtacctaaaggagaacttgagggcgagatgggtgatgcacatatggctatgcaagccagattgatgagccaagctttgcgtaaattgagccattctttatcgttatcgcaaacacttctgatctttataaatcaggtgagatcaaaactatctacgtttggaggatttggaggtccaacagaagttacttgtggtggaaatgctttgaagttttatgcttctatgcgtttgaatatcaagcgaattggacttatcaagaaaggcgaagagacaacgggaagtcaagtctccgtgaagatagtgaagaacaaactcgctccgccgtttagaactgctcagtttgagcttgaattcggcaaaggaatctgcaagatcacggagataatcgacctgagcataaagcacaagttcatcgcgaaaaacggaacattctacaatctcaacggtaaaaactaccatggaaaagaggctttaaagagattccttaaacagaacgaatctgatcaagaagagctcatgaagaagctccaagacaagctcatcgccgatgaagctgcagataaggaaactgaatctgaatctgaggaagaagattccctgagagttgtggtttcacctgacaacacagatgatgaatcaccagctcttgttgttggagctgctgcagtggttgttgaggcagcatga

SEQ ID NO: 543 - protein, 430 aa, Arabidopsis thaliana
MARILRNVYSLRSSLFSSELLRRSVVGTSFQLRGFAAKAKKKSKSDGNGSSEEGMSKKEIALQQALDQITSSFGKGSIMYLGRAVSPRNVPVFSTGSFALDVALGVGGLPKGRVVEIYGPEASGKTTLALHVIAEAQKQGGTCVFVDAEHALDSSLAKAIGVNTENLLLSQPDCGEQALSLVDTLIRSGSVDVIVVDSVAALVPKGELEGEMGDAHMAMQARLMSQALRKLSHSLSLSQTLLIFINQVRSKLSTFGGFGGPTEVTCGGNALKFYASMRLNIKRIGLIKKGEETTGSQVSVKIVKNKLAPPFRTAQFELEFGKGICKITEIIDLSIKHKFIAKNGTFYNLNGKNYHGKEALKRFLKQNESDQEELMKKLQDKLIADEAADKETESESEEEDSLRVVVSPDNTDDESPALVVGAAAVVVEAA

SEQ ID NO: 544 - DNA, 1239 bp, Vibrio cholerae O1 biovar eltor str. N16961
  CDS (1)..(1239): transl_table=11
ttgagcatctcgcagcagatcaggttcaaaacgttaactgagccaaacttttttctatacaggggtggacactgtacaaatcaacagtataataaaccccaacatgacaaatcagcgtcgacccgatttcgacacaattacctatcacctgagagtgactatccggagagagtaatggacgagaataaacagaaggcacttgcggccgccctcggtcaaattgaaaagcaatttggtaaaggctccatcatgcgcttaggcgacaaccgcgcgatggatgtagaaaccatttcgaccggttctctgtctctggatatcgcgttgggtgctggtggtctaccaatgggacgtatcgttgagatcttcggccctgaatcttcgggtaaaacgacactgactctggaactgattgctgctgcacaacgtgaaggtaaaacctgtgcgtttatcgatgccgagcacgcactggatccggtttatgccaaaaaattgggcgtgaatatcgatgagctactggtttctcagccagataccggcgagcaagcactggaaatttgtgatgcactggctcgctctggtgctgtggatgtcatcgttgttgactcagtagcggctttgacaccaaaagcggaaattgaaggcgaaatgggcgatagccacatgggtctgcaagcgcgtatgttgtcgcaagcaatgcgtaaactgacgggtaacctcaagcaatccaactgtatgtgtatcttcatcaaccaaattcgtatgaagattggtgtgatgtttggtaacccagaaactaccactggcggtaacgcactgaaattctacgcttctgttcgtttggatattcgccgtactggcgcaatcaaagaaggcgaagaagtggtgggtaacgaaacccgtatcaaggttgtgaagaacaagattgctgcgccgtttaaagaagcgaacactcagatcatgtatggccaaggtttcaatcgtgaaggtgaattgatcgatcttggtgtgaaacacaaaatggttgagaagtcaggcgcttggtacagctataacggcgataaaatcggccaaggtaaagcgaatgcctacaagtatctgaaagaaaacccagaaattgcgaaaactctagataaaaaactgcgtgaaatgctgttaaacccagaaaacatgcagctgatcgctgaaacatcttctgcggcggatgacgtcgaatttggcgcggtgccagaagagttttaa

SEQ ID NO: 545 - protein, 412 aa, Vibrio cholerae O1 biovar eltor str. N16961
MSISQQIRFKTLTEPNFFLYRGGHCTNQQYNKPQHDKSASTRFRHNYLSPESDYPERVMDENKQKALAAALGQIEKQFGKGSIMRLGDNRAMDVETISTGSLSLDIALGAGGLPMGRIVEIFGPESSGKTTLTLELIAAAQREGKTCAFIDAEHALDPVYAKKLGVNIDELLVSQPDTGEQALEICDALARSGAVDVIVVDSVAALTPKAEIEGEMGDSHMGLQARMLSQAMRKLTGNLKQSNCMCIFINQIRMKIGVMFGNPETTTGGNALKFYASVRLDIRRTGAIKEGEEVVGNETRIKVVKNKIAAPFKEANTQIMYGQGFNREGELIDLGVKHKMVEKSGAWYSYNGDKIGQGKANAYKYLKENPEIAKTLDKKLREMLLNPENMQLIAETSSAADDVEFGAVPEEF

SEQ ID NO: 546 - DNA, 1062 bp, Escherichia coli O157:H7 EDL933
  CDS (1)..(1062): transl_table=11
  misc_feature (78)..(78): y is t or c
  misc_feature (472)..(472): n is a, g, c or t
  misc_feature (702)..(702): r is g or a
atggctatcgacgaaaacaaacagaaagcgttggcggcagcactgggccagattgagaaacaatttggtaaaggctcyatcatgcgcctgggtgaagaccgttccatggatgtggaaaccatctctaccggttcgctttcactggatatcgcgcttggggcaggtggtctgccgatgggccgtatcgtcgaaatctacggaccggaatcttccggtaaaaccacgctgacgttgcaggtgattgccgcagcgcagcgtgaaggtaaaacctgtgcgtttatcgatgctgaacacgcgctggacccaatctacgcacgtaaactgggcgtcgatatcgacaacctgctgtgctcccagccggacaccggcgagcaggcactggaaatctgtgacgccctggcgcgttctggcgcagtaaacgttatcgtcgttgactccgtggcggcactgacgccgaaagcggaaatcgaangcgaaatcggcgactctcacatgggccttgcggcacgtatgatgagccaggcgatgcgtaagctggcgggtaacctgaagcagtccaacacgctgctgatcttcatcaaccagatccgtatgaaaattggtgtgatgttcggtaacccggaaaccactaccggtggtaacgcgctgaaattctacgcctctgttcgtctcgacatccgtcgtatcggcgcggtgaaagarggcgaaaacgtggtgggtagcgaaacccgcgtgaaagtggtgaagaacaaaatcgctgcgccgtttaaacaggctgaattccagatcctctacggcgaaggtatcaacttctacggcgaactggttgacctgggcgtaaaagagaagctgatcgagaaagcaggcgcgtggtacagctacaaaggtgagaagatcggtcagggtaaagcgaatgcaactgcctggctgaaagataacccggaaaccgcgaaagagatcgagaagaaagtacgtgagttgctgctgagcaacccgaactcaacgccggatttctctgtagatgatagcgaaggcgtagcagaaactaacgaagatttttaa

SEQ ID NO: 547 - protein, 353 aa, Escherichia coli O157:H7 EDL933
  misc_feature (158)..(158): The Xaa at location 158 stands for Arg, Cys, Gly, or Ser.
MAIDENKQKALAAALGQIEKQFGKGSIMRLGEDRSMDVETISTGSLSLDIALGAGGLPMGRIVEIYGPESSGKTTLTLQVIAAAQREGKTCAFIDAEHALDPIYARKLGVDIDNLLCSQPDTGEQALEICDALARSGAVNVIVVDSVAALTPKAEIEXEIGDSHMGLAARMMSQAMRKLAGNLKQSNTLLIFINQIRMKIGVMFGNPETTTGGNALKFYASVRLDIRRIGAVKEGENVVGSETRVKVVKNKIAAPFKQAEFQILYGEGINFYGELVDLGVKEKLIEKAGAWYSYKGEKIGQGKANATAWLKDNPETAKEIEKKVRELLLSNPNSTPDFSVDDSEGVAETNEDF

SEQ ID NO: 548 - DNA, 1251 bp, Agrobacterium tumefaciens str. C58
  CDS (1)..(1251): transl_table=11
atgggccgggcacggaaaaacgaaagcagaacaaactacttatcgttatttgttttcaatatgctggctcagccttgcgaaatgagaacaaatagagtacataccgtttccatactgcttcgttgcctgtgcggcttcaataacctaaaggtggttcggatggcacaaaattctttgcgtctcgtagaggataaatcggtggataaaagcaaggcactggaagcggcgctctcccagatcgaacggtcgttcggcaagggatcgatcatgaagctcggttccaatgaaaatgtggttgaagtggaaaccgtttcgacgggctcgctcagcctggatatcgcgctcggcatcggcggcttgccgaaggggcgtatcattgagatttacggcccggaaagctccggtaaaacgacgctggcgctgcagacgatcgcggaagcccagaagaagggcggcatctgcgccttcgtggacgccgaacacgcgctcgatccggtttatgcccgcaagctcggtgtggatttgcagagccttctgatctcgcagcccgataccggcgagcaggcgcttgagatcaccgatacgctggtgcgttcgggcgctgtggacgttcttgtcatcgattcggttgcggccttgacgccgcgggcggaaatcgaaggtgaaatgggcgatagcctgccgggtcttcaggcccgtctgatgagccaggcgctgcgcaagctgaccgcctcgatctccaagtcgaagtgcatggtgatcttcatcaaccagattcgcatgaagatcggcgtcatgtttggttcgccggaaacgacgacgggcggtaacgctctcaagttctatgcgtccgtccgcctcgacatccgccgtatcggcgccgtcaaggagcgcgaagaggttgtcggcaaccagacgcgcgtcaaggtcgtcaagaacaagatggcgccgcccttcaaacaggttgaattcgacatcatgtatggcgaaggtgtttccaagaccggtgagctggtcgatctcggcgtgaaggccggtatcgtcgagaagtccggcgcatggttctcctataacagccagcgtctggggcaggggcgtgaaaacgccaagacctttctgcgcgacaatccggatacggccaatgagatcgaactggcgttgcgccagaatgccggtctgattgccgaccgcttcctgcagaatggtggcccggacgccggtgaaggcgacgacggcagcgacgagggctga

SEQ ID NO: 549 - protein, 416 aa, Agrobacterium tumefaciens str. C58
MGRARKNESRTNYLSLFVFNMLAQPCEMRTNRVHTVSILLRCLCGFNNLKVVRMAQNSLRLVEDKSVDKSKALEAALSQIERSFGKGSIMKLGSNENVVEVETVSTGSLSLDIALGIGGLPKGRIIEIYGPESSGKTTLALQTIAEAQKKGGICAFVDAEHALDPVYARKLGVDLQSLLISQPDTGEQALEITDTLVRSGAVDVLVIDSVAALTPRAEIEGEMGDSLPGLQARLMSQALRKLTASISKSKCMVIFINQIRMKIGVMFGSPETTTGGNALKFYASVRLDIRRIGAVKEREEVVGNQTRVKVVKNKMAPPFKQVEFDIMYGEGVSKTGELVDLGVKAGIVEKSGAWFSYNSQRLGQGRENAKTFLRDNPDTANEIELALRQNAGLIADRFLQNGGPDAGEGDDGSDEG

SEQ ID NO: 550 - DNA, 1110 bp, Vibrio vulnificus YJ016
  CDS (1)..(1110): transl_table=11
ttgtcgaccctatttcgacataattacctatcacctgagagtgactatctggagagagtaatggacgagaacaaacagaaggcactggccgccgcactaggtcaaattgaaaagcagttcggtaaaggttcaatcatgcgcctaggtgacaaccgtgcgatggatgttgaaaccatctcgacaggttcactatctctggatattgcgctgggtgctggtggcttaccaatgggccgtatcgttgaaatttttggtccagaatcttcaggtaaaaccacgttgacccttgagctgatcgctgcggctcaacgtgaaggcaaaacttgtgcgtttatcgatgccgagcacgcgttggatcctgtgtatgcgaagaagcttggcgttaatatcgaccagttgttggtatctcagcctgacaccggtgaacaagcattggaaatctgtgatgctcttgctcgctcaggtgcggttgacgttattgttgtcgactctgttgcagcattgacgccaaaggcagaaatcgaaggtgagatgggcgactcgcacatgggtcttcaagctcgtatgctatctcaagcgatgcgtaagttaacgggtaacctaaagcagtctaactgtatgtgtatcttcatcaaccagatccgtatgaagatcggtgtgatgtttggtaacccagaaaccacaacgggtggtaatgctctgaaattctacgcttctgttcgtcttgatattcgccgtactggtgcgatcaaagaaggtgatgaggtcgtgggtaacgaaacgcgcatcaaagtggtgaagaataagatcgctgcgccgtttaaagaagccaacactcaaattatgtacggccaaggctttaaccgcgaaggtgaactgattgacctaggcgtgaaatgtaagctgattgaaaaatcaggcgcttggtacagctataacggcgacaaaattggccaaggtaaagcgaacgcttgtaaatacctgaaagaaaacgtagatgtcgcaaaagtactggatacgaaattgcgtgaaatgttgctttctccagcaaacatcaacgatgaatcggcagagttagtcgaagaaatgccagagcaagaagagttttaa

SEQ ID NO: 551 - protein, 369 aa, Vibrio vulnificus YJ016
MSTLFRHNYLSPESDYLERVMDENKQKALAAALGQIEKQFGKGSIMRLGDNRAMDVETISTGSLSLDIALGAGGLPMGRIVEIFGPESSGKTTLTLELIAAAQREGKTCAFIDAEHALDPVYAKKLGVNIDQLLVSQPDTGEQALEICDALARSGAVDVIVVDSVAALTPKAEIEGEMGDSHMGLQARMLSQAMRKLTGNLKQSNCMCIFINQIRMKIGVMFGNPETTTGGNALKFYASVRLDIRRTGAIKEGDEVVGNETRIKVVKNKIAAPFKEANTQIMYGQGFNREGELIDLGVKCKLIEKSGAWYSYNGDKIGQGKANACKYLKENVDVAKVLDTKLREMLLSPANINDESAELVEEMPEQEEF

SEQ ID NO: 552 - DNA, 1047 bp, Clostridium difficile 630
  CDS (1)..(1047): transl_table=11
atgagtgtagatcaagaaaaattaaaagcgttgaatgaagctttaggtaaaattgaaaaagattttggtaaaggttcagtaatgaaattgggagaagcaacatctatgtctatagatgttatatcaacaggagcgattggtttagacatagctattggtataggaggtctacctagagggagaatagttgaagtatatggtccagaatcttctggtaagactactgttgcgcttagttgtgtagcatcagctcaaaaagatggaggaatagctgcatttatagatgcagaacatgcacttgacccagtatatgcaaaagctttgggtgtggatgttgataacctaataatatctcaaccagatacaggtgaacaggctttagagatagcagaggcattgataagaagtggagcgatagatataatagtaatagactcagtagcagcattagttccaaaggctgaaatagatggagatatgggtgattctcatgtaggtttacaagctagacttatgtcacaagcacttagaaagttaactggttcaattaaaaaatcaaattgtgttgctatatttataaaccagttaagagagaaagtaggaataatgtttggaaacccagaaactactactggaggacgtgcactaaaattctattcatcagttagattggatgttagaaaaatagatacaataaaacaaggtgataaagttataggtagtagaactagagttaaagttgttaaaaacaaagtagcaccaccatttaagcaagctgaatttgatataatgtatggagaagggatttcaaaaattggagaccttttagatatagctgctgatgtagatatagttaaaaaatcaggttcatggtatagttacaatgatactaaacttggacaaggaagagaaaatgttaaaaaattcttggaagataatttagatttaactactgaaatagatgagaaagttagagcattttacaatttaaatgaagaacatgaagaatcaggtacttcagtatcaaaagaaattgtagaagaataa

SEQ ID NO: 553 - protein, 348 aa, Clostridium difficile 630
MSVDQEKLKALNEALGKIEKDFGKGSVMKLGEATSMSIDVISTGAIGLDIAIGIGGLPRGRIVEVYGPESSGKTTVALSCVASAQKDGGIAAFIDAEHALDPVYAKALGVDVDNLIISQPDTGEQALEIAEALIRSGAIDIIVIDSVAALVPKAEIDGDMGDSHVGLQARLMSQALRKLTGSIKKSNCVAIFINQLREKVGIMFGNPETTTGGRALKFYSSVRLDVRKIDTIKQGDKVIGSRTRVKVVKNKVAPPFKQAEFDIMYGEGISKIGDLLDIAADVDIVKKSGSWYSYNDTKLGQGRENVKKFLEDNLDLTTEIDEKVRAFYNLNEEHEESGTSVSKEIVEE

SEQ ID NO: 554 - DNA, 1104 bp, Herminiimonas arsenicoxydans
  CDS (1)..(1104): transl_table=11
atggacgataaaaaaaacgcaccaagctcggataagagtaaggcactcgctgccgcactggcacaaatcgagaagcaattcggtaaaggctcggtgatgcgcatggaggacggtgccgtcgtcgaagaggtgcaagtcgtgtccactggttcattgggcctggatctcgcgcttggcgtcggcggtttgccgcgcggccgcgtagtggaaatttacggtccggaatcgtcgggtaaaaccacgctgacgctgcaaaccatcgcagaaatgcagaaactgggcggcacctgcgcgtttatcgatgcggagcatgcgctggatgtgacgtatgcgcaaaaactgggtatcaacctgtcggaattgttgatttcgcagccggataccggcgaacaggctttggaaatttgcgatgcgctggtgcgctccggcggcgttgatctgattgtcatcgactcggtcgccgccttgacgccgcgtgccgagatcgaaggcgatatgggcgattccctgcctggtctgcaggcgcgcctgatgtcgcaggccttgcgcaaactgaccggcagcatcaaccgcaccaatacgctggtgatttttatcaaccagattcgcatgaaaatcggcgtcatgttcggcaatccggaaaccacgaccggtggtaatgcattgaaattttatgcttcggtacgcctggatattcgtcgtaccggctcgatcaaatcgggcgatgaagtcatcggcaatgaaaccaaggtcaaggtcgtcaagaacaagatcgcgccgccattcaaggaagcgcatttcgaaattctgtatggcgaaggcacatcgcgcgaaggcgagattctggatctgggttcggatgcaaaaatcgtcgaaaaatccggtgcctggtatagctataacggcgaacgtattggccagggcaaggacaatgcacgcaattatttgaaagagcgtccggaactcgcgcgtgaaatcgaaaacaaggtgcgcgcctccttgggcgtgcctgaactcggcgcgatcaagtcggatgaacctgttgcgaagaaggcttccgccaaggaaagcaaggaagccaaagagctgaaagaagtcgagtaa

SEQ ID NO: 555 - protein, 367 aa, Herminiimonas arsenicoxydans
MDDKKNAPSSDKSKALAAALAQIEKQFGKGSVMRMEDGAVVEEVQVVSTGSLGLDLALGVGGLPRGRVVEIYGPESSGKTTLTLQTIAEMQKLGGTCAFIDAEHALDVTYAQKLGINLSELLISQPDTGEQALEICDALVRSGGVDLIVIDSVAALTPRAEIEGDMGDSLPGLQARLMSQALRKLTGSINRTNTLVIFINQIRMKIGVMFGNPETTTGGNALKFYASVRLDIRRTGSIKSGDEVIGNETKVKVVKNKIAPPFKEAHFEILYGEGTSREGEILDLGSDAKIVEKSGAWYSYNGERIGQGKDNARNYLKERPELAREIENKVRASLGVPELGAIKSDEPVAKKASAKESKEAKELKEVE

SEQ ID NO: 556 - DNA, 1071 bp, Burkholderia vietnamiensis G4
  CDS (1)..(1071): transl_table=11
atggaagatagcaagaagggctccgggatgaccgccgagaagagcaaggcgctggcggccgcactcgcgcagatcgagaagcagttcggcaaagggtcgatcatgcggatgggcgacggcgacgtgaaggaagacatccaggtcgtctccacgggctcgctgggcctcgatatcgcgctcggcgtcggcggcctgccgcgcggccgggtggtcgaaatctacggtccggaatcgtccggcaagaccacgctcacgctgcaggtgatcgccgagctgcagaagctgggcggcaccgcagccttcatcgacgccgagcacgcgctcgacgtccagtacgcggcgaagctcggcgtgaacgtgccggagctgctgatctcgcagccggacaccggcgaacaggcgctcgaaatcaccgacgcgctcgtgcgctcgggctcgatcgacatgatcgtcatcgactcggtcgcggcactggtgccgaaggccgaaatcgaaggcgagatgggcgattcgctgccgggtctgcaggcgcgtctgatgtcgcaggcgctgcgcaagctgacgggtacgatcaagcgcacgaactgcctcgtgatcttcatcaaccagatccggatgaagatcggcgtgatgttcggcaacccggaaaccacgacgggcggcaatgcactgaagttctattcgtcggtgcgtctggacatccgccggatcggctcgatcaagaagaacgacgaggtgatcggcaacgaaacccgcgtgaaggtcgtcaagaacaaggtatcgccgccgttccgcgaagcgatcttcgacatcctctacggcgaaggcatttcgcgtcagggcgagatcatcgatctcggcgtgcaggcgaaaatcgtcgacaaggccggcgcctggtacagctacaacggcgagaagatcggtcagggcaaggacaacgcgcgtgaattcctgcgcgagaatcccgaaatcgcacgcgagatcgagaaccgcattcgcgagtcgctcggtgtcgtcgcgatgcccgatggcgtggtcgacgaagccgaggcgatggacgaagaagagtga

SEQ ID NO: 557 - protein, 356 aa, Burkholderia vietnamiensis G4
MEDSKKGSGMTAEKSKALAAALAQIEKQFGKGSIMRMGDGDVKEDIQVVSTGSLGLDIALGVGGLPRGRVVEIYGPESSGKTTLTLQVIAELQKLGGTAAFIDAEHALDVQYAAKLGVNVPELLISQPDTGEQALEITDALVRSGSIDMIVIDSVAALVPKAEIEGEMGDSLPGLQARLMSQALRKLTGTIKRTNCLVIFINQIRMKIGVMFGNPETTTGGNALKFYSSVRLDIRRIGSIKKNDEVIGNETRVKVVKNKVSPPFREAIFDILYGEGISRQGEIIDLGVQAKIVDKAGAWYSYNGEKIGQGKDNAREFLRENPEIAREIENRIRESLGVVAMPDGVVDEAEAMDEEE

SEQ ID NO: 558 - DNA, 1089 bp, Bradyrhizobium sp. ORS278
  CDS (1)..(1089): transl_table=11
atgtccgccaccgccctgcgtatcgtcgaaggttcctccatggataagagtaaggcgctctcggcagcgctgtcccagatcgagcgtcagttcggcaagggctcggtgatgaagctcggcaagaacgaccgctcgatggacgtcgagacagtgtcgacgggctctctcgggctggacatcgcgctggggatcggcggcctgccgaaggggcgcatcgtcgagatctacgggcctgaatcgtcgggcaagacgacgctggcactgcatacagtggcggaggcgcagaagaagggcggcatctgcgcgttcatcgatgccgagcatgcgctcgatccggtctatgcgcgcaagctgggggtcaacatcgatgagctcctgatctcgcagccggacaccggcgagcaggcgctggagatctgcgacacgctggtccgctccggtgccgttgacgtgctggtcgtcgactcggtggcggcgctggtcccgaaggccgagctcgagggtgagatgggcgagtcgctgcccggcctgcaggcgcgattgatgagccaggcgctgcgcaagctgacggcctcgatcaacaagtccaacacgatggtcatcttcatcaaccagatccgcatgaagatcggcgtgatgtacggctcgcccgagaccaccacgggcggcaacgcgctgaagttctatgcttcggtgcgcctcgacatccgccgcatcggcgcgatcaaggagcgcgacgaggtgatcggcaacaccacccgcgtcaaggtcgtcaagaacaagctggcgccgccgttcaagcaggtcgagttcgacatcatgtatggcgagggcgtgtccaagatgggcgagatcctcgatctcggcgtcaaggccgggatcgtcgagaagtcgggtgcctggttctcttatgacagccagcggctcgggcaggggcgtgagaattcgaaatcgttcctgaaggcgaaccccgacatgaccgccaagatcgaggcggccattcgccagaattccggcctgatcgccgagcagatcctggccggcgccgccgagcgcgacgccgacggagaggagccggcggaggagtag

SEQ ID NO: 559 - protein, 362 aa, Bradyrhizobium sp. ORS278
MSATALRIVEGSSMDKSKALSAALSQIERQFGKGSVMKLGKNDRSMDVETVSTGSLGLDIALGIGGLPKGRIVEIYGPESSGKTTLALHTVAEAQKKGGICAFIDAEHALDPVYARKLGVNIDELLISQPDTGEQALEICDTLVRSGAVDVLVVDSVAALVPKAELEGEMGESLPGLQARLMSQALRKLTASINKSNTMVIFINQIRMKIGVMYGSPETTTGGNALKFYASVRLDIRRIGAIKERDEVIGNTTRVKVVKNKLAPPFKQVEFDIMYGEGVSKMGEILDLGVKAGIVEKSGAWFSYDSQRLGQGRENSKSFLKANPDMTAKIEAAIRQNSGLIAEQILAGAAERDADGEEPAEE

SEQ ID NO: 560 - DNA, 1053 bp, Dichelobacter nodosus VCS1703A
  CDS (1)..(1053): transl_table=11
atgaatgaagaacagaaaaaagcattaaccgccgttttaacgcaattagataaacaatttggcaaaggaaccgtgatgcgtttgggcgagcaagttgccgcgcacgatattcaagccatttctacgggttcattaacgctcgatattgcgcttggcatcggcggattgcctaaaggacgcatcgttgaaatctacgggcctgaatcttcgggaaaaactacgatgatgttacacgtcatcgctgaagcgcaaaaaaacggcggcacggcagcatttatcgatgccgaacacgcattagatccgatttatgcccgaaaattaggcgttaataccgatgatttatacgtcacacaacccgataccggcgaacaagcgttagaaatttgcgatgctttagtgcgcagcggcgcgtttgacgttatcgtggttgattccgttgccgcgttaacgccaaaagcagaaattgaaggcgaaatgggcgattctcacgttggtttacaagcgcgcttgatgagtcaagctttgcgcaaattaaccggaaatattaagcgcgccaatacgctcgttgtttttattaaccaaatccgcatgaaaattggcgttatgtttggttctccagaaacaaccaccggcggcaatgcgctgaaattttacgcttccgtacgtatggatatccgccgcatcggttcaattaaagaaggcgacgaagtcctcggtaatgaaacgcgcgtaaaagtcgtgaaaaacaaagtagcgccgccatttaagcaagcagaatttgatattttatacggtcaaggcgtttcacgcgaaggggaaattattcaacttgccgttaatgccgatatcatgcaaaaatccggcgcgtggtacagttaccgcgatgaaaaaatcggacaaggtaaagaaaaagtacggctttatttaaaagaacaccccgacgtcgcacaagaaattgaaacgaaaatccgcgaaaaatttatcggcggtgaattgcatttacctgatgccgccggcgatgaaatcgatacctcaatcaatgatgaagaatga

SEQ ID NO: 561 - protein, 350 aa, Dichelobacter nodosus VCS1703A
MNEEQKKALTAVLTQLDKQFGKGTVMRLGEQVAAHDIQAISTGSLTLDIALGIGGLPKGRIVEIYGPESSGKTTMMLHVIAEAQKNGGTAAFIDAEHALDPIYARKLGVNTDDLYVTQPDTGEQALEICDALVRSGAFDVIVVDSVAALTPKAEIEGEMGDSHVGLQARLMSQALRKLTGNIKRANTLVVFINQIRMKIGVMFGSPETTTGGNALKFYASVRMDIRRIGSIKEGDEVLGNETRVKVVKNKVAPPFKQAEFDILYGQGVSREGEIIQLAVNADIMQKSGAWYSYRDEKIGQGKEKVRLYLKEHPDVAQEIETKIREKFIGGELHLPDAAGDEIDTSINDEE

SEQ ID NO: 562 - DNA, 1125 bp, Leifsonia xyli subsp. xyli str. CTCB07
  CDS (1)..(1125): transl_table=11
atgtcccccgtaccgtcgaactcgtcagcgaagtccaaaggagaaccgcacatgccatcacccgcagaccgcgagaaggcgctcgtgaccgcgctcgcacagatcgaccgtcagttcggaaaaggctcggtcatgcgactgggcagcgacgagcgcgctcctgtcgaggtcgtcccgaccgggtcgatcgccctggatgtcgcgcttggcatcggcggtcttccgcgtggccgcatcgtcgagatctatggcccggaatcgtcgggtaagaccaccctgaccctgcacgcgatcgccaacgcgcagcgcgcgggcggcatcgctgccttcatcgacgcggagcacgcgctcgacccggactacgcccgcaagctcggcgtcgacatcgacgcactgctggtctcccagccagacaccggtgagcaggcgctggagatcgcggacatgctggtgcgttccggctcgatcgacttgatcgtcatcgactccgtcgccgcgctcgtcccccgtgccgagatcgagggcgagatgggcgacgcgcacgtcggtctgcaggcccgtctcatgtcgcaggcgctccgtaagctcaccggtgcgctcagccagacgaacaccacgatgatcttcatcaaccagctccgcgagaaagtgggagtgttcttcggcagcccggagaccacagccggtggaaaggcgctcaagttctacgcctcggtccgtctcgacatccgccgcatcgagacgctcaaagacggcaccgacgcggtcggaaaccgcacccgcgttaaggtcgtcaagaacaagatggcaccgcccttcaaacaggcggaattcgacatcctgtacggtgtcggcatctcccatgagggcagccttctcgatttcggtgtggagcacgcgctcgtcaagaagtccggtgcctggtacacttacgagggcgaccagctgggccagggcaaagagaactcgcgcaactttctcatcgccaacccggacatcgccgcggagatcgagaacaaaatcaagatcaagctcggcatcgtggccgatccgaacgccgacgccgaaccgaccgctgcggccggctctctggaggagaagctgccggcccgcaagggcgcctga

SEQ ID NO: 563 - protein, 374 aa, Leifsonia xyli subsp. xyli str. CTCB07
MSPVPSNSSAKSKGEPHMPSPADREKALVTALAQIDRQFGKGSVMRLGSDERAPVEVVPTGSIALDVALGIGGLPRGRIVEIYGPESSGKTTLTLHAIANAQRAGGIAAFIDAEHALDPDYARKLGVDIDALLVSQPDTGEQALEIADMLVRSGSIDLIVIDSVAALVPRAEIEGEMGDAHVGLQARLMSQALRKLTGALSQTNTTMIFINQLREKVGVFFGSPETTAGGKALKFYASVRLDIRRIETLKDGTDAVGNRTRVKVVKNKMAPPFKQAEFDILYGVGISHEGSLLDFGVEHALVKKSGAWYTYEGDQLGQGKENSRNFLIANPDIAAEIENKIKIKLGIVADPNADAEPTAAAGSLEEKLPARKGA

SEQ ID NO: 564 - DNA, 1059 bp, Psychrobacter arcticus 273-4
  CDS (1)..(1059): transl_table=11
atggacgacaataaagccaaagcccttaaagctgcgctcgctcaaatcgaaaagcaatttggtaaaaataccatcatgcatttgggtgatgactcagcagcacttgatgtcgatgtggtctctactggctcattaggtttagatattgctctagggattggtggtctgccaaaaggtcgtatcgttgaaatttacggccctgaaagctcaggtaaaacgacgatgaccttacaggcgattgcagagtgccaaaagcaaggcggtgtttgtgcctttatcgatgctgagcacgcactagatccagtatatgcacgcaagcttggcgtcaatacggatgatttactactctcacagcctgataatggagagcaagcgcttgaaattactgatatgttggtacgttcaggggcgatcgatatgatcgttattgactcggttgccgctttgacaccacgtgcagagattgaaggcgagatgggcgattcacatatgggtctgcaagcacgtctgatgagccaagccttacgtaaaattactggtaacgccaagcgctcaaactgtatggtgttatttattaaccaaattcgtatgaaaattggcgttatgtttggtagccctgagaccacaaccggtggtaatgcgcttaaattctatgcctctgtgcgtatggatattcgccgtattggtgcggtgaagaatggtgatgaaatcatcggtaaccaaactcgcgttaaagtcatcaaaaataaaatggcaccaccatttcgtcaagctgagtttgagattacttacggtgaaggtaccaatcacttagccgaagtgattgatttaggtgttgagattggtgcggttggtaaagcgggttcttggtacagctatggtgatgaaaaaatcggtcaaggcaaagccaattctgtactgttcttaaaagagaaccctgctattgctgaagagatagaagccaaaatccgtgctgaaaagcttggcgtaaaggatgatagcaaagcagcggtcgtggctgagactaatgaagaactagcctctgaacctgtacaataa

SEQ ID NO: 565 - protein, 352 aa, Psychrobacter arcticus 273-4
MDDNKAKALKAALAQIEKQFGKNTIMHLGDDSAALDVDVVSTGSLGLDIALGIGGLPKGRIVEIYGPESSGKTTMTLQAIAECQKQGGVCAFIDAEHALDPVYARKLGVNTDDLLLSQPDNGEQALEITDMLVRSGAIDMIVIDSVAALTPRAEIEGEMGDSHMGLQARLMSQALRKITGNAKRSNCMVLFINQIRMKIGVMFGSPETTTGGNALKFYASVRMDIRRIGAVKNGDEIIGNQTRVKVIKNKMAPPFRQAEFEITYGEGTNHLAEVIDLGVEIGAVGKAGSWYSYGDEKIGQGKANSVLFLKENPAIAEEIEAKIRAEKLGVKDDSKAAVVAETNEELASEPVQ

SEQ ID NO: 566 - DNA, 1038 bp, Colwellia psychrerythraea 34H
  CDS (1)..(1038): transl_table=11
atgaaagacgataaagaaaaagcactatcagcagccttagcccaaattgaacgtcaattcggtaaaggttcaataatgaagcttggtgataataccaccatggatgtagaaactatttctacgggttcattaggcttagatatcgccttaggtgctggcggcttaccaatgggtcgagttgttgaaatttatggtcctgaatcaagcggtaaaaccacgttaactttagaagttattgctgaagcacaacgcaatggtaaagtttgtgcttttatcgatgcagagcatgctcttgaccctgtttatgctgaaaaattaggtgttaacattgatgagttattaatttctcaacctgataccggcgaacaagctctagaaattgttgatatgttaacgcgctctggtgctatcgacgttattgtagttgactctgttgccgcgcttacacctaaagctgaaattgaaggcgatatgggtgattcacatatgggcttgcaagcacgtatgttgtcacaagcgatgcgtaaacttaccggtaatttgaaaaaatctaatactatgcttatcttcattaaccaaattcgtatgaaaattggtgttatgtttggtagcccagaaacgacgaccggtggtaatgcgttaaaattctacgcttctgtacgtttagatatccgtcgtattggcgcggttaaaaacggtgatgaaatcgttggtaatgaaacgcgtgtgaaagtcgttaaaaacaaaattgcgccaccgtttaaacaagctgaattccaaattttatacggtgaaggaattaacaacttaggtgagttaattgaattaggcgttaagcatgagtttgtagagaaagcaggtgcttggtatagctgtaatggtgaaagaattggtcaaggtaaagctaatgctgctaaatatttagatgaacatcctgaaatggctaaagatgttgatactaaattacgcgatatgtttttatcaaaaactgttgtggcagaagataaatcagaagtaaaagaaaaagaaaaagcataa

SEQ ID NO: 567 - protein, 345 aa, Colwellia psychrerythraea 34H
MKDDKEKALSAALAQIERQFGKGSIMKLGDNTTMDVETISTGSLGLDIALGAGGLPMGRVVEIYGPESSGKTTLTLEVIAEAQRNGKVCAFIDAEHALDPVYAEKLGVNIDELLISQPDTGEQALEIVDMLTRSGAIDVIVVDSVAALTPKAEIEGDMGDSHMGLQARMLSQAMRKLTGNLKKSNTMLIFINQIRMKIGVMFGSPETTTGGNALKFYASVRLDIRRIGAVKNGDEIVGNETRVKVVKNKIAPPFKQAEFQILYGEGINNLGELIELGVKHEFVEKAGAWYSCNGERIGQGKANAAKYLDEHPEMAKDVDTKLRDMFLSKTVVAEDKSEVKEKEKA

SEQ ID NO: 568 - DNA, 1032 bp, Dechloromonas aromatica RCB
  CDS (1)..(1032): transl_table=11
atggacgacaacaaggcaaaagcgctcgccgcagcactgcaacagatcgaaaagcaattcggcaaaggctccatcatgaagatgggcgatgccgaaatcgacgaaggcattcaggtcgtgtcgaccggttcgctcggtctggacattgcgctgggcgttggcggtctgccacgcggccgtgtcgttgaaatctatggtccggaatcctccggcaagaccacgctctgtctgcaggtcgtggccgaaatgcagaagctcggtggcgttgccgccttcatcgacgccgaacacgcgctcgatccgcaatatgcccagaagctcggcgtcaatgtcggcgacctgctgatctcgcagccggataccggcgaacaggccctcgaaattgctgacatgctggtccgctccggctcagtcgacatcatcgtcgtcgactcggtcgccgcccttaccccgcgcgccgaaatcgaaggcgaaatgggcgaccagatggtcggcctgcatgcccgcctgatgtcgcaggccctgcgcaagctgactgccaatatcaagaagaccaacacgctggtcatcttcatcaaccagatccggatgaagatcggcgtcatgttcggttcgccggaaaccaccactggtggcaatgcgctcaagttctacgcctccgtccgcctcgacatccgccgtatcggcgcgatcaagaagggtgacgaagtcatcggcagcgaaaccaaggtcaaggtcgtcaagaacaaggtcgccccacccttccgcgaagccattttcgacatcctctacggcgagggtatttcccgccagggcgaaatcgtcgaaatgggtgttgcccacaaactggtcgacaagtccggtgcctggtatgcctacaagggcgaaaagatcggccagggcaaggacaatgcccgtgaattcctgaaagccaatccggaaatcgcccaggaaatcgaagccggcattcgtgaggctgccagcaccaacgtgatcaagccggtcaaggcggccaaggcagcggatgcctga

SEQ ID NO: 569 - protein, 343 aa, Dechloromonas aromatica RCB
MDDNKAKALAAALQQIEKQFGKGSIMKMGDAEIDEGIQVVSTGSLGLDIALGVGGLPRGRVVEIYGPESSGKTTLCLQVVAEMQKLGGVAAFIDAEHALDPQYAQKLGVNVGDLLISQPDTGEQALEIADMLVRSGSVDIIVVDSVAALTPRAEIEGEMGDQMVGLHARLMSQALRKLTANIKKTNTLVIFINQIRMKIGVMFGSPETTTGGNALKFYASVRLDIRRIGAIKKGDEVIGSETKVKVVKNKVAPPFREAIFDILYGEGISRQGEIVEMGVAHKLVDKSGAWYAYKGEKIGQGKDNAREFLKANPEIAQEIEAGIREAASTNVIKPVKAAKAADA

SEQ ID NO: 570 - DNA, 1062 bp, Ralstonia eutropha JMP134
  CDS (1)..(1062): transl_table=11
atggatgacaagaaggcaggtgccggcctgagcgccgagaagcagaaggcgcttgccgccgcgctctcgcagatcgagaagcagtttggcaagggctcgatcatgcgcatgggcgacggcgaggtcgagaaggacatccaggtggtctccaccggctccctcggccttgacatcgcgctgggcgtcggcggcctgccgcgcggccgcgtggtcgagatctacggcccggaatcgtcgggcaagaccacgctgacgctgcaggtcgttgccgaaatgcagaagcttggcggcacctgcgcctttatcgatgccgagcacgcgctcgacgtcaactacgcctccaagcttggcgtggacgtgggcgagctgctgatctcccagccggacactggcgaacaagcgctcgaaatcaccgatgcgctggtgcgctcgggctcgatcgacctgatcgtgatcgactcggtggccgcgctggtgccgaaggctgaaatcgaaggcgaaatgggtgattcgctgcccggcctgcaggcccgcctgatgagccaggcgctgcgcaagctgaccggcaccatcaagcgcaccaactgcctggtgatcttcatcaaccagatccgtatgaagatcggtgtgatgttcggttcgcctgaaacgaccacgggcggcaatgcgctgaagttctacgcttccgtgcgcctggacatccgccgcatcggctcgatcaagaagggcgacgacgtgatcggcaacgagaccaaggtcaaggtggtcaagaacaaggtatcgccgccgttccgcgaggccttcttcgacatcctctatggccagggcatctcgcgccagggcgagatcatcgacctcggcgtggacgccaagatcgtcgagaagtcgggcgcctggtacagctacaacggcgacaagatcgggcagggcaaggacaatgcgcgcgagtacctgcgcgaaaatcccgacatcgctcaggaaatcgagaacaaggtccgcgccgcgctgggcgttgcgccgatgaacagtgttccggcggccgaggtcgtgacggaagactga

SEQ ID NO: 571 - protein, 353 aa, Ralstonia eutropha JMP134
MDDKKAGAGLSAEKQKALAAALSQIEKQFGKGSIMRMGDGEVEKDIQVVSTGSLGLDIALGVGGLPRGRVVEIYGPESSGKTTLTLQVVAEMQKLGGTCAFIDAEHALDVNYASKLGVDVGELLISQPDTGEQALEITDALVRSGSIDLIVIDSVAALVPKAEIEGEMGDSLPGLQARLMSQALRKLTGTIKRTNCLVIFINQIRMKIGVMFGSPETTTGGNALKFYASVRLDIRRIGSIKKGDDVIGNETKVKVVKNKVSPPFREAFFDILYGQGISRQGEIIDLGVDAKIVEKSGAWYSYNGDKIGQGKDNAREYLRENPDIAQEIENKVRAALGVAPMNSVPAAEVVTED

SEQ ID NO: 572 - DNA, 1074 bp, Ehrlichia canis str. Jake
  CDS (1)..(1074): transl_table=11
atgtctgatagtaaaaatttgaaccaagaaagacagaaagcattggataatgcaattagtcaaattgaaaaagcttttggtcgtggtgcaataatgaagttaaagcagggtgctattgaaaaaatagatagtatttctacaggttcaattgcacttgatacggctttaggtattggtggatttcctaaaggcagaattgttgagatttttggacctgaaagctctggtaaaacaactcttgctttacatgtaattgctgaatcacaaaaaaaaggcggaaattgtgcatttattgatgctgaacatgctttggacataatgtatgcacgtaaattaggtgtaaatactggtgatttgattgtttctcaacctgatactggtgaacaagcactccatatagttgaatatttagtgtgttcaggtgctattgatgtgatagtagtagattctgttgctgcattaacccctagggcagaaatagaaggtgatatgggtgatcagcatatgggcttacaagcgagattgttaagtcatgctttaaggaaattaacttctattgtatcaaaagcaaattgtgtgcttatttttattaatcagatacgtatgaaaataggtgtagtttatggaaatcctgaaactactactggtggaaatgcgttgaaattttatagttctgtaagattggatatacgcaaagtaagtgcaattaaagataaagacttaattattggcaatcaaactaaggtaaaggttgttaaaaataaggtagctcctccttttaagcaggtggactttgatataatgtataatgaaggcatctcaaaagttggtgaaattatagatatgggtgtaaagcttaatattattgagaaagctggtgcatattactcatataatggcatacgtctaggtcagggtaaagaaaatgcaaaatcttatcttaagacaaattatactactgcagatgaaatagaacaaaaaataagaaatatgttagcaagtgatagtgatgtgacttgttttaatacagaaggtagtgataatcttcatgaggtagaagaagcaattttttaa

SEQ ID NO: 573 - protein, 357 aa, Ehrlichia canis str. Jake
MSDSKNLNQERQKALDNAISQIEKAFGRGAIMKLKQGAIEKIDSISTGSIALDTALGIGGFPKGRIVEIFGPESSGKTTLALHVIAESQKKGGNCAFIDAEHALDIMYARKLGVNTGDLIVSQPDTGEQALHIVEYLVCSGAIDVIVVDSVAALTPRAEIEGDMGDQHMGLQARLLSHALRKLTSIVSKANCVLIFINQIRMKIGVVYGNPETTTGGNALKFYSSVRLDIRKVSAIKDKDLIIGNQTKVKVVKNKVAPPFKQVDFDIMYNEGISKVGEIIDMGVKLNIIEKAGAYYSYNGIRLGQGKENAKSYLKTNYTTADEIEQKIRNMLASDSDVTCFNTEGSDNLHEVEEAIF

SEQ ID NO: 574 - DNA, 1095 bp, Thiobacillus denitrificans ATCC 25259
  CDS (1)..(1095): transl_table=11
atgcggacgctgctccgcttccatttaaacccaggagagagaaccatggcatcccccgcattgacagacgacaaatcgaaggcactcgccgccgcgctcggacagatcgaaaagcagttcggcaagggctcggtcatgcgcttgggcgaccatgacgtttcgcgcgacatccaggccgtctccaccggctcgctcggactcgacatcgcgctcggcgtcggcggcctgccgcgcggccgcgtgatcgagatctacggcccggagtcgtccggcaagaccacgctcacgctgcaggtcatcgccgaaatgcaaaaaatgggcggcactgccgcgttcatcgacgccgaacacgcgctcgatccgagctacgcgcacaagctcggcgtcgacgtcgacaacctgctggtctcgcaacccgacaccggcgaacaggcgctcgaaatcgccgacatgctggtgcgctcgggcagcgtcgacgtcgtcgtcgtcgactcggtcgccgccttgacgccgaaggccgaaatcgaaggcgagatgggcgactcacacatggggctccaggcgcggctgatgagccaggccctgcgcaagctcaccgccaacatcaagcggacgaatacgctggtcatctttattaatcaaattcgcatgaagatcggcgtcatgttcggcaaccccgagacgactaccggcggcaatgcactcaagttctacgccagcgtgcgcctcgacatccgccgcaccggcgcgatcaagaagggcgacgagatcatcggcaacgaaaccaaggtcaaggtcgtcaagaacaaggtctcgccgccgttcaaggaagcctacttcgacatcctctacggccagggcatctcgcgcgaaggcgagatcatcgaactcggcgtcgcccacaaactcgtcgacaagtccggcgcctggtacgcctacaacggcgaaaagatcggccagggcaaggacaacgcgcgcgaattcctaaaagaacacccggaaatcgcgcacgagatcgaggccaaggttcgcgctgccgtcggcgtcaacaaccccacgatcgcggtcgaggatgaagacgaagtcgaggcctga

SEQ ID NO: 575 - protein, 364 aa, Thiobacillus denitrificans ATCC 25259
MRTLLRFHLNPGERTMASPALTDDKSKALAAALGQIEKQFGKGSVMRLGDHDVSRDIQAVSTGSLGLDIALGVGGLPRGRVIEIYGPESSGKTTLTLQVIAEMQKMGGTAAFIDAEHALDPSYAHKLGVDVDNLLVSQPDTGEQALEIADMLVRSGSVDVVVVDSVAALTPKAEIEGEMGDSHMGLQARLMSQALRKLTANIKRTNTLVIFINQIRMKIGVMFGNPETTTGGNALKFYASVRLDIRRTGAIKKGDEIIGNETKVKVVKNKVSPPFKEAYFDILYGQGISREGEIIELGVAHKLVDKSGAWYAYNGEKIGQGKDNAREFLKEHPEIAHEIEAKVRAAVGVNNPTIAVEDEDEVEA

SEQ ID NO: 576 - DNA, 1074 bp, Rhodobacter sphaeroides 2.4.1
  CDS (1)..(1074): transl_table=11
atggcgacggcgaacctgctcgacttgaacggaaggcgcgagatggacaaggcgaaggcgctcgaaagcgcgctggcacagatcgaacggcagttcggcaagggctcgatcatgaaactgggggccaacagcccggtcatggagatcgaggcgacttcgacgggctcgctgggtctcgatatcgcgctcggcatcggcggtctgcccaaggggcgaatcatcgagatctacggccccgaaagctcgggcaagaccacgctgaccctgcatgtggtggcggaagagcagaagaagggtggcgtctgcgccttcgtggacgccgaacatgctctcgacccgcaatatgccaagaagctcggcgtcaacctggacgaactcctcatcagccagcccgacacgggcgagcaggcgctcgagatcgtcgacacgctggtccggtccggcgcggtgaacctgatcgtggtcgactcggtggcggcgctgacgcccaagtccgagatcgagggcgacatgggcgacatgcagatgggctcgcaggcccgcctgatgagccaggccatgcggaagctgaccgcatccatcggccggtcgaactgcatggtgatcttcatcaaccagatccgcatgaagatcggcgtgatgttcggcaaccccgagacgacgacgggcggcaacgcgctgaagttttacgcctccgtgcgcctcgacattcgccggaccggtgccatcaaggaccgcgacaatgtcatcggcaacacgacgaaggtgaaggtggtcaagaacaaggtggccccgcccttccgcgaggtcgagttcgacatcatgtatggcgagggcatttcgaagacgggcgagctcgtcgatctcggcgtcaaggccggcgtggtcgagaagtcgggctcctggtattcctacggcgacgagcggatcgggcaggggcgcgagaatgccaaggccttcctgcgcgcgaaccccacggttgccggcgatatcgaagatcggattcgcgcctcgcatgggctggacttctcgaccggggaagacggcaagggcgacgatctggtggacatgtga

SEQ ID NO: 577 - protein, 357 aa, Rhodobacter sphaeroides 2.4.1
MATANLLDLNGRREMDKAKALESALAQIERQFGKGSIMKLGANSPVMEIEATSTGSLGLDIALGIGGLPKGRIIEIYGPESSGKTTLTLHVVAEEQKKGGVCAFVDAEHALDPQYAKKLGVNLDELLISQPDTGEQALEIVDTLVRSGAVNLIVVDSVAALTPKSEIEGDMGDMQMGSQARLMSQAMRKLTASIGRSNCMVIFINQIRMKIGVMFGNPETTTGGNALKFYASVRLDIRRTGAIKDRDNVIGNTTKVKVVKNKVAPPFREVEFDIMYGEGISKTGELVDLGVKAGVVEKSGSWYSYGDERIGQGRENAKAFLRANPTVAGDIEDRIRASHGLDFSTGEDGKGDDLVDM

SEQ ID NO: 578 - DNA, 1032 bp, Carboxydothermus hydrogenoformans Z-2901
  CDS (1)..(1032): transl_table=11
atgaatgataaactaaaagccttagagcttaccatttcccaaattgaaaagcagtttgggaaaggctcaattatgcgcctgggtgaaaacaccggaaaatttcaggtggaagtaattcctactggttctctggctctggatttagccttaggggtaggtggagttcccagaggccgggtggttgaaatttttggccccgaatcttccggaaaaactaccgtggctttgcatattatagcggaagcgcaaaaaatgggtggtatcgcagcatttattgatgccgaacatgcgttagatccggtttatgcccaaaaattaggagttgatattgaaaatctcttagtttcccagcccgataccggcgaacaggctttagagatagccgaaagcttggtgagaagcggtgcgattgacgtgattgtgattgattcggtggctgctttagttccgcgggcggagattgaaggagaaatgggtgatgctcatgtcggtttacaggcccgccttatgtctcaggctttaagaaagctcaccggggccataagtaaatcaaaaactgtggcgatctttatcaaccaaatgcgggaaaaagtaggggttatgtttggaaacccggaaactactcccggaggacgggccctgaaattttatgcgtcaattcgcatggatgttcggaagatagatgtcataaaacaaggaaatgatattattggcagccgcacgcgggtaaaaatcgttaaaaacaaagttgcccctccttttaaacaggcggattttgatattatgtacggggaagggatttccaaggaaggaagtttgttggatgttgctgttgagttaaaaattgttcaaaaggtcgggtcttggtattcttacaatgatgagcgattgggtcagggccgggaaaatgccaaagagtttttacggcagaacccggaaatttacagagaaattgagcaaaagatccgggagcaagtattgaactctccagaatcgtcgagttttaaaaattccgaggagtttgaggaataa

SEQ ID NO: 579 - protein, 343 aa, Carboxydothermus hydrogenoformans Z-2901
MNDKLKALELTISQIEKQFGKGSIMRLGENTGKFQVEVIPTGSLALDLALGVGGVPRGRVVEIFGPESSGKTTVALHIIAEAQKMGGIAAFIDAEHALDPVYAQKLGVDIENLLVSQPDTGEQALEIAESLVRSGAIDVIVIDSVAALVPRAEIEGEMGDAHVGLQARLMSQALRKLTGAISKSKTVAIFINQMREKVGVMFGNPETTPGGRALKFYASIRMDVRKIDVIKQGNDIIGSRTRVKIVKNKVAPPFKQADFDIMYGEGISKEGSLLDVAVELKIVQKVGSWYSYNDERLGQGRENAKEFLRQNPEIYREIEQKIREQVLNSPESSSFKNSEEFEE

SEQ ID NO: 580 - DNA, 1047 bp, Burkholderia sp. 383
  CDS (1)..(1047): transl_table=11
atgaccgccgagaagagcaaggcgctggccgccgcgcttgcccagatcgaaaagcagttcggcaagggctcgatcatgcgcatgggcgacggcgaggcgaccgagaacatccaggtcgtgtccacgggctcgctcggtctcgatatcgcgctcggcgtcggcggcctgccgcgcggccgggtggtcgaaatctacggtccggaatcgtccggtaaaaccacgctcacgctgcaggtcattgccgaactgcagaagatcggcggcaccgcagcgttcatcgacgccgagcacgcgctcgacgttcaatatgcagcgaagctcggcgtgaacgtgccggagctgctgatctcgcagccggacaccggcgagcaggcgcttgaaatcaccgacgcgctggtgcgctcgggctcgatcgacatgatcgtcatcgactcggtcgcggcgctcgtgccgaaggccgaaatcgaaggcgagatgggcgattcgttgccgggcctgcaggcccgcctgatgtcgcaggcgctgcgcaagctgaccggcacgatcaagcgcacgaactgcctggtgatcttcatcaaccagatccggatgaagatcggcgtgatgttcggcaacccggaaaccacgacgggcggtaacgcgctgaagttctactcgtcggtgcgtctcgacattcgccggatcggctcgatcaagaagaacgacgaggtgatcggcaacgaaacccgcgtgaaggtcgtcaagaacaaggtgtcgccgccgttccgcgaagcgatcttcgacatcctgtatggcgaaggcatttcgcgtcagggcgagatcatcgatctcggcgtgcaggcgaagatcgtcgacaaggcgggcgcttggtacagctacaacggcgagaagatcggccagggcaaggacaacgcgcgtgaattcttgcgcgagaatccggaaatcgcacgcgagatcgagaaccgcattcgcgaatcgcttggcgtggtcgccatgcctgatggtgcaggccaggacgaagccgaggcgatggacgaagaagagtga

SEQ ID NO: 581 - protein, 348 aa, Burkholderia sp. 383
MTAEKSKALAAALAQIEKQFGKGSIMRMGDGEATENIQVVSTGSLGLDIALGVGGLPRGRVVEIYGPESSGKTTLTLQVIAELQKIGGTAAFIDAEHALDVQYAAKLGVNVPELLISQPDTGEQALEITDALVRSGSIDMIVIDSVAALVPKAEIEGEMGDSLPGLQARLMSQALRKLTGTIKRTNCLVIFINQIRMKIGVMFGNPETTTGGNALKFYSSVRLDIRRIGSIKKNDEVIGNETRVKVVKNKVSPPFREAIFDILYGEGISRQGEIIDLGVQAKIVDKAGAWYSYNGEKIGQGKDNAREFLRENPEIAREIENRIRESLGVVAMPDGAGQDEAEAMDEEE

SEQ ID NO: 582 - DNA, 1020 bp, Geobacter metallireducens GS-15
  CDS (1)..(1020): transl_table=11
gtgacccaggaacgcgagaaggcgattgagctggcactgagccagatagagaagcagttcggcaagggcgccatcatgcggctgggtgctgacgaggccctgccggacatcgacgccatccccaccggcgccctctccctggatatcgccctgggggtgggcggggttccccggggacgggtcatcgagatctacggccccgagtcgtcgggcaagacgaccctcgccctccacatcgccgccgaggcccagaagctgggcggcatcgcggccttcgtggatgccgagcacgccctggacatcggctatgcccgcaagctgggtgttcggaccgacgacctcctggtctcccagcccgacacgggggagcaggcccttgagatcgccgagatgctcgtgcggagcggcgccgtggacgtcctcgtcatcgactcggtggcggccctcgttcccaaggccgagatcgagggggagatgggggactcccacgtggggctccaggcccgcctcatgtcccaggccctgcgcaagctcaccggcatcatctccaagtccaactgctgcgtcatcttcatcaaccagatccggatgaagatcggcgtcatgttcggcagccccgagaccaccaccggcggcaacgccctcaagttctacgcttcggtccgcctcgacatccgcaagatcgccaccctcaagcagggggatgcggtgatcggctcccgcaccaaggtgaaggtggtgaagaacaaggtggctccccccttcagggaggtggagttcgacatctactacggcgaggggatatcccgcctgggggacctcctggacctggccgttgaccgcaagatcatcgacaagagcggtgcctggttttcctacggctccgaccggatcggccagggacgcgagaactcccggaatttcctcaaggagcatccggagatggtggccgaaatcgaggacaagatttacgaaacggccggcattccccgcaaaggggggaaggaagaggcggcgtag

SEQ ID NO: 583 - protein, 339 aa, Geobacter metallireducens GS-15
MTQEREKAIELALSQIEKQFGKGAIMRLGADEALPDIDAIPTGALSLDIALGVGGVPRGRVIEIYGPESSGKTTLALHIAAEAQKLGGIAAFVDAEHALDIGYARKLGVRTDDLLVSQPDTGEQALEIAEMLVRSGAVDVLVIDSVAALVPKAEIEGEMGDSHVGLQARLMSQALRKLTGIISKSNCCVIFINQIRMKIGVMFGSPETTTGGNALKFYASVRLDIRKIATLKQGDAVIGSRTKVKVVKNKVAPPFREVEFDIYYGEGISRLGDLLDLAVDRKIIDKSGAWFSYGSDRIGQGRENSRNFLKEHPEMVAEIEDKIYETAGIPRKGGKEEAA

SEQ ID NO: 584 - DNA, 1101 bp, Rhodospirillum rubrum ATCC 11170
  CDS (1)..(1101): transl_table=11
atgtcgcagagcgtcttgcgtctggtggataaggatacgatggacaagcaaaaggctttggaagcggctgtgggccagatcgagcgcgcctttggcaagggctcgatcatgaaactcggccagcgcggcagtgtcgtcgacatcgagtcgatcagcaccggatccctgggcctggatatcgccctgggcatcggcggtctgccgcgcgggcgcatcgtcgagatctacgggcccgaaagctcgggcaagaccacgctcgccctgcatgtggtggccgaggcgcagaagaagggcggtcaatgcgccttcgtcgacgccgagcacgccttcgatccgctctatgcccgcaagcttggcgtcagccttgatgacctgctggtgtcccagcccgacaccggcgaacaggccctggaaatcgccgataccctggtgcggtcgggcgccatcgatgtgctggtgattgactcggtggcggcgctggtgcccaaggccgaactggaaggcgatatgggcgattcccatgtcggcctgcaggcgcggttgatgagccaagccctgcgcaagctgaccggcacggtctcgcgctccaacaccttgattatcttcatcaaccagatccgcatgaagatcggcgtgatgttcggcaaccccgaaaccaccaccggcggcaatgcgctgaagttctacgcctcggtccgtctcgacatccgccgcatcggcgcggtgaaggacaaggaggaggtcgtcggcaaccagacgcgggtcaaggtggtcaagaacaaggtcgccccgccgttcaaggtggtcgaattcgacatcatgtatggcgagggcatctccaagctaggcgagatgctcgacctgggggtgaaggccaatatcatcgagaagtcgggggcgtggttctcgtataattccacccgcatcggccagggccgcgagaacgccaagcagttcctgcgcgacaatccggcgatggccgaggaaatcgaaaacgccgtgcgcgccaatgccgggctgatcgccgaggagatgatcggcggtccgggcggcgaggatgacgacgccggtggcgccgccggagtcggcgacgaagcctga

SEQ ID NO: 585 - protein, 366 aa, Rhodospirillum rubrum ATCC 11170
MSQSVLRLVDKDTMDKQKALEAAVGQIERAFGKGSIMKLGQRGSVVDIESISTGSLGLDIALGIGGLPRGRIVEIYGPESSGKTTLALHVVAEAQKKGGQCAFVDAEHAFDPLYARKLGVSLDDLLVSQPDTGEQALEIADTLVRSGAIDVLVIDSVAALVPKAELEGDMGDSHVGLQARLMSQALRKLTGTVSRSNTLIIFINQIRMKIGVMFGNPETTTGGNALKFYASVRLDIRRIGAVKDKEEVVGNQTRVKVVKNKVAPPFKVVEFDIMYGEGISKLGEMLDLGVKANIIEKSGAWFSYNSTRIGQGRENAKQFLRDNPAMAEEIENAVRANAGLIAEEMIGGPGGEDDDAGGAAGVGDEA

SEQ ID NO: 586 - DNA, 1032 bp, Syntrophus aciditrophicus SB
  CDS (1)..(1032): transl_table=11
atgggaacagatggagacagggcaaaggcggtggatctggcaataagtcagatcgaaaggcagttcggaaaggggtctatcatgcgcctgggggcgaaagagcggatcgaggacattgcggtcattccgaccggagcactcagtctggatatcgcgctgggcatcggcggcgtcccccggggacgcatcatcgaaattttcggtcctgaatccgggggaaagacgaccctggccctgcatattattgcggaagcacagaagcggaacggactggcggccttcatcgatgccgaacacgccctggatgtttcctacgcccgaaaaatcggcgtcaacaccgacgatctgctgatttcccagccggataccggggagcaggccctggagatcgcggaaaccctggttcgcagcggagccctggatatcctcgttgtggattccgtggccgccctggtccccaaggcggaaatcgaaggggaaatgggcgatgcccagatggggctgcaggccagactgatgtcccaggccctgcggaaactcaccggcagcatcagcaaatccaacacgacggttatcttcatcaaccagctgcgaatgaagatcggcgtattcttcggcaacccggaaacgacgaccggcggcaacgccctgaaattctacgcttccatgcgcctcgacatccgcaagtccggttccatcaaatcggggcaggatgtcatcggcatgcggaccaaggtgaaggtcgtgaaaaacaaggtcgcgccgcccttccgggagacggaattcgacatcctcttcggcgaggggatttccaaggccggggatattctcgatctggccgcggaaagcgggatcgtggaaaagagcggcgcctggtactcctacgggggagagcggatcggccagggccgggacaacaccaggaactttttaaaggagcatcccgatattctggtccggatcgaggaacaggtgcgaagcgaacacggtctgaagccccggttgcaggaacaggaagaacctgctaaatga

SEQ ID NO: 587 - protein, 343 aa, Syntrophus aciditrophicus SB
MGTDGDRAKAVDLAISQIERQFGKGSIMRLGAKERIEDIAVIPTGALSLDIALGIGGVPRGRIIEIFGPESGGKTTLALHIIAEAQKRNGLAAFIDAEHALDVSYARKIGVNTDDLLISQPDTGEQALEIAETLVRSGALDILVVDSVAALVPKAEIEGEMGDAQMGLQARLMSQALRKLTGSISKSNTTVIFINQLRMKIGVFFGNPETTTGGNALKFYASMRLDIRKSGSIKSGQDVIGMRTKVKVVKNKVAPPFRETEFDILFGEGISKAGDILDLAAESGIVEKSGAWYSYGGERIGQGRDNTRNFLKEHPDILVRIEEQVRSEHGLKPRLQEQEEPAK

SEQ ID NO: 588 - DNA, 1038 bp, Frankia sp. CcI3
  CDS (1)..(1038): transl_table=11
atggcaggactcgaccgtgagaaggcgttggataacgccttggcgcagatcgacaagcagttcggcaagggatcggtcatgcggttgggggacgacaccaggccgccggtccaggccatccccaccggttcgattgctctggatgtcgcgctcggcatcggcgggctgccgcgggggcgcatcattgagatctacggcccggagtcgtccgggaagacgaccgtcgccctgcacgcggtggcgaacgcgcaggcggctggtggtatcgcggcgttcatcgacgccgagcacgcgctcgaccccgagtacgcgggaaagctcggcgtcgacaccgacggtctgctggtctcccagcctgataccggcgagcaggcgttggagatcgcggacatgctcgtccggtctggcgcgctggacatcatcgtcatcgactcggtggccgcgctggtcccgagggccgagatcgagggcgagatgggggacagtcacgtcggcctccaggcccgcctgatgtcccaggccctgcgcaagatgaccgcggcgctggcgaactccggtacgaccgcgatcttcatcaaccagttgcgcgagaagatcggggtgatgttcggctccccggagaccacgaccggtggtaaggcactgaagttctatgcgtcggtgcgcctcgatgtccgtcgtatcgaaactctcaaggacggcacggaggccgtgggtaaccggacccgcgtcaaggtggtgaagaacaaggtggcgccgccgtttcggaccgccgaattcgacatcgtctacggaggcggtatcagtcgggagggttccctgatcgacatgggtgtcgagcacggcattattcgtaagtccggtgcctggtacacctacgacggcgatcagctcggccagggcaaggagaacgcccggtcttttctgcgggacaaccccgatctggccaacgagatcgaaaagaagatcaaggagaagctcggcatcctgcccagtctcgaatccgatgccgtggcgcccgttccggtcgatctgtag

SEQ ID NO: 589 - protein, 345 aa, Frankia sp. CcI3
MAGLDREKALDNALAQIDKQFGKGSVMRLGDDTRPPVQAIPTGSIALDVALGIGGLPRGRIIEIYGPESSGKTTVALHAVANAQAAGGIAAFIDAEHALDPEYAGKLGVDTDGLLVSQPDTGEQALEIADMLVRSGALDIIVIDSVAALVPRAEIEGEMGDSHVGLQARLMSQALRKMTAALANSGTTAIFINQLREKIGVMFGSPETTTGGKALKFYASVRLDVRRIETLKDGTEAVGNRTRVKVVKNKVAPPFRTAEFDIVYGGGISREGSLIDMGVEHGIIRKSGAWYTYDGDQLGQGKENARSFLRDNPDLANEIEKKIKEKLGILPSLESDAVAPVPVDL

SEQ ID NO: 590 - DNA, 1071 bp, Novosphingobium aromaticivorans DSM 12444
  CDS (1)..(1071): transl_table=11
atggcggctcagctcaagctcatcgaggaaggtaagaccaaggacatggatcgtcagaaggcgctcgacgcggcccttgcgcagattgaccgcgcgttcggcaagggatcggccatgcggctcggttcgaaggaagcgatgcaggtggaagccgtttctaccggatcgctggggctggacatcgcgctcggcatcggcggcctgccgcgcggccgcatcatcgagatctacgggccggaaagctcgggcaagaccacgctggcgctccacgccatcgcggaagcgcagaagggcggcggcaccgcagccttcatcgacgcagaacacgcgctggacccggtctatgcccgcaagctcggcgtcgacatcgacaatctgatcgtctcgcagcccgacacgggcgagcaggcacttgaaatcaccgacacgctggtgcgttcgaacgcgatcgacgtgctggtggtggactcggtcgccgcgctcgttccccgcgccgaaatcgagggtgagatgggcgatagccacgtcggcctccaggcccgcctgatgagccaggccctgcgcaagctgaccggttcgatcagccgttcgcgctgcatggtgatcttcatcaaccaggtgcgcatgaagatcggtgtgatgtacggcaacccggaaacgacgacgggcggcaacgcgctcaagttctatgcttcggtccgcctcgacatccgccgcaccgggcagatcaaggatcgcgacgagatcgtaggcaacgccacgcgcgtgaaggtcgtcaagaacaaggtcgcgccgccgttcaagcaggtcgaattcgacatcatgtatggcgaaggcatctcgaagatcggcgaaattctcgatctcggcgtgaaggccgggctggtcgagaagtcgggcgcctggttcagctatgattccattcgcatcgggcaggggcgtgagaacgccaagaacttcctgcgcgaaaatcccgaagtttgcagccgtctggaagccgcgatccgcggccgcaccgatcaggttgccgaaggactgatggcgggcccggacgcggacgacgacatctga

SEQ ID NO: 591 - protein, 356 aa, Novosphingobium aromaticivorans DSM 12444
MAAQLKLIEEGKTKDMDRQKALDAALAQIDRAFGKGSAMRLGSKEAMQVEAVSTGSLGLDIALGIGGLPRGRIIEIYGPESSGKTTLALHAIAEAQKGGGTAAFIDAEHALDPVYARKLGVDIDNLIVSQPDTGEQALEITDTLVRSNAIDVLVVDSVAALVPRAEIEGEMGDSHVGLQARLMSQALRKLTGSISRSRCMVIFINQVRMKIGVMYGNPETTTGGNALKFYASVRLDIRRTGQIKDRDEIVGNATRVKVVKNKVAPPFKQVEFDIMYGEGISKIGEILDLGVKAGLVEKSGAWFSYDSIRIGQGRENAKNFLRENPEVCSRLEAAIRGRTDQVAEGLMAGPDADDDI

SEQ ID NO: 592 - DNA, 984 bp, Neorickettsia sennetsu str. Miyayama
  CDS (1)..(984): transl_table=11
atgaacagggaagatgcgcttaagggcgttgtggttcaaattgaaaaaatgtttgggaaaggttccataatgacctttagtcaggagccagcttcagtggagtgcatttctacgggttccataggattggatagtgctcttggtggaggtataccaaaggggcgaattattgagatatttggaccggaaagttctgggaagacgacacttacgcttcacataatagctgaagcgcagaaaaacggcgggacgtgtgcgtttattgacgctgagcatgctttggatcctgtttatgcaagaaggttgggtgtcaaaattgaggagctgttaatttcgcagccggatactggggagcaggctttggaaatagtagatagtcttattaagtctggtgcagtcgatgtgatagttgtcgattctgttgctgctcttactccgaaagcagaaatagaaggagaaatgggagatctacatgttgggcttcaggctagattgcttagtcaggcactgcgaaagatcacagcttctgtatcccgtagtaactgcgttgtggtcttcatcaaccagatccggatgaagatcggtgtcatgtttggtagtcctgaaacaacgacagggggtaatgcattgaaattctattcgtccgttagaattgatattcgcaagattggttcaattaaggataaagaagatgttgtgggtaaccagacacgggtgaaggtggttaaaaataaggtagcgcctccgtttaagcaggctgagtttgatatcatttacactgagggcatttcgaagcttggtgaaataatcgagattggtgtgcgcaataagataatagaaaaggcaggttcgtattattcatacggggatgtcaagcttggtcagggtaaggaaaatgtgaagcagttcttaaaagagaataaagagttagcagcggagttagagaggaaagtgagggattccatgctgcttattgcaacgtag

SEQ ID NO: 593 - protein, 327 aa, Neorickettsia sennetsu str. Miyayama
MNREDALKGVVVQIEKMFGKGSIMTFSQEPASVECISTGSIGLDSALGGGIPKGRIIEIFGPESSGKTTLTLHIIAEAQKNGGTCAFIDAEHALDPVYARRLGVKIEELLISQPDTGEQALEIVDSLIKSGAVDVIVVDSVAALTPKAEIEGEMGDLHVGLQARLLSQALRKITASVSRSNCVVVFINQIRMKIGVMFGSPETTTGGNALKFYSSVRIDIRKIGSIKDKEDVVGNQTRVKVVKNKVAPPFKQAEFDIIYTEGISKLGEIIEIGVRNKIIEKAGSYYSYGDVKLGQGKENVKQFLKENKELAAELERKVRDSMLLIAT

SEQ ID NO: 594 - DNA, 1074 bp, Ehrlichia chaffeensis str. Arkansas
  CDS (1)..(1074): transl_table=11
atgtctgatagcaaaaatttaaaccaggaaagacaaaaagcattggatagcgcaattagtcaaattgaaaaggcttttggtcgtggtgcaataatgaaattaaaacaaggtgctattgaaaaaatagatagtatttctactggatcaattgcgcttgatacagctttaggcattggtgggtttcctaaaggtagaattgttgaaatttttgggcctgaaagttctggtaaaacaacacttgctttgcatgtaattgctgagtcacaaaaaaagggtgggaattgtgcatttattgatgctgaacatgctttggatatcatgtatgctcgcaaattaggggtaaatactggtgatttgatcgtttctcaacccgatacaggtgaacaagcattacatatagttgagtatctggtttgttctggtgctattgatgtaatagtagtagattctgtggctgcattaactcctagagcagagatagaaggtgatatgggtgatcaacatatggggttacaagctaggttgttaagtcatgcattgaggaagttaacttctattgtatcaaaagctaattgtgttcttatttttattaatcagatacgtatgaaaataggggtagtttatggaaatcctgaaactactactggtggcaatgctttaaagttttatagttctgtaagattagatatacgtaaggtaagtgcaattaaggataaggacgtaattattggtaatcaaactaaggtgaaagttgttaaaaacaaggtggctcctccttttaaacaagtagattttgatatcatgtataatgaaggtatctcaaaggtaggagagattatagatatgggtgtaaaacttaatattattgaaaaagctgggtcatactactcgtataatagtgtgcgtcttggtcaaggtaaagaaaatgcaaaatcttatcttaaagctaattgtgatactgcacatgaaatagaacagaagataagaagtatacttgcaagtgataatgaagttagttgtttcaatgcagaggttaatgataatcttcatgaagtagaagaaacagttttttaa

SEQ ID NO: 595 - protein, 357 aa, Ehrlichia chaffeensis str. Arkansas
MSDSKNLNQERQKALDSAISQIEKAFGRGAIMKLKQGAIEKIDSISTGSIALDTALGIGGFPKGRIVEIFGPESSGKTTLALHVIAESQKKGGNCAFIDAEHALDIMYARKLGVNTGDLIVSQPDTGEQALHIVEYLVCSGAIDVIVVDSVAALTPRAEIEGDMGDQHMGLQARLLSHALRKLTSIVSKANCVLIFINQIRMKIGVVYGNPETTTGGNALKFYSSVRLDIRKVSAIKDKDVIIGNQTKVKVVKNKVAPPFKQVDFDIMYNEGISKVGEIIDMGVKLNIIEKAGSYYSYNSVRLGQGKENAKSYLKANCDTAHEIEQKIRSILASDNEVSCFNAEVNDNLHEVEETVF

SEQ ID NO: 596 - DNA, 1047 bp, Saccharophagus degradans 2-40
  CDS (1)..(1047): transl_table=11
atggatgccagtaaatcaaaagcgttagaagctgcactttctcaaattgatcgccagttcggtaagggcacggttatgcgccttggcgataaaggcagagaaaaaatgcctgctatttcaaccggttcactcggtttagatgtggccttaggtataggtggcttgcccaaaggacgtattgttgagatttacggccctgaatcttcaggtaaaaccacgctaacccttcaagttattgcagaagcgcagcgccaaggtggcacttgtgctttcgttgatgccgagcatgcactagaccctgtatacgccgaaaagcttggtgtaaatgtagacgacctaattatttctcagccagataacggtgaacaggccttagaagttgccgatatgttggttcgttctggcgctgtagatgtgcttgttgtcgactccgtggcggcgcttactcccaaggccgaaatcgaaggcgatatgggcgaccaccacgttggtttgcaagcgcgattaatgtcgcaagcactgcgaaaaattacgggcaacattaaaaacgctaactgtttagcaatttttattaaccaaattcgtatgaagattggtgtgatgttcggcaacccagaaaccactaccggtggtaacgcgctgaagttctactcttcggttcgtttagatatccgtcgcattggctcagttaaagagggcgatgaggttgttggctcggatacgcgcgttaaagttgttaaaaataaagttgcgccaccctttaagcaagccgagtttcaaattttgtatggtcagggcataaaccgcttgggcgagattgtagactttggtgttaagcttggtttaattgataaagctggtgcttggtatagctataacggcgataaaattggccagggtaaagcaaatgctatgcaataccttcgcgataacaaagaagttgccgagttcttagagcaaaaaataaaggcggaattactgggcgatattaagcctgtagctaaagaaggcgctgaagttgaagaagagagcgcagagcaggagtaa

SEQ ID NO: 597 - protein, 348 aa, Saccharophagus degradans 2-40
MDASKSKALEAALSQIDRQFGKGTVMRLGDKGREKMPAISTGSLGLDVALGIGGLPKGRIVEIYGPESSGKTTLTLQVIAEAQRQGGTCAFVDAEHALDPVYAEKLGVNVDDLIISQPDNGEQALEVADMLVRSGAVDVLVVDSVAALTPKAEIEGDMGDHHVGLQARLMSQALRKITGNIKNANCLAIFINQIRMKIGVMFGNPETTTGGNALKFYSSVRLDIRRIGSVKEGDEVVGSDTRVKVVKNKVAPPFKQAEFQILYGQGINRLGEIVDFGVKLGLIDKAGAWYSYNGDKIGQGKANAMQYLRDNKEVAEFLEQKIKAELLGDIKPVAKEGAEVEEESAEQE

SEQ ID NO: 598 - DNA, 1035 bp, Methylobacillus flagellatus KT
  CDS (1)..(1035): transl_table=11
atggatgaaaacagaagcaaagcgctagccgccgccctctcgcaaatcgagaaacaatttggcaaaggctctatcatgcgcatgggcgacaccgatgtcgctgctgacatccaggcagtttctaccggctccctgggcctggacatcgccctgggtattggcggcttgccgcgcggccgcatcgtcgagatttacggcccggaatcctccggcaagaccacgctgacattgtctgtgatcgcgcagatgcaaaagctgggcggcacggcagcattcatcgacgcagaacacgcgctcgacccggtctacgcgcagaagctcggtgtcaatgtttccgatctgctcatctcccagcccgacaccggcgaacaggcgctcgagatcgccgacatgctggtgcgctccggctcggtagatgtcgtggtggtcgactccgtcgctgcgctgacgcccaaggccgaaatcgaaggcgaaatgggcgactcgcacatgggcctgcaggcccgcctgatgtcgcaggcactgcgcaagctcaccgccaacatcaagcgcaccaacaccttggtcatcttcatcaaccagatccgcatgaagatcggcgtgatgttcggcaaccccgagaccaccaccggcggcaatgcactcaagttctacgcctccgtgcgcctggacatccgccgcaccggcgcgatcaagaagggggacgaggtcacgggatcagaaacccgggtcaaggtagtgaagaacaaagtggcccctccgttcaagcaagcggaattcgacatcctctatggcgaaggtatctcgcgcgagggcgaaatcatcgaactcggcgtcaaccttaaattgatcgagaaggccggtgcctggtacagctacaagggcgagaagatcggccagggcaaggacaacgcgcgcgagttcctcagggagcacccggaaatcgccaatgagatcgacgccaagattcgcgagcattccaatctggccaacgccgcgatgacgacggcaccggatgaagaaagcgacgaataa

SEQ ID NO: 599 - protein, 344 aa, Methylobacillus flagellatus KT
MDENRSKALAAALSQIEKQFGKGSIMRMGDTDVAADIQAVSTGSLGLDIALGIGGLPRGRIVEIYGPESSGKTTLTLSVIAQMQKLGGTAAFIDAEHALDPVYAQKLGVNVSDLLISQPDTGEQALEIADMLVRSGSVDVVVVDSVAALTPKAEIEGEMGDSHMGLQARLMSQALRKLTANIKRTNTLVIFINQIRMKIGVMFGNPETTTGGNALKFYASVRLDIRRTGAIKKGDEVTGSETRVKVVKNKVAPPFKQAEFDILYGEGISREGEIIELGVNLKLIEKAGAWYSYKGEKIGQGKDNAREFLREHPEIANEIDAKIREHSNLANAAMTTAPDEESDE

SEQ ID NO: 600 - DNA, 1077 bp, Burkholderia xenovorans LB400
  CDS (1)..(1077): transl_table=11
atggaagaaagcaagaaaggctcggctggactgactgctgaaaagagcaaggcactcgctgccgcactcgcgcagatcgaaaagcagttcggcaaagggtcggtcatgcggctcggcgcaggtgaggtaatcgaagacatccaggtggtctcaaccggatcgctcggtctcgacatcgcgctgggcgtcggcggtttgccgcgtggccgtgtggtcgaaatctatggcccggaatcatccggtaaaaccacgctgacgctgcaagtcattgccgaaatgcagaagatcggcggcacggcggcgtttatcgacgcggaacacgcgctggatatccagtacgcgagcaagctcggcgtgaacgtgaacgacctgctggtttcgcagcccgacacaggcgagcaggcgctcgaaattgctgacgcactggtgcgttcgggctcgatcgacatgatcgtgatcgactcggtcgcggcactcgtgccgaaggctgaaatcgaaggcgaaatgggcgactcgctgccgggtctgcaagcgcgtctcatgtcgcaggcgctgcgcaagctcaccggcacgatcaagcgcacgaactgtctcgtgatcttcatcaaccagatccgcatgaagatcggtgtgatgttcggcaatccggaaaccaccacgggcggtaacgcgctgaagttctacgcatcggtgcgtctggacattcgccgcatcggttcgatcaagaagaacgacgaagtgatcggcaacgaaacgcgcgtgaaggttgtcaagaacaaggtatcgccaccgttccgggaagcgattttcgacattctgtacggcgaaggcatctcgcgtcagggcgaaatcatcgacttgggcgtacaggccaagatcgtcgacaaggccggcgcgtggtacagctacagcggcgaacggatcggtcagggcaaggacaacgcgcgtgaattcctgcgtgaaaatccggatatcgctcgcgagatcgaaaaccgtatccgcgaatcgctgggcgtgaatgctatggctgaagccgcgaccgtcgcaagcgctgaagtcgcggacgaagaagagtaa

SEQ ID NO: 601 - protein, 358 aa, Burkholderia xenovorans LB400
MEESKKGSAGLTAEKSKALAAALAQIEKQFGKGSVMRLGAGEVIEDIQVVSTGSLGLDIALGVGGLPRGRVVEIYGPESSGKTTLTLQVIAEMQKIGGTAAFIDAEHALDIQYASKLGVNVNDLLVSQPDTGEQALEIADALVRSGSIDMIVIDSVAALVPKAEIEGEMGDSLPGLQARLMSQALRKLTGTIKRTNCLVIFINQIRMKIGVMFGNPETTTGGNALKFYASVRLDIRRIGSIKKNDEVIGNETRVKVVKNKVSPPFREAIFDILYGEGISRQGEIIDLGVQAKIVDKAGAWYSYSGERIGQGKDNAREFLRENPDIAREIENRIRESLGVNAMAEAATVASAEVADEEE

SEQ ID NO: 602 - DNA, 1062 bp, Ralstonia metallidurans CH34
  CDS (1)..(1062): transl_table=11
atggacgacaagaaggccggcgccggcgtgagcgctgagaagcagaaggcgcttgccgccgcgctctcccagattgagaagcagtttggcaagggctcgatcatgcgcctgggcgatggcgaaatcgaacaggacatccaggtagtgtccaccggctcgctggggctggacatcgcgctgggcgtgggtggcctgccgcgcggccgcgtggtcgagatctacggtccggaatcgtccggcaagaccacgctgacgctgcaggtggtggccgaaatgcagaagctgggcggcacctgcgcgttcatcgacgccgagcacgccctggatgtccaatatgctggcaagctcggcgtggacgtcggcaatctgctgatctcccagcccgataccggcgagcaggccctggaaatcaccgacgcgctggtgcgctcgggttcgatcgacctgatcgtgatcgactcggtggccgctctggtgccaaaggcagaaatcgagggcgaaatgggcgattcgctgcccggcctgcaggcccgcctgatgagccaggcgctgcgcaagctgaccggcacgatcaagcgcacgaactgcctggtgatcttcatcaaccagatccgtatgaagatcggtgtgatgtttggttctcccgaaaccaccaccggcggtaacgcgctgaagttctacgcctcggtgcgcctggacatccgccgtatcggctcgatcaagaagggcgacgaagtcgtcggcaacgagaccaaggtcaaggtggtcaagaacaaggtgtcacctccgttccgcgaggcgttcttcgacatcctctatggccagggcatctcgcgccagggtgaaatcatcgacctgggcgtggacgccaagatcgttgagaaggccggcgcctggtacagctacaacggcgagaagatcggccagggcaaggacaacgcacgcgagtatctgcgcgagaacccggacatcgccgacgagatcgagaacaaggtgcgtctggcgctgggcgtggcgccgctgaacaccgtggcgggcgcgccagcagaggtcgaaggctga

SEQ ID NO: 603 - protein, 353 aa, Ralstonia metallidurans CH34
MDDKKAGAGVSAEKQKALAAALSQIEKQFGKGSIMRLGDGEIEQDIQVVSTGSLGLDIALGVGGLPRGRVVEIYGPESSGKTTLTLQVVAEMQKLGGTCAFIDAEHALDVQYAGKLGVDVGNLLISQPDTGEQALEITDALVRSGSIDLIVIDSVAALVPKAEIEGEMGDSLPGLQARLMSQALRKLTGTIKRTNCLVIFINQIRMKIGVMFGSPETTTGGNALKFYASVRLDIRRIGSIKKGDEVVGNETKVKVVKNKVSPPFREAFFDILYGQGISRQGEIIDLGVDAKIVEKAGAWYSYNGEKIGQGKDNAREYLRENPDIADEIENKVRLALGVAPLNTVAGAPAEVEG

SEQ ID NO: 604 - DNA, 1074 bp, Silicibacter sp. TM1040
  CDS (1)..(1074): transl_table=11
atggcggatctattgaccatgaaggacgacaagaagagcggcgacaagcagaaggccttggacagcgcgcttgcccagatcgaacggcagttcggcaagggctcgatcatgaaactcggcgatggcacagccttgcaagagatcgaggcaagctctaccggctctcttgggctggatattgcgcttggcattggtggtctgccgatgggccggatcgtcgagatctacgggccggaaagctccgggaaaaccacgctgacgctgcactgtattgctgagcagcagaaaaagggcggcgtttgcgcctttgtggatgccgaacacgcgctggacccgcaatatgccaaaaagctgggcgtcgatctggacgagctgctgatttcgcagcccgacaccggcgaacaggcgcttgagatcaccgacacgctggtgcgctccggtgcggtcaacatggtgatcgtcgactcggtggcggctttgaccccgaagtcagagctcgagggcgacatgggtgacagcaacgtcggcgtgcaggcccgcctgatgagtcaggcgatgcgcaagctcaccggttccatcagccgctccaaatgcatggtgatctttatcaaccagattcgcatgaagatcggcgtgatgttcggctcgcccgagaccaccaccggcggcaacgcgctgaagttctactcctcggtgcgactggacatccgccgcatcgggtcgatcaaggaccgcgacgaggttgtcggcaacgccacccgcgtgaaggtcgtcaagaacaaggtcgcaccgccgttcaaacaggtggaattcgacatcatgtatggcgaaggcatctccaagatgggcgaattgctcgatctgggtgtggccgcaggcgtggtcaacaagtccggtgcctggttctcttatggggacgagcggatcgggcaggggcgcgagaatgccaaagggtatctgcgcgaaaactcccgcatcgcactggagatcgaagacaagatccgcgctgcgcatgggcttgatttcgacatgccccccgaagcgcaagacgacgatgttctgtttgaaggctga

SEQ ID NO: 605 - protein, 357 aa, Silicibacter sp. TM1040
MADLLTMKDDKKSGDKQKALDSALAQIERQFGKGSIMKLGDGTALQEIEASSTGSLGLDIALGIGGLPMGRIVEIYGPESSGKTTLTLHCIAEQQKKGGVCAFVDAEHALDPQYAKKLGVDLDELLISQPDTGEQALEITDTLVRSGAVNMVIVDSVAALTPKSELEGDMGDSNVGVQARLMSQAMRKLTGSISRSKCMVIFINQIRMKIGVMFGSPETTTGGNALKFYSSVRLDIRRIGSIKDRDEVVGNATRVKVVKNKVAPPFKQVEFDIMYGEGISKMGELLDLGVAAGVVNKSGAWFSYGDERIGQGRENAKGYLRENSRIALEIEDKIRAAHGLDFDMPPEAQDDDVLFEG

SEQ ID NO: 606 - DNA, 1092 bp, Myxococcus xanthus DK 1622
  CDS (1)..(1092): transl_table=11
atggccgtgaatcaggagaaggaaaaggcgatcgaactggcgatgtccgcggtggagcgccagttcggcaaggggtccatcatgcggctcggcaacgacgagccaatgatgcgagacgttcaggccatcccgacgggctccatctcgctggacatcgccctgggcgtgggtggcgtgcccaagggccgcatcatcgaaatcttcgggccggagtcgtccggtaagacgacgctgtgtctccacatcgtcgccgaagcgcagaagcgcggcggcatctgcggctacgtggacgcggagcacgcgctggacgtgggctacgcgcgcaagctgggcgtgcgcaccgatgacctgctgctgagccagccggacaccggtgagcaggcgctggaaatcgcggagatgctggtgcgctcgggcgccatcgacgtgctggtggtggactcggtggccgcgctcgtgccgaaggcggagctcgagggtgagatgggcgacgcgcacatgggtgtgcaggcccgcctcatgagccaggcgctccgcaagctgacgggcaccatcgccaagagccagacgtgcgtcatcttcatcaaccagattcgcatgaagattggcgtgatgttcggcaacccggagacgacgacgggcggtaacgcgctgaagttctacgcgtcgcagcgcctggacatccgccgcatcggcgccatcaagaatggcgacaacgtggtgggcagccgcacccgcgtgaaggtggtgaagaacaaggtcgcgccgccgttcaaggaagtcgagttcgacatcatgtacggcacgggcatctcccgtgagggcgacctcatcgacctcgcctccaacgagaacatcgtggagaagagcggcagctggttctccttcaatggtgagcgcatcggccagggccgggagaacgtgaaggagtacctgcgcgagcacccggagatcgcgaaggacatcgaaggccgcgtgctggagaagtacggcatcggcaagtcgggtgcgcccgtcgccgcggcgccggacgagtccgcgccggccgaaggtggcagcgagaagcgcggccgtgtgaaggccgtgaagtag

SEQ ID NO: 607 - protein, 363 aa, Myxococcus xanthus DK 1622
MAVNQEKEKAIELAMSAVERQFGKGSIMRLGNDEPMMRDVQAIPTGSISLDIALGVGGVPKGRIIEIFGPESSGKTTLCLHIVAEAQKRGGICGYVDAEHALDVGYARKLGVRTDDLLLSQPDTGEQALEIAEMLVRSGAIDVLVVDSVAALVPKAELEGEMGDAHMGVQARLMSQALRKLTGTIAKSQTCVIFINQIRMKIGVMFGNPETTTGGNALKFYASQRLDIRRIGAIKNGDNVVGSRTRVKVVKNKVAPPFKEVEFDIMYGTGISREGDLIDLASNENIVEKSGSWFSFNGERIGQGRENVKEYLREHPEIAKDIEGRVLEKYGIGKSGAPVAAAPDESAPAEGGSEKRGRVKAVK

SEQ ID NO: 608 - DNA, 1035 bp, Rubrobacter xylanophilus DSM 9941
  CDS (1)..(1035): transl_table=11
atggcattggacaagagcaaggcgctagacaccgccgtatcgcagatagagcggcagtttggcaagggttcgatcatgcggatgggcgaccgggcctcccagaaggtcgcctccatctccaccggctccctggcgctcgacctcgccctcggggtcgggggggtccccagggggcgcatcgtggagatcttcggtccggagtccagcggaaagaccaccctcgccctgcacatcatcgccgaggcccagagggccggcgggctcgccgcgttcatagacgccgagcacgccctcgaccccacctacgccgaggccataggcgtcgacctggagaacctctacttctcccagcccgacagcggcgagcaggccctcgagatcgccgacaccctcgtccgctccggggccctcgacgccgtggtcatagactccgtggccgcgctggtccctagagccgagatagagggtgagatgggggactctcacgtggggcttcaggcccggcttatgagccaggctctgaggaagctctcggggtcgctctcgcggtcggggaccacggcgatcttcataaaccagctgcgggagaagataggggtgatgttcggctcgccggagaccacgccggggggtcgggcgctgaagttctacgcgagcgtgcggatggacatccggcgcatcggggcgctgaaggccggcaacgagacggtgggcaaccagacgcgggtgaagatcgtcaagaacaaggttgcgccgccgttcaaggaggtcaccttcgacatcatgtacggggaggggatctccagggaggggagcctgctggacgtggggatagagcagggtgtgatccagaagagcggcgcctggttcgcctacggggaggagaggatcgggcaggggcgcgagaacgcccgcaagttcctcaaggagcacccggagatacgcgaccggataacccgcgaggtctacgagcggctgggcctcggcggggaggagcgggaggagctggagggccgggccgagccggtcctgtag

SEQ ID NO: 609 - protein, 344 aa, Rubrobacter xylanophilus DSM 9941
MALDKSKALDTAVSQIERQFGKGSIMRMGDRASQKVASISTGSLALDLALGVGGVPRGRIVEIFGPESSGKTTLALHIIAEAQRAGGLAAFIDAEHALDPTYAEAIGVDLENLYFSQPDSGEQALEIADTLVRSGALDAVVIDSVAALVPRAEIEGEMGDSHVGLQARLMSQALRKLSGSLSRSGTTAIFINQLREKIGVMFGSPETTPGGRALKFYASVRMDIRRIGALKAGNETVGNQTRVKIVKNKVAPPFKEVTFDIMYGEGISREGSLLDVGIEQGVIQKSGAWFAYGEERIGQGRENARKFLKEHPEIRDRITREVYERLGLGGEEREELEGRAEPVL

SEQ ID NO: 610 - DNA, 1074 bp, Shewanella sp. MR-4
  CDS (1)..(1074): transl_table=11
atgaaggtcgatccaaacaaagagaaagcacttgctgcggtattgagccaaattgaaaagcaatttggtaaaggctccatcatgaagctgggcgaagaccgctctatggatgttgagactatttctactggttcactttcccttgacgtcgccttaggtgctggcggtttaccaatgggacgtatcgttgagatttatggtcctgaatcatcaggtaaaacaacgctaacattagaagtgattgccgccgctcagcgggaaggtaaaacctgtgcctttatcgacgccgagcacgcgctagaccctatctatgctaaaaaattaggcgtagatatcgataacttactgtgttcacaacccgatactggtgaacaagcccttgagatctgtgatgcgttaacccgctctggcgcagtagatgtgatcatcgttgactcggtcgcggcattaacacccaaagcagaaattgaaggtgaaatcggtgactcacatatgggcttagcggcgcgtatgatgagccaagcgatgcgtaagttagcgggtaacctcaagcaatcgaatacactgttaatcttcatcaaccaaattcgtatgaagattggtgtgatgtttggtaacccagaaaccacaacgggcggtaacgcgctgaaattctacgcctctgttcgtcttgatattcgccgtactggtgctatcaaagaaggcgatgaagtggtaggtaacgagacgcgcgttaaagtggttaaaaacaaagttgctgcgccgtttaagcaagctgagttccaaattctttacggtcaaggtatcaaccgtaccggtgaattagtcgatttaggtgtggctcataaacttatcgaaaaagccggtgcatggtacagctacaagggtgacaagattggtcagggccgtgcaaatgctggcaaatatttgactgaaaacccagcgatagcagctgaaattgataaaacactacgtgagctattattgagtaaccctgcagccttgtcatcatcagcttctgatgatgagaatagtgaaggcaatgttgacttcgaaacaggcgaagtattctga

SEQ ID NO: 611 - protein, 357 aa, Shewanella sp. MR-4
MKVDPNKEKALAAVLSQIEKQFGKGSIMKLGEDRSMDVETISTGSLSLDVALGAGGLPMGRIVEIYGPESSGKTTLTLEVIAAAQREGKTCAFIDAEHALDPIYAKKLGVDIDNLLCSQPDTGEQALEICDALTRSGAVDVIIVDSVAALTPKAEIEGEIGDSHMGLAARMMSQAMRKLAGNLKQSNTLLIFINQIRMKIGVMFGNPETTTGGNALKFYASVRLDIRRTGAIKEGDEVVGNETRVKVVKNKVAAPFKQAEFQILYGQGINRTGELVDLGVAHKLIEKAGAWYSYKGDKIGQGRANAGKYLTENPAIAAEIDKTLRELLLSNPAALSSSASDDENSEGNVDFETGEVF

SEQ ID NO: 612 - DNA, 1044 bp, Alkalilimnicola ehrlichei MLHE-1
  CDS (1)..(1044): transl_table=11
atggacgaaaatcgcaagaaagcactgggcgctgccctgggacagatcgaacggcagtttggcaagggcgcggtcatgcgcatgggtgatgcccgcgccgtgcgcggcgacgtggaggtcatctccaccggctcgctgcagctcgatatcgccctgggcgtgggcggcctgcccaaggggcgggtggtggagatctacggcccggagtcctccggcaagaccaccctgaccctgcacgcgatcgccgaggcgcagaaggcgggcggcaccgccgccttcgtcgacgccgagcacgcactggaccccgactacgcagagaagctgggggtcaacctggacgacctgctggtctcccagccggacaccggcgagcaggcgctggagatcaccgacatgctggtccgttccggcgccgtggacgtggtggtggtggactcggtcgccgcgctcacgcccaaggccgagatcgagggcgagatgggcgactctcacgtgggcctgcaggcgcggctgatgtcccaagccctgcgcaagctcaccgccaacatcaaacgctccaacaccctggttatcttcatcaatcagatccgcatgaagattggggtaatgttcggcagccccgagaccaccaccgggggtaacgcgctgaaattctacagctcggtgcgcatggatatccgtcgcctgggtgccatcaagaagggcgacgaggtcctgggcaacgagacccgggtcaaggtggtcaagaacaagatggcgccgccgttcaagcaggcggagttcgagatcctctacggccagggtatctcccacgagggggagttgatcgacctgggtgtcaaggagggcctgatcgagaaggccggggcctggtacagccacaacggcgaccgcattggccagggcaaagacaacgtccgcaactacctcaaagagcacccggaactggccgcggaactggaaaagcagatccgcgacaagctgctgcccgggcgggccccatccagcgaggcccagggcaccgaaagcggtcaggaggcctga

SEQ ID NO: 613 - protein, 347 aa, Alkalilimnicola ehrlichei MLHE-1
MDENRKKALGAALGQIERQFGKGAVMRMGDARAVRGDVEVISTGSLQLDIALGVGGLPKGRVVEIYGPESSGKTTLTLHAIAEAQKAGGTAAFVDAEHALDPDYAEKLGVNLDDLLVSQPDTGEQALEITDMLVRSGAVDVVVVDSVAALTPKAEIEGEMGDSHVGLQARLMSQALRKLTANIKRSNTLVIFINQIRMKIGVMFGSPETTTGGNALKFYSSVRMDIRRLGAIKKGDEVLGNETRVKVVKNKMAPPFKQAEFEILYGQGISHEGELIDLGVKEGLIEKAGAWYSHNGDRIGQGKDNVRNYLKEHPELAAELEKQIRDKLLPGRAPSSEAQGTESGQEA

SEQ ID NO: 614 - DNA, 1071 bp, Hyphomonas neptunium ATCC 15444
  CDS (1)..(1071): transl_table=11
gtggacaaggaatccggtgtggataagcaaaaggccctcgaaacggcgctcggcaacattgagcggtcctttggcaagggctccgtcatgcgcctcggcgacaagaaaaccctggatatcgaggcggtttcgaccggctcgctggggctcgacattgcgctcggcattggcggtttgcccaaaggccggatcatcgagatttttggcccggaaagctccggcaagaccacgctgtcgctgcattgtgtagccgaagcccagaagaatggcggcgtctgcgcctttatcgacgcagaacatgcgcttgacccggtctatgcctcgaaactcggcgtcgatctggacgatctgctgatctctcagccagatactggcgaacaggcgcttgagattgccgatacgctcgtgcgttcgggcgctgtggaccttgtggtcatcgactcggttgcggccctcaccccgcgtgcggagattgaaggcgagatgggcgaccagcttcccggcctgcaggcccgcctgatgagccaggcgctgcgcaagctgaccggctcgatctccaagtcgaaatgcatggtcatcttcatcaaccagatccggatgaagatcggtgtgatgtttggcaacccggagacgacgacaggcggtaacgccttgaaattctactcttctgtacgcctcgacatccgccgcatcggccagatcaaggaccgcgaggaggtcatcggcaaccagacgcgcgtcaaggttgtgaagaacaaggtggctccgcctttccggcaggtcgaattcgatattatttatggtgagggcatctccaagacgggcgagcttgtggatctcggcgtcaaggcgaatgtcgtggaaaaatcgggctcctggttctcctataacggggagcgtattggccagggccgcgaaaaggcacggcaattcctcaaggataacccggcggtcgcaaacgagattgaagatgcggttcgccggaatgcgggtcttctcgcagaagagctcctgtctgccggtatggtggctggtgaaggcgatgatgacgccgaggccgccgagggctga

SEQ ID NO: 615 - protein, 356 aa, Hyphomonas neptunium ATCC 15444
MDKESGVDKQKALETALGNIERSFGKGSVMRLGDKKTLDIEAVSTGSLGLDIALGIGGLPKGRIIEIFGPESSGKTTLSLHCVAEAQKNGGVCAFIDAEHALDPVYASKLGVDLDDLLISQPDTGEQALEIADTLVRSGAVDLVVIDSVAALTPRAEIEGEMGDQLPGLQARLMSQALRKLTGSISKSKCMVIFINQIRMKIGVMFGNPETTTGGNALKFYSSVRLDIRRIGQIKDREEVIGNQTRVKVVKNKVAPPFRQVEFDIIYGEGISKTGELVDLGVKANVVEKSGSWFSYNGERIGQGREKARQFLKDNPAVANEIEDAVRRNAGLLAEELLSAGMVAGEGDDDAEAAEG

SEQ ID NO: 616 - DNA, 1095 bp, Rhizobium leguminosarum bv. viciae 3841
  CDS (1)..(1095): transl_table=11
atgtctcagaattcattgcggctggtagaggacaaatcggtggacaaaagcaaggcgcttgaagcggcactctcacagatagagcggtcgttcggcaagggctcgatcatgaaactcggctccaacgagaatgttgtcgagatcgagacgatctcgaccggctcgcttggtctcgatattgcactcggcgttggtggcctgccgaggggccgcatcatcgaaatctacgggccggaaagctccggtaagacgacgcttgcactgcagacgattgccgaagcgcagaagaagggcggcatctgcgccttcgtcgatgccgaacatgcgctcgatcccgtctatgcccgcaagcttggcgtcgacctgcagaaccttctgatctcgcagcccgataccggcgagcaggcgcttgaaatcaccgatacgctggtgcgctccggcgccgtcgacgttctcgtcgtcgactcggttgcggcattgacgccgcgcgccgaaatcgaaggcgaaatgggcgacagccttcccggcctgcaggcacgattgatgagccaggcgctgcgcaagctcaccgcttcgatctcgaagtcgaacactatggtgatcttcatcaaccagatccgcatgaagatcggcgtcatgttcggctcgccggaaacgacgacaggcggcaatgcgctgaaattctatgcttccgtgcgccttgacatccgccgcatcggcgctgtcaaggagcgcgaagaggtgatcggcaaccagacccgcgtcaaggtcgtcaagaacaagatggcgccacccttcaagcaggtcgagttcgacatcatgtatggcgagggtgtttccaagaccggcgaactggtcgatctcggcgtcaaggccggcatcgtcgaaaagtcgggcgcctggttctcctataacagccagcgtctcggccagggccgtgaaaacgccaagactttcctgcgcgacaatccggacctcgcccgcgagatcgaactgtcgctgcgccagaatgccggcctgatcgccgaccgtttcctgcagaacggtggaccggaccccgatgacggcgatggcgatgccactgcggaaatgtaa

SEQ ID NO: 617 - protein, 364 aa, Rhizobium leguminosarum bv. viciae 3841
MSQNSLRLVEDKSVDKSKALEAALSQIERSFGKGSIMKLGSNENVVEIETISTGSLGLDIALGVGGLPRGRIIEIYGPESSGKTTLALQTIAEAQKKGGICAFVDAEHALDPVYARKLGVDLQNLLISQPDTGEQALEITDTLVRSGAVDVLVVDSVAALTPRAEIEGEMGDSLPGLQARLMSQALRKLTASISKSNTMVIFINQIRMKIGVMFGSPETTTGGNALKFYASVRLDIRRIGAVKEREEVIGNQTRVKVVKNKMAPPFKQVEFDIMYGEGVSKTGELVDLGVKAGIVEKSGAWFSYNSQRLGQGRENAKTFLRDNPDLAREIELSLRQNAGLIADRFLQNGGPDPDDGDGDATAEM

SEQ ID NO: 618 - DNA, 1068 bp, Solibacter usitatus Ellin6076
  CDS (1)..(1068): transl_table=11
atggatgaaaaggagcgctcgcgcgctttagaaactgcactcggccagattgagaagcaatttggcaaaggctcgatcctgcgtctcggatcgaaagacgccattgtaccggtctctgtgatttcgacgggctcgatttcgctggacgctgcgctgggtgtcggcggctttcctcgcggccgtattaacgaaatcttcggaccggaatcgtcgggtaaaacgaccatcgcgctgcaggtggtggcggaggcacagaaggccggcgggatcgcggcgttcatcgacgtggaacacgcgctggacccgacgtacgcgcgcaaactcggcgtggacgtcgacaatctgctggtgtcgcagccagactatggcgaacaggcgctcgagatcacggcgcacctgatcgcgtccggacagatcgacgtgctggtggtggattcggtggcggcgctggtgccgaaatccgagctcgacggcgaaatgggcgatagccacatgggcgtgcaggcgcgcctgatgtcgcaggctctgcgcaaactgaccgggtcggtcaacaagtcgcgcacgtgcctgatcttcatcaaccagatccgcgagaagatcggcgtgatgttcggcaatccggaaaccactacgggcggccgcgcgctgaagttttattcgacggtaaggctcgacatccggcgcatcggggccattaaagatggcgacgcggtggtcggcaaccgcaccaaggtcaaggtggtgaagaacaaagtcgcgtcgccgttccgcgaggcggagttcgacatcatttacggcgaaggcgtctccaaggaaggcgacctgctcgatctcggggtcgcgcagaatctggtggagaagagcggctcgtggttcagctacaagggcgatcgcatcggccaggggcgcgagaacgcgcgccagttcctcaaggacaatcccgacatccgcaaggcggtcgatacggaactgcgcaagacgttgggcctggtgaagagcgacgcggctcctgtgccgccgactcccgctccggaacctgcggccgccaagccggccgcacgccgctga

SEQ ID NO: 619 - protein, 355 aa, Solibacter usitatus Ellin6076
MDEKERSRALETALGQIEKQFGKGSILRLGSKDAIVPVSVISTGSISLDAALGVGGFPRGRINEIFGPESSGKTTIALQVVAEAQKAGGIAAFIDVEHALDPTYARKLGVDVDNLLVSQPDYGEQALEITAHLIASGQIDVLVVDSVAALVPKSELDGEMGDSHMGVQARLMSQALRKLTGSVNKSRTCLIFINQIREKIGVMFGNPETTTGGRALKFYSTVRLDIRRIGAIKDGDAVVGNRTKVKVVKNKVASPFREAEFDIIYGEGVSKEGDLLDLGVAQNLVEKSGSWFSYKGDRIGQGRENARQFLKDNPDIRKAVDTELRKTLGLVKSDAAPVPPTPAPEPAAAKPAARR

SEQ ID NO: 620 - DNA, 1173 bp, Magnetococcus sp. MC-1
  CDS (1)..(1173): transl_table=11
atgcgactgccatcaaaaggaaacattatggctttggataaagataagagcaaagcactggatgccgcgctggctcaaattgaacgtcagtttggtaaaggcagcatcatgcgcatgagcgaaggtgccgcgaccgatattcctgtggtctccaccggttccctcggcttggatattgccttgggtgtgggcggcctgccccgtggccgtattgtcgaagtgtatggaccagaatcctccggcaaaaccaccatggccctgcatgtggccgcagaaattcagaaagtgggtggggtggccgctttcgtcgatgccgagcatgcactggatcctatctatgcgcgcaagttgggtgtcaatgtggatgagctgatcatctcccagcccgataccggggaacaggccctggaaattaccgatatgctggtacgctctggcgcggtggacttggtggtggtggactcggtggcggcgctgacgccacgggccgagttggaaggggagatgggggactctcacgtgggtctacaagcccgtctgatgtcccaagcgctgcgcaaattaaccggtagcattagccggtcgagctcattggtgctgtttattaaccagatccgtatgaaaatcggtgtcatgtttggtagcccagagaccaccaccggggggaatgccctcaagttctatgcctcggtacgtctggatattcgccgcattggctccattaaggataaagaagaggtggtgggcaaccgcacccgcgtcaaagtggtaaaaaataaaatggcccctcccttccgccagtgcgaatttgatatcacctatggacagggggtctctctgcatggcgaactgctggatatgggcgtggagatgggcgtggtcgaaaagtccggcgcttggtactcctatgacggtgagcgcatcggccaaggccgagaaaatgccaaacgctacatggcagaaaaccccagtgcagccatgaaactggaagatcaaatccgtcttaaagagggcttaagcgctaaacatggtgcgggccaaagccccgcaaccgaaaccaaaggcgtgcccagccccaagagtggttcctctgccaaaggctcgtcgagagcagccaaagccgccgcagccgaagaggattcaaccgaagatagctttgccgacgatgcctaa

SEQ ID NO: 621 - protein, 390 aa, Magnetococcus sp. MC-1
MRLPSKGNIMALDKDKSKALDAALAQIERQFGKGSIMRMSEGAATDIPVVSTGSLGLDIALGVGGLPRGRIVEVYGPESSGKTTMALHVAAEIQKVGGVAAFVDAEHALDPIYARKLGVNVDELIISQPDTGEQALEITDMLVRSGAVDLVVVDSVAALTPRAELEGEMGDSHVGLQARLMSQALRKLTGSISRSSSLVLFINQIRMKIGVMFGSPETTTGGNALKFYASVRLDIRRIGSIKDKEEVVGNRTRVKVVKNKMAPPFRQCEFDITYGQGVSLHGELLDMGVEMGVVEKSGAWYSYDGERIGQGRENAKRYMAENPSAAMKLEDQIRLKEGLSAKHGAGQSPATETKGVPSPKSGSSAKGSSRAAKAAAAEEDSTEDSFADDA

SEQ ID NO: 622 - DNA, 1074 bp, Shewanella sp. ANA-3
  CDS (1)..(1074): transl_table=11
atgaaagtcgatccaaacaaagagaaagcacttgctgcggtattgagccaaattgaaaagcaatttggtaaaggctccatcatgaagctgggcgaagaccgctctatggatgttgagactatttctactggttcactttcccttgacgtcgccttaggggctggcggtttaccaatgggacgtatcgttgagatctatggtcccgaatcatcaggtaaaacgacgctgacattagaagtgattgccgctgctcagcgcgaaggtaaaacctgtgcctttatcgatgccgagcacgcgctagaccctatctatgctaaaaagttaggcgtagatatcgataacttactgtgttcacaacccgataccggcgaacaagcccttgagatctgtgatgcgttaacccgttctggcgcggtagatgtgatcatcgttgactcggttgcggcattaacacccaaagcagaaattgaaggtgaaattggtgactcacacatgggcctagcggcgcgtatgatgagccaagcgatgcgtaagctcgcgggtaacctcaagcaatcgaatacactattaatcttcattaaccaaattcgtatgaagattggtgtgatgtttggtaacccagaaaccacaacgggcggtaacgcgctgaagttctacgcttctgttcgtctcgatattcgccgtactggtgctatcaaagaaggcgatgaagtggtgggtaacgagacgcgcgttaaagtggttaaaaacaaggttgccgcgccgtttaaacaagctgagttccaaattctttacggtcaaggtatcaaccgtactggtgagttagtcgatttaggtgttgcccataaactgattgaaaaagccggtgcatggtacagctacaagggtgacaagattggtcaaggtcgtgcaaatgccggtaaatatctgactgaaaacccagcaattgccgctgaaatcgataaaacactgcgtgagttactgctgagtaacccaagcgctatgtcttcatcttcatctgatgatgaaaacagcgaaggcaatgttgatttcgaaacaggcgaagtattctga

SEQ ID NO: 623 - protein, 357 aa, Shewanella sp. ANA-3
MKVDPNKEKALAAVLSQIEKQFGKGSIMKLGEDRSMDVETISTGSLSLDVALGAGGLPMGRIVEIYGPESSGKTTLTLEVIAAAQREGKTCAFIDAEHALDPIYAKKLGVDIDNLLCSQPDTGEQALEICDALTRSGAVDVIIVDSVAALTPKAEIEGEIGDSHMGLAARMMSQAMRKLAGNLKQSNTLLIFINQIRMKIGVMFGNPETTTGGNALKFYASVRLDIRRTGAIKEGDEVVGNETRVKVVKNKVAAPFKQAEFQILYGQGINRTGELVDLGVAHKLIEKAGAWYSYKGDKIGQGRANAGKYLTENPAIAAEIDKTLRELLLSNPSAMSSSSSDDENSEGNVDFETGEVF

SEQ ID NO: 624 - DNA, 1044 bp, Mycobacterium sp. KMS
  CDS (1)..(1044): transl_table=11
atggcaccgcaggcacccgatcgcgagaaggccctcgaactggcgctcgcgcagatcgagaagagtcacggtaaaggctcggtgatgcggctcggcgacgaggtgcgcgcgccgatctcggtcatcccgaccggctccatcgccctggacgtggcgctgggcatcggcggcctgccgcgcggccgcgtcatcgagatctacggtccggagtcctcgggtaagaccaccgtcgcattgcacgcggtggccaacgcccaggccgccggcggcatcgcggcgttcatcgacgccgagcacgcgctggatcccgactacgccaagaagctcggggtggacaccgactcgctgctggtctcccagcccgacaccggtgagcaggctctcgagatcgccgacatgctgatccgctccggtgcgctggacatcctggtcatcgactcggtcgccgcactggtgccccgcgccgagatcgagggtgagatgggcgacagtcacgtcggtctgcaggcccggttgatgagccaggcgctgcgcaagatcaccggcgcgctgagcaattcgggcaccaccgcgatcttcatcaaccagctccgcgagaagatcggcgtgatgttcggctctcccgagaccaccacgggcggtaaagcgctgaagttctatgcctcggtccgcatggatgtccgccgcatcgagaccctcaaggacggcaccgacgcggtgggtaaccgcacccgggtcaagatcgtcaagaacaaggtgtcgccgccgttcaagcaggccgaattcgacatcctctacggcaagggcatcagcaaggaaggctcgctcatcgacatgggcgtggagcacggcttcatccgcaagtccggttcctggttcacctacgagggggagcagttgggtcagggcaaggagaacgcccgtaagttcctgctggagaacggcgatgtggccaacgagatcgagaagaagatcaaagagaagctcaacatcggtgccgtggtgaccgctgatgacgtccttcccgcacccgtcgacttctga

SEQ ID NO: 625 - protein, 347 aa, Mycobacterium sp. KMS
MAPQAPDREKALELALAQIEKSHGKGSVMRLGDEVRAPISVIPTGSIALDVALGIGGLPRGRVIEIYGPESSGKTTVALHAVANAQAAGGIAAFIDAEHALDPDYAKKLGVDTDSLLVSQPDTGEQALEIADMLIRSGALDILVIDSVAALVPRAEIEGEMGDSHVGLQARLMSQALRKITGALSNSGTTAIFINQLREKIGVMFGSPETTTGGKALKFYASVRMDVRRIETLKDGTDAVGNRTRVKIVKNKVSPPFKQAEFDILYGKGISKEGSLIDMGVEHGFIRKSGSWFTYEGEQLGQGKENARKFLLENGDVANEIEKKIKEKLNIGAVVTADDVLPAPVDF

SEQ ID NO: 626 - DNA, 1047 bp, Neisseria meningitidis FAM18
  CDS (1)..(1047): transl_table=11
atgtcagacgacaaaagcaaagcacttgccgccgcactggcgcaaatcgaaaaaagtttcggcaaaggcgccatcatgaaaatggacggcagccagcaggaagaaaacctcgaagtcatttccaccggatcgctcggattagacctcgccctcggagtcggcggtctgccgcgcgggcgcatcgtcgaaatcttcggcccagaatcctccggcaaaaccaccctctgcctcgaagccgtcgcccaatgccagaaaaacggcggcgtgtgcgcctttgtcgatgccgaacacgccttcgatcccgtttacgcccgcaaactcggcgtaaaagtcgaagagctttacctgtcccagcccgataccggcgaacaggctttggaaatctgcgacacactcgtccgttcgggcggcatagatatggtagtcgtcgattccgtagccgcactcgtccccaaagccgaaatcgaaggcgatatgggggacagccatgtcggactgcaggcgcgcctgatgagccaggctttgcgcaaactgaccggacacatcaaaaaaaccaacacgctggttgtgttcatcaaccaaatccggatgaagatcggcgtaatgttcggcagccccgagaccacgaccggcggcaacgcgctgaaattctattcttccgtccgcctcgacatccgccgcaccggatccatcaaaaaaggtgaagaagtattgggcaacgaaacccgcgtcaaagtcatcaaaaacaaagtcgcgccgccgttccgtcaggcagagtttgacatcctctacggagaaggcatcagttgggaaggcgaattgatcgacatcggcgtgaaaaacgacatcatcaacaaatccggcgcgtggtacagctacaacggcgcgaaaatcggtcagggcaaagacaacgtccgcgtctggctgaaggaaaatcccgaaattgccgacgaaatcgacgcaaaaatccgcgccctcaacggcatagaaatgcacatcaccgaagggacgcaggacgaaaccgacggcgaacgccccgaagaataa

SEQ ID NO: 627 - protein, 348 aa, Neisseria meningitidis FAM18
MSDDKSKALAAALAQIEKSFGKGAIMKMDGSQQEENLEVISTGSLGLDLALGVGGLPRGRIVEIFGPESSGKTTLCLEAVAQCQKNGGVCAFVDAEHAFDPVYARKLGVKVEELYLSQPDTGEQALEICDTLVRSGGIDMVVVDSVAALVPKAEIEGDMGDSHVGLQARLMSQALRKLTGHIKKTNTLVVFINQIRMKIGVMFGSPETTTGGNALKFYSSVRLDIRRTGSIKKGEEVLGNETRVKVIKNKVAPPFRQAEFDILYGEGISWEGELIDIGVKNDIINKSGAWYSYNGAKIGQGKDNVRVWLKENPEIADEIDAKIRALNGIEMHITEGTQDETDGERPEE

SEQ ID NO: 628 - DNA, 1122 bp, Acidovorax sp. JS42
  CDS (1)..(1122): transl_table=11
atggacgccaccgtcaaaggcaacgcaaccgccgtcaacagcgaaaaggccaaggccctgcaagccgccctcgcgcagatcgaaaagcagttcggcaagggcaccatcatgcgcctgggcgagggcgaggccattgaggacatccaggtggtctccaccggctcgctgggcctggacatcgccctgggcgtgggcggcctgccgcgcggccgcgtgatcgagatctacggaccggaaagctcgggcaagaccacgctcacgctgcaggtcatcgccgagatgcagaagcaaggcggccagtgcgctttcgtggatgccgagcatgcgctggatgtgcagtacgccagcaagctcggcgttcagctcaccgacctgctcatcagccagccggacacgggcgagcaggcgctggagatcgtggacagcctggtgcgctcgggtgccgtggacctgatcgtggtggactcggtcgccgccctcacgcccaaggccgaaatcgagggcgagatgggcgacgccctgcccggcctgcaggcacgcctgatgagccaggcgctgcgcaagctcaccgccaccatcaagaagaccaactgcatggtcatcttcatcaaccagatccgcatgaagatcggcgtgatgttcggcagccccgagaccaccaccggcggcaacgcgctgaagttctacgcctcggtgcgcctggacatccgccgtaccggcaccatcaagaagggcgacgaggcgatcggcaacgagaccaaggtgaaggtggtgaagaacaaggtctcgcccccgttcaagacggccgaattcgacatcctgttcggcgagggcatctcgcgcgagggcgagatcatcgacatgggcgtgaacgcgcgcatcctggaaaagagtggcgcctggtatgcctacaacggcgaaaagatcggccagggccgcgacaacgcccgcgagttcctgcgcgagaaccctggcctggccgtggagatcgagaacaaggtgcgcgaaagcctgggcatcgcactgctgcccacgggccacgcgagcccggcggccgatctgcccgaagacaagcctgcgcgcggcaagaaggccgacaagacgggcgagatcgaggcgtaa

SEQ ID NO: 629 - protein, 373 aa, Acidovorax sp. JS42
MDATVKGNATAVNSEKAKALQAALAQIEKQFGKGTIMRLGEGEAIEDIQVVSTGSLGLDIALGVGGLPRGRVIEIYGPESSGKTTLTLQVIAEMQKQGGQCAFVDAEHALDVQYASKLGVQLTDLLISQPDTGEQALEIVDSLVRSGAVDLIVVDSVAALTPKAEIEGEMGDALPGLQARLMSQALRKLTATIKKTNCMVIFINQIRMKIGVMFGSPETTTGGNALKFYASVRLDIRRTGTIKKGDEAIGNETKVKVVKNKVSPPFKTAEFDILFGEGISREGEIIDMGVNARILEKSGAWYAYNGEKIGQGRDNAREFLRENPGLAVEIENKVRESLGIALLPTGHASPAADLPEDKPARGKKADKTGEIEA

SEQ ID NO: 630 - DNA, 1068 bp, Haemophilus somnus 2336
  CDS (1)..(1068): transl_table=11
atggcaaccccagaagaaaaagcaaaagcacttgaagccgctctaggacaaattgagaaacaatttggtaagggtgcaattatgaaattaggggaaacccaaaaactggatattgaagcaatttcaaccggctcacttagtttggatgttgctttaggtatcggcggcttaccaatgggacgtattgttgaaatttttggccccgagtcctcaggcaaaacgacattaacactatcggttatcgcacaagcacaaaaagcaggtaaaacctgtgcatttattgatgcagaacacgcacttgatccaatttatgcggctaaattaggtgttgacgttaaagagttattaatttctcaaccggataacggagagcaagcactggaaatctgtgatgctctcgttcgttccggtgcggtagacgttgtgattgttgactctgttgccgctttaacaccgaaagcagaaattgaaggtgaaatgggtgatactcatgttggtttacaagcaagacttatgtcacaagcattacgcaaattaacggggcagatcaaaaactcaaattgtttggtcgtctttatcaaccaaattcgcatgaaaattggtgttgtttttggtaatccagaaactaccacaggcggtaatgctttaaaattctacgcttctgttcgtcttgatattcgtcgtgttggcagtatcaaaaatggtgatgaagtcattggtaatgaaactcgtgtaaaagtggttaaaaataaagtcgcacctccgttccgccaagttgatttccaaattttatacggtgagggtatttcaagaaatggtgaacttattgaacttggcgtaaaacataagttagtaaataaatccggtgcttggttctcctatgagggcgaaaaaattggtcaagggaaaacaaatgcgatgaaatggttagctgaacatcctgagcaagctgctattttagagcaaaaattacgttcagaattattagcaaatccggaaaaagcactattagcggatcttgaagctgaatcagaatcaaacatatctgaagttgaaagtgatttttaa

SEQ ID NO: 631 - protein, 355 aa, Haemophilus somnus 2336
MATPEEKAKALEAALGQIEKQFGKGAIMKLGETQKLDIEAISTGSLSLDVALGIGGLPMGRIVEIFGPESSGKTTLTLSVIAQAQKAGKTCAFIDAEHALDPIYAAKLGVDVKELLISQPDNGEQALEICDALVRSGAVDVVIVDSVAALTPKAEIEGEMGDTHVGLQARLMSQALRKLTGQIKNSNCLVVFINQIRMKIGVVFGNPETTTGGNALKFYASVRLDIRRVGSIKNGDEVIGNETRVKVVKNKVAPPFRQVDFQILYGEGISRNGELIELGVKHKLVNKSGAWFSYEGEKIGQGKTNAMKWLAEHPEQAAILEQKLRSELLANPEKALLADLEAESESNISEVESDF

SEQ ID NO: 632 - DNA, 1131 bp, Actinobacillus pleuropneumoniae serovar 1 str. 4074
  CDS (1)..(1131): transl_table=11
atggcatcggataacaaaaaagcgcaaaagaacacagtaacaaaacaaatcgatccggaacaaaaagaaaaagcattagctgctgctcttgcccaaattgaaaaacaatttggtaaaggttctattatgcgcttaggcgacacgcaagcgcttgatattgaagcggtttcaaccggttcaatcggtttagacgccgcattaggtatcggtggcttaccgatgggacgtatcgttgagatctatgggccggaatcttcaggtaaaacgacgctgactttatcggtcattgcgcaagcacaaaaatcaggtaaaacttgtgcgtttattgatgcggaacacgcgcttgatccggtttatgcacgtaaattaggcgtggataccgatgcattgttaatttcacaaccggataacggtgaacaagcgctcgagatttgtgatgcgttggttcgttccggtgcggttgatgtaattattgtggactcggttgctgcattaacgccgaaagcggaaattgaaggcgatatgggcgattctcatatgggcttacaagcacgtttaatgtcacaagcgttacgtaaattaacggcaaacattaaggcgactaactgcttagtggtgtttatcaaccaaattcgtatgaagatcggtgtgatgttcggtaaccctgaaacaacaaccggcggtaacgcacttaaattctacgcttcggttcgtttagatattcgtcgttcaggtgtagtaaaagacggagatgaagtggtcggtagcgaaacgaaagtgaaaattgtgaaaaataaagttgcgccgccgttccgtgaagttcaattcgacattatgtatggtgaaggtatttcacgtatgaatgaactattaattcttgccgaagcgaatggctttatccaaaaagcgggtgcatggttctcatacgaaggtacgaaaatcggtcaaggtaaaaataatgcaattaaatggttaaaagaaaatccggagattgcagagaaaattgaacaagatattcgtgagcaacttatttcaacaccggaaaaaacatcggcaggtgaacaaaatgtgctagatgccgatgatgtgaatgactttgaagacgaagcgtttaacgaagaagaactataa

SEQ ID NO: 633 - protein, 376 aa, Actinobacillus pleuropneumoniae serovar 1 str. 4074
MASDNKKAQKNTVTKQIDPEQKEKALAAALAQIEKQFGKGSIMRLGDTQALDIEAVSTGSIGLDAALGIGGLPMGRIVEIYGPESSGKTTLTLSVIAQAQKSGKTCAFIDAEHALDPVYARKLGVDTDALLISQPDNGEQALEICDALVRSGAVDVIIVDSVAALTPKAEIEGDMGDSHMGLQARLMSQALRKLTANIKATNCLVVFINQIRMKIGVMFGNPETTTGGNALKFYASVRLDIRRSGVVKDGDEVVGSETKVKIVKNKVAPPFREVQFDIMYGEGISRMNELLILAEANGFIQKAGAWFSYEGTKIGQGKNNAIKWLKENPEIAEKIEQDIREQLISTPEKTSAGEQNVLDADDVNDFEDEAFNEEEL

SEQ ID NO: 634 - DNA, 1257 bp, Bifidobacterium longum DJO10A
  CDS (1)..(1257): transl_table=11
atggcatgtccgtcatacggtggaggcatccgattcgcacacgacttcgacaaggagaagatcatggcacttgagaccaagccggccaaggacccggcagccgaggacaagcacgagctcgatcccaagcgcaaggcggcgctggacaccgcgctggcgcaggtcgagaagagttttggcaaaggttccgcaatgcgactgggcgaccagcccgagcagaacgtcgaggtgattcccaccggttcgttggctctcgatatggcgctcggcatcggcggcctacccaagggccgcatcgtggagatctacggccccgaatcatccggtaagaccacgctcgcattgcatgtggtggccaatgcccagaagaagggcggcgtggcggcctacatcgatgccgaacacgcgctcgacccggcctacgcccgcaagctcggcgtggacaccgactcactcatcgtctcccagccggataacggcgagcaggccctcgaaatcgctgacatgctgattcgctccggtgcgcttgacgtcatcgtcatcgactcggtcgccgctttggtgccgaaggccgaaatcgaaggcgaaatgggagacagccatgttggtttgcaggcccgactcatgagtcaggcgctgcgcaagatgaccggcgcgttggctcaggccggcaccaccgccatcttcatcaaccagctgcgtgagaagatcggcgtgttcttcggcaaccctgaaaccaccaccggtggtaaagctctgaagttctacgcctccgtgcgtctcgacatccgccgcatccagaccttgaagaacggcgacgaagcggtgggcaaccgcacgcgcgtcaaggtggtcaagaacaagatggccccgcctttcaagtccgccgaattcgacatgctctacggtgaaggcatttcccgtgagggctcggtgatcgacatggcccagcaggttggcgtggttaagaagtccggttcgtggttcacctatgagggtgatcagctcggtcagggacgagagaaggtccgtcagttccttaaggacaacccggccatcaccgaggagattgagaacaaggtcaaggccgagttcggtctgatcggttccgccgatcagttcgcggaagatggcgaagccgcagcagcggccgccgtcagcgaggctgctgcggctgacgtggccaaggacagcaaggccgcagcggcgcctgctgccaaaacgacccgtgccaaggccggcacagctaaggcctga

SEQ ID NO: 635 - protein, 418 aa, Bifidobacterium longum DJO10A
MACPSYGGGIRFAHDFDKEKIMALETKPAKDPAAEDKHELDPKRKAALDTALAQVEKSFGKGSAMRLGDQPEQNVEVIPTGSLALDMALGIGGLPKGRIVEIYGPESSGKTTLALHVVANAQKKGGVAAYIDAEHALDPAYARKLGVDTDSLIVSQPDNGEQALEIADMLIRSGALDVIVIDSVAALVPKAEIEGEMGDSHVGLQARLMSQALRKMTGALAQAGTTAIFINQLREKIGVFFGNPETTTGGKALKFYASVRLDIRRIQTLKNGDEAVGNRTRVKVVKNKMAPPFKSAEFDMLYGEGISREGSVIDMAQQVGVVKKSGSWFTYEGDQLGQGREKVRQFLKDNPAITEEIENKVKAEFGLIGSADQFAEDGEAAAAAAVSEAAAADVAKDSKAAAAPAAKTTRAKAGTAKA

SEQ ID NO: 636 - DNA, 1044 bp, Exiguobacterium sibiricum 255-15
  CDS (1)..(1044): transl_table=11
gtgagtgatcgtaaagcagcacttgaaatggcattgcgtcagattgagaaacaatttggtaaaggttcaatcatgaaactaggtgaaagtgcagatcagagagtatccgtaatctcttctggatcaatcacattagatatagcactcggtgcaggtggatatccacgtggacgggtaatcgaagtctatggtccggaatcttccggtaaaacgacagtttcgcttcatgcgattgctgaagtccaaaaacaaggcggacaggcggcattcatcgatgccgagcacgcacttgatccggcttatgccagcaaactcggtgtcaacattgacgaattactgttatcacaaccggatacaggagagcaggcgcttgaaatcgcagaggcattagtccgttctggtgctgttgatatcctcgtcgtcgactcagtagcggcacttgtcccgaaagccgagatcgaaggcgaaatgggtgactcgcacatgggtctccaggctcgtttgatgagtcaggcgttgcgtaaattgtccggtgcgacaaacaaatccaaaacaatcgtcatcttcatcaaccagattcgtgaaaaaatcggtgtcatgttcggtaacccggaaacgactccaggtggacgtgccttgaaattctattcatcggtccgtcttgaagtccgtcgtgcagaagcactgaaaaacggaacagatatcgtcggaaaccggacgaaactgaaagtcgttaaaaacaagatcgctccgccgttcaaacaagcggaagtcgacatcatgtacggacaaggaatctctaaattcggcgagttgattgatcttggaacagatctcgatatcgtccaaaaaagtggtgcttggtattcatacaattcagagcgtcttggtcaaggacgtgaaaatgcgaaacaatacatgattgaacatccggatgttgcggatgaggtcgaacgattgattcgtgaacatcacggtctcgtcgaccggaaagaaccggttgactttgaagaaggtcaagacgaagatctgtttgcagaataa

SEQ ID NO: 637 - protein, 347 aa, Exiguobacterium sibiricum 255-15
MSDRKAALEMALRQIEKQFGKGSIMKLGESADQRVSVISSGSITLDIALGAGGYPRGRVIEVYGPESSGKTTVSLHAIAEVQKQGGQAAFIDAEHALDPAYASKLGVNIDELLLSQPDTGEQALEIAEALVRSGAVDILVVDSVAALVPKAEIEGEMGDSHMGLQARLMSQALRKLSGATNKSKTIVIFINQIREKIGVMFGNPETTPGGRALKFYSSVRLEVRRAEALKNGTDIVGNRTKLKVVKNKIAPPFKQAEVDIMYGQGISKFGELIDLGTDLDIVQKSGAWYSYNSERLGQGRENAKQYMIEHPDVADEVERLIREHHGLVDRKEPVDFEEGQDEDLFAE

SEQ ID NO: 638 - DNA, 1047 bp, Kineococcus radiotolerans SRS30216
  CDS (1)..(1047): transl_table=11
atgcccgctcctgcggaccgcgagaaggccctcgacgccgccctcgcagcgatcgacaagaacttcggcaagggctcggtcatgcggctgggcgacgaggtccgtccgccgatcgaggtcatcccgaccggctccatctccctggacgtcgccctcggcatcggcggcctgccccgcggtcgcgtggtggagatctacggcccggagtcctcgggcaagacgaccgtcgccctgcacgccgtggccagcgcccagaaggccggcggcatcgccgccttcatcgacgccgagcacgccctcgacccggactacgcggccaagctgggcgtcgacaccgacgcgctgctggtctcccagcccgacacgggggagcaggcgctggagatcgcggacatgctgatccgctccggcgccctcgacatcatcgtcatcgactccgtcgcggccctcgtgcccaaggccgagatcgagggcgagatgggcgacagccacgtcggtctgcaggcccgcctgatgtcgcaggccctgcgcaagatcaccggtgcgctgaaccactccggcaccacggccatcttcatcaaccagctgcgcgagaagatcggcgtcatgttcggctcgcccgagacgacgacgggcggcaaggcgctgaagttctacgcctcggtccgcctcgacgtccgccggatcgagacgctcaaggacgggacgaaccccgtcggcaaccggacccgcgtcaaggtcgtcaagaacaaggtcagcccgcccttcaagcaggccgagttcgacatcatctacggccagggcatctcccgcgagggtgggctcatcgacctcggcgtcgagcacggcttcgtgcgcaagtccggcgcctggtacacctacgagggcgatcagctcggccagggcaaggagaacgcccgcgccttcctgcgcgacaaccccgacctcggcgacgagatcgagaagcgcatcaaggagaagctcggcatcggcgcccgcctggacgccccggccgaggtcgacgtcgaggagaaggtcgacttctga

SEQ ID NO: 639 - protein, 348 aa, Kineococcus radiotolerans SRS30216
MPAPADREKALDAALAAIDKNFGKGSVMRLGDEVRPPIEVIPTGSISLDVALGIGGLPRGRVVEIYGPESSGKTTVALHAVASAQKAGGIAAFIDAEHALDPDYAAKLGVDTDALLVSQPDTGEQALEIADMLIRSGALDIIVIDSVAALVPKAEIEGEMGDSHVGLQARLMSQALRKITGALNHSGTTAIFINQLREKIGVMFGSPETTTGGKALKFYASVRLDVRRIETLKDGTNPVGNRTRVKVVKNKVSPPFKQAEFDIIYGQGISREGGLIDLGVEHGFVRKSGAWYTYEGDQLGQGKENARAFLRDNPDLGDEIEKRIKEKLGIGARLDAPAEVDVEEKVDF

SEQ ID NO: 640 - DNA, 1044 bp, Xylella fastidiosa Dixon
  CDS (1)..(1044): transl_table=11
atggatgagaacaagaaacgcgccctttctgtcgctttaagccagattgaaaaacagttcggcaaggggtctgtgatgcggatgggcgatcgcgtgatcgaagccgtagaggcgatcccgacaggttcgctcatgttggatctggccttggggataggtggtttgccaaagggacgtgtcgtggaaatctatgggccggaatcttctgggaagaccacattgactttgcaggcgatcgctcaatgccagaagaagggaggtacagcagcgttcattgatgctgagcatgccttggatccgatttatgcgggcaagttaggcgtcaatgttgatgatttgttgttgtctcagccagatactggggagcaggctctggaaatcgctgacatgctggtgcgctcgggctcaatcgatatcatggttattgattcggttgcggcactcacgccaaaggcggagattgagggtgagatgggagatcagttgcccggtcttcaggcgcgattgatgagccaggcgctgcgtaaattgaccggcaatatcaagcgctctaatacgctagtgatttttatcaaccagttgcgtatgaaaattgggatcatgatgccgggtcaaagccctgaaactacgacagggggtaatgcgctgaagttctatgcttcagtgcgtttggatattcgccgtattggcgcgatcaagaagggtgacgaaattatcgggaatcaaaccaaaatcaaggttgttaaaaacaagttggcgcctcccttcaaacaagtcgtgactgagattctctatggtgaaggcatcagtcgtgaaggggaattgattgaaatgggcgtggaggccaagttggttgagaaagccggcgcttggtatagctatggtggtgagcggatcgggcaaggaaaagataatgcgcgtggctatctacgcgaaaacccgcatcttgcggccaagcttgaggctgatttgcgtgagaaatttgagccgaccgagctttctcgagaagagggcgatgaagatgcgctcgaagatgcaatgtaa

SEQ ID NO: 641 - protein, 347 aa, Xylella fastidiosa Dixon
MDENKKRALSVALSQIEKQFGKGSVMRMGDRVIEAVEAIPTGSLMLDLALGIGGLPKGRVVEIYGPESSGKTTLTLQAIAQCQKKGGTAAFIDAEHALDPIYAGKLGVNVDDLLLSQPDTGEQALEIADMLVRSGSIDIMVIDSVAALTPKAEIEGEMGDQLPGLQARLMSQALRKLTGNIKRSNTLVIFINQLRMKIGIMMPGQSPETTTGGNALKFYASVRLDIRRIGAIKKGDEIIGNQTKIKVVKNKLAPPFKQVVTEILYGEGISREGELIEMGVEAKLVEKAGAWYSYGGERIGQGKDNARGYLRENPHLAAKLEADLREKFEPTELSREEGDEDALEDAM

SEQ ID NO: 642 - DNA, 1071 bp, Sulfitobacter sp. EE-36
  CDS (1)..(1071): transl_table=11
atggcaacggcagatcttttgactatggacaacaagaaacaagctgaaaagcaaaaggccctggacagcgcgctggcacagattgaacgccagttcggcaaagggtcgatcatgaagctgggggccgaaggggccattcaggacatcaaggcgagctcgaccggttcgttagggctggatatcgcacttggtatcggcggtctgcccatggggcggatcatcgagatttatggcccggaatcctcgggtaagaccacattgaccctgcattgtgttgcggagcagcagaaaaacggcggcgtttgtgcctttgttgacgcggaacacgcgcttgatccgcaatacgcgcgcaaattgggcgttgatatcgacgagctgctgatttcccagcctgacaccggcgaacaagcgcttgaaattacggatacgttggtccgctccggtgcggtgaatatggtggtggtcgactccgttgcggccttgacgcccaaatccgagttggaaggcgatatgggcgacagctctgtcggggtgcaggcccgtctgatgagccaggccatgcggaaactgacaggctcgatctcgcggtcgaactgcatggtgattttcatcaaccagatccggatgaaaatcggcgtcatgttcgggtcgcccgaaacgacgaccggcgggaacgcgttgaaattctattcttccgtgcgtctggacatccgccgcattggcgcgctcaaggatcgtgacgaggtggtcggcaacgccacacgggtcaagatcgttaagaacaaggtggccgcaccattcaagcaggtcgaattcgacatcatgtatggggaagggatctccaagatgggcgagctgctggatcttggggtcaaggctggcgtggttgataaatcgggatcgtggttcagctatggcgatgaacggatcgggcaggggcgtgaaaacgccaagaccttcctgaaagaaaacaccgccatggcaaatgagatcgaagacaagatccgcgcggcccatgggctggacttcgacggctccgacagcgacgacgcggatatcctcgaagcgtaa

SEQ ID NO: 643 - protein, 356 aa, Sulfitobacter sp. EE-36
MATADLLTMDNKKQAEKQKALDSALAQIERQFGKGSIMKLGAEGAIQDIKASSTGSLGLDIALGIGGLPMGRIIEIYGPESSGKTTLTLHCVAEQQKNGGVCAFVDAEHALDPQYARKLGVDIDELLISQPDTGEQALEITDTLVRSGAVNMVVVDSVAALTPKSELEGDMGDSSVGVQARLMSQAMRKLTGSISRSNCMVIFINQIRMKIGVMFGSPETTTGGNALKFYSSVRLDIRRIGALKDRDEVVGNATRVKIVKNKVAAPFKQVEFDIMYGEGISKMGELLDLGVKAGVVDKSGSWFSYGDERIGQGRENAKTFLKENTAMANEIEDKIRAAHGLDFDGSDSDDADILEA

SEQ ID NO: 644 - DNA, 1059 bp, Roseovarius nubinhibens ISM
  CDS (1)..(1059): transl_table=11
atggacagcaagcgtaaccccgacaagcaaaaggcgctggacagcgccctggcgcagatcgagcggcaatttggcaagggctcgatcatgaagctcggggccgacaacccggttcaggagatcgaggccacctcgaccggctcgctcgggctcgacatcgcgctcgggatcggcggcctgcccaaggggcggatcatcgaaatttacgggcccgaaagctcgggcaaaaccacgctgacactgcattgcgtggccgaagagcagaaaaaaggcggcgtttgcgcctttgtcgacgcggaacatgcgctcgacccgatctatgcgcggaaacttggcgtcgatctcgatgaattgctgatctcgcagcccgacaccggggaacaggcgctcgagattgtcgatacgctcgtccgctcgggcgcggtgagcatggttgtggtcgactcggttgcggcgctgacgccgaaatccgagcttgaaggtgacatgggcgacagcaatgtcggcgtgcaggcgcggctcatgagccaggcgatgcgcaagctgaccggctcgatcagccggtcgaaatgcacggtgatcttcatcaaccagatccgcatgaaaatcggcgttatgttcggcagccccgagaccacgacgggcggcaatgcgctcaaattctacagctcggttcggctcgacattcgtcgcatcggcgcgctcaaggatcgtgacgaggtggtcggcaacgcgacccgcgtcaaggtcgtcaaaaacaaggtcgcgccgcccttcaagcaggtggaattcgacatcatgtatggcgaaggtatctcgaaaatgggcgagctgctcgatctcggggtcaaggccggggtggtcgagaaatccggcagctggttcagctatggcgacgagcggatcgggcaggggcgtgagaacgccaagaccttcctgaaggaaaacagcgccattgcgctggccatcgaggataaaattcgcgcggcccatgggctcgaattcgacatgcccgagatcgagaaacagggtgacgaggacgacatcctcgaaggctga

SEQ ID NO: 645 - protein, 352 aa, Roseovarius nubinhibens ISM
MDSKRNPDKQKALDSALAQIERQFGKGSIMKLGADNPVQEIEATSTGSLGLDIALGIGGLPKGRIIEIYGPESSGKTTLTLHCVAEEQKKGGVCAFVDAEHALDPIYARKLGVDLDELLISQPDTGEQALEIVDTLVRSGAVSMVVVDSVAALTPKSELEGDMGDSNVGVQARLMSQAMRKLTGSISRSKCTVIFINQIRMKIGVMFGSPETTTGGNALKFYSSVRLDIRRIGALKDRDEVVGNATRVKVVKNKVAPPFKQVEFDIMYGEGISKMGELLDLGVKAGVVEKSGSWFSYGDERIGQGRENAKTFLKENSAIALAIEDKIRAAHGLEFDMPEIEKQGDEDDILEG

SEQ ID NO: 646 - DNA, 1080 bp, Oceanicola batsensis HTCC2597
  CDS (1)..(1080): transl_table=11
atggcaacggcagatcttctctccatggatagcaagcgcgacgcgaacaagcagaaggcgctcgacagtgcgctggcccagatcgaacgccagttcggcaagggctcgatcatgaaactgggcggcgacaacccgttccgggacatcgaggcgacctcgaccggctcgctcgggctcgacatcgccctcgggatcggcggcctgcccaagggccggatcatcgagatctacggccccgaatcctcgggcaagacgacgctcaccctgcattgcgtggccgaggaacagaaaaagggcggcgtctgcgccttcgtcgacgccgaacacgcgctcgacccgcaatacgcaaggaaactgggcgtcgatctcgacgagctgctgatctcgcagcccgataccggcgaacaggcgctggaaatcaccgacacgctggtccggtccggcgccgtgtcgatggtgatcgtagattccgtcgccgccctgaccccgaaatccgagctcgagggcgacatgggcgacagttccgtcggcgtccatgcccggctgatgtcccaggccatgcgcaagctgaccgggtccatcgcgcgctcgaactgcatggtgatcttcatcaaccagattcgcatgaagatcggcgtcatgttcggctcgcccgagaccaccaccggcggcaatgcgctcaagttctattcctcggtccgcctcgacatccgccgcatcggcgcgatcaaggaacgcgacgaggtcgtgggtaaccagacacgcgtcaaggtcgtcaagaacaaggtcgcaccgcccttcaagcaggtggaattcgacatcatgtacggcgagggcatctccaagaccggcgaattgctggacctcggcgtcaaagccggggtggtcgagaaatccggctcctggtattcttacggcgacgagcgcatcggacagggccgcgagaacgccaaggtcttcctcagggaaaacggcgaaatcgcctatgccatcgaagacaagatccgcgccgcgcatggcctggacttcggcatcgagggcgagggcggcgacagcgcggacgacgtgctggacgcctga

SEQ ID NO: 647 - protein, 359 aa, Oceanicola batsensis HTCC2597
MATADLLSMDSKRDANKQKALDSALAQIERQFGKGSIMKLGGDNPFRDIEATSTGSLGLDIALGIGGLPKGRIIEIYGPESSGKTTLTLHCVAEEQKKGGVCAFVDAEHALDPQYARKLGVDLDELLISQPDTGEQALEITDTLVRSGAVSMVIVDSVAALTPKSELEGDMGDSSVGVHARLMSQAMRKLTGSIARSNCMVIFINQIRMKIGVMFGSPETTTGGNALKFYSSVRLDIRRIGAIKERDEVVGNQTRVKVVKNKVAPPFKQVEFDIMYGEGISKTGELLDLGVKAGVVEKSGSWYSYGDERIGQGRENAKVFLRENGEIAYAIEDKIRAAHGLDFGIEGEGGDSADDVLDA

SEQ ID NO: 648 - DNA, 1065 bp, Erythrobacter sp. NAP1
  CDS (1)..(1065): transl_table=11
atggctaccaatctcaagctcgtagagaaggaaaaagacgtggaccgtcaaaaggcgctcgacgccgcccttgcacagattgatcgcgctttcggcaagggctcggcgatgaagctcggctcgaaagaggcgatgcaggttgaatcgatttcgaccgggtcgctgggcctcgatattgctcttggtattggcggcctgcctaaaggccgcgtgatcgaagtctacggcccggaaagctcgggtaagacgacgctcgcactgcactgcattgcagaggctcagaaagccggcggtacggcggccttcgtcgatgccgagcatgcgcttgacccggtctatgcgaagaagctgggcgtcgacatcgacgaactggtcgtctcgcagcccgacacgggtgagcaggcactcgaaattaccgacacgctggtccgctcgaacgcggttgacgtgctggtggtcgactcggtcgcggcgcttgtcccgcgcgcagaaattgaaggcgagatgggcgattcccacgtcggcctgcaagcgcgcctgatgtcccaatctctgcgcaagctgaccgggtcgatcaatcgttccaagtgcatggtgatcttcatcaaccagctgcggatgaagatcggcgtcatgtacggcaaccccgaaactacgaccggcggtaacgcgctcaagttctacgcttcggttcgcctcgacattcgccgcaccggccagatcaaggaccgcgacgaggtgatcggcaactcgactcgcgtgaaagtggtcaagaacaaggtcgccccgccgttcaagcaggtcgaattcgacatcatgtatggcgaaggcatctccaagatcggcgagattctcgatctcggcgtgaaggccggcatcgtcgagaagtcgggcagctggtattcctatgacagcgtccgcatcggccagggccgcgagaatgccaagacctacctcaaggaaaatcctgaagtttgcgacaagttggaagccgccattcgcggtaaaaccgacgaggtcgccgaggaaatgatgacgggcccggacgcggataccgacagctga

SEQ ID NO: 649 - protein, 354 aa, Erythrobacter sp. NAP1
MATNLKLVEKEKDVDRQKALDAALAQIDRAFGKGSAMKLGSKEAMQVESISTGSLGLDIALGIGGLPKGRVIEVYGPESSGKTTLALHCIAEAQKAGGTAAFVDAEHALDPVYAKKLGVDIDELVVSQPDTGEQALEITDTLVRSNAVDVLVVDSVAALVPRAEIEGEMGDSHVGLQARLMSQSLRKLTGSINRSKCMVIFINQLRMKIGVMYGNPETTTGGNALKFYASVRLDIRRTGQIKDRDEVIGNSTRVKVVKNKVAPPFKQVEFDIMYGEGISKIGEILDLGVKAGIVEKSGSWYSYDSVRIGQGRENAKTYLKENPEVCDKLEAAIRGKTDEVAEEMMTGPDADTDS

SEQ ID NO: 650 - DNA, 1062 bp, Pseudoalteromonas tunicata D2
  CDS (1)..(1062): transl_table=11
atgaacgataataaagaaaaagcattaagcgcagcactatctcaaattgaacgccaatttggtaaaggttcaattatgaaattaggtgatagtcaggcacttgatattgaatctatttcaactggctcacttggtattgatattgcgctgggtataggtggtttacctgctggtcgtattgttgaaatttttggtcctgaatcgtcaggtaaaacaacgttaacgttacaagttattgcagaagcccagaaaaaaggcaaaacatgtgcctttattgatgctgaacatgcccttgaccctgtttatgctgaaaagttgggtgtaaatattaaagatttactggtatctcagcctgataccggtgagcaagcgcttgagatttgtgacatgttagtgcgctctggtgctgttgatgtggtgatcattgactcggtggcagcattaacaccaaaagctgaaattgaaggcgatatgggtgatcaccatgttggcttacaagctcgtttaatgtcacaagcattacgtaagctaactggtaatatcaaacgttcaaatactttagttatttttatcaaccaaatacgtatgaaaattggcgtgatgtttggtaatccagaaacaaccacaggtggtaatgcactgaagttttatgcttcagttcgtatcgatattcgtcgtaccggctctgttaaagagggtgatgaagtggtaggtaatgagacgcgtgtaaaaattgttaaaaacaaagttgcgccgccatttaaacaagcagaatttattattatgtatggagaaggtatctctaaacatggtgagctaattgatttgggtgttcagcacaaatttgttgaaaaagccggtgcatggtacagctatcagggtaataaagttggtcaaggtaaatcaaactcaattaaattcttaaaagaaaatccagcaattgctgatgaaattgaaaagaaattacgcgatatgttgttattaaaagcaacaattaaaccagaggatgggattgcaagtttagctgctgaagccgaaggtagcattgaagaagacttttaa

SEQ ID NO: 651 - protein, 353 aa, Pseudoalteromonas tunicata D2
MNDNKEKALSAALSQIERQFGKGSIMKLGDSQALDIESISTGSLGIDIALGIGGLPAGRIVEIFGPESSGKTTLTLQVIAEAQKKGKTCAFIDAEHALDPVYAEKLGVNIKDLLVSQPDTGEQALEICDMLVRSGAVDVVIIDSVAALTPKAEIEGDMGDHHVGLQARLMSQALRKLTGNIKRSNTLVIFINQIRMKIGVMFGNPETTTGGNALKFYASVRIDIRRTGSVKEGDEVVGNETRVKIVKNKVAPPFKQAEFIIMYGEGISKHGELIDLGVQHKFVEKAGAWYSYQGNKVGQGKSNSIKFLKENPAIADEIEKKLRDMLLLKATIKPEDGIASLAAEAEGSIEEDF

SEQ ID NO: 652 - DNA, 1050 bp, Photobacterium sp. SKA34
  CDS (1)..(1050): transl_table=11
atggacgacaacaaacaaaaggctcttgccgcagcgttaggccagattgagaagcagttcggtaaaggttcaatcatgaagttgggcgataaccgtacgatggatatcgaaaccatttcaaccggttcattatcgctagatattgcactgggagctggtggtctaccaatggggcgtattgttgaaatttacggtccagaatcatcaggtaaaacaaccttaacccttgaaacgattgcagcagctcagcgtaaaggaaaaacctgtgctttcatcgatgctgaacacgcacttgatcctatttatgcacagaaactaggtgttgatatcgatcagctattagtttctcagccagatacaggtgagcaagcgcttgaaatttgtgatgcattagcacgctctggtgctgttgatttaatcgttgttgactcagtagcagctctaacacctaaagctgaaatcgaaggtgaaatgggcgactcacacatgggtctgcaagcacgtatgctttcacaagcgatgcgtaagttaacgggtaaccttaagcagtcaaactgtatgtgtatcttcatcaaccagatccgtatgaagatcggtgtgatgtttggtaacccagaaactacgacaggtggtaatgcactgaagttctacgcttctgttcgtcttgatatccgccgtactggcgcaatcaaagaaggtgacgaagttgttggtaacgaaactcgtattaaagtagttaaaaataaaattgcagcaccgtttaagcaagctgaaactcaaattctttatggtcaaggtttcaaccgtaatggtgagctaattgatttaggcgttaagcataagctagtagaaaaagcgggtgcttggtatagttaccaaggtaataaaattggtcaaggtaaggcaaactcttgtaagtaccttgtagaaaatcctgcgattgccgctgaaattgagaaaaaattacgtgacttgctgctaacacctgtaactgagggggatcaagttgacgagaataaggctgatattaaagaagacgaagcattctaa

SEQ ID NO: 653 - protein, 349 aa, Photobacterium sp. SKA34
MDDNKQKALAAALGQIEKQFGKGSIMKLGDNRTMDIETISTGSLSLDIALGAGGLPMGRIVEIYGPESSGKTTLTLETIAAAQRKGKTCAFIDAEHALDPIYAQKLGVDIDQLLVSQPDTGEQALEICDALARSGAVDLIVVDSVAALTPKAEIEGEMGDSHMGLQARMLSQAMRKLTGNLKQSNCMCIFINQIRMKIGVMFGNPETTTGGNALKFYASVRLDIRRTGAIKEGDEVVGNETRIKVVKNKIAAPFKQAETQILYGQGFNRNGELIDLGVKHKLVEKAGAWYSYQGNKIGQGKANSCKYLVENPAIAAEIEKKLRDLLLTPVTEGDQVDENKADIKEDEAF

SEQ ID NO: 654 - DNA, 1041 bp, Oceanospirillum sp. MED92
  CDS (1)..(1041): transl_table=11
atggacgcgaatcgtaaaaaagcacttgatgcggcgttgagtcagattgaacgtcagtttggtaaaggcgcagtcatgcgtatgggtgatcagccacgtgaagcgattccatcagtttccacgggttctcttgggctggatattgctctgggtataggtggtcttccctatggtcgtatcgttgagatctatgggcctgaatcttctggtaaaaccacgctgacccttcaggttgttgctgaagcccagaaacagggtaagacatgtgcctttgttgatgcggagcatgctctagatccgatttatgctgaaaagcttggcgttgatgtggatagcttgctggtatcacagcctgatacgggtgagcaggcgctagaaattaccgatatgctggttcgttccaatgctgttgatgtgatcattgttgactcggtagcagcgctaacgccaaaagctgagattgaaggcgatatgggtgattcacacgtaggtctccaggctcgtttgatgtctcaggcgctacgtaagttaaccggtaatgttaaaagctctaactgtttgcttgtctttatcaaccagattcgtatgaaaatcggggttatgtttggcaaccctgaaacaacaacgggtggtaatgcactgaaattctactcttctgttcgtctggatattcgccgtacgggtgcaatcaaacaaggcgatgaagtggttggtaacgagacgcgagtaaaggttgttaagaataaggtgtcaccgccattcaggcaggctgagttccagatcatgtatggtcagggtatctatcacatgggcgaagtgatcgacctgggtgttaaagaaggacttgtggataagtcaggtgcttggtacgcctataatggcgataagattggtcagggtaaggccaatgcctctaaattcctggaagagaacccgcagatcgctaacgagatagaaacggaactacgcagtcgtttgctatctaacccactggataagcctgctgaagaagatgagtcagaaaacctggatctgatctaa

SEQ ID NO: 655 - protein, 346 aa, Oceanospirillum sp. MED92
MDANRKKALDAALSQIERQFGKGAVMRMGDQPREAIPSVSTGSLGLDIALGIGGLPYGRIVEIYGPESSGKTTLTLQVVAEAQKQGKTCAFVDAEHALDPIYAEKLGVDVDSLLVSQPDTGEQALEITDMLVRSNAVDVIIVDSVAALTPKAEIEGDMGDSHVGLQARLMSQALRKLTGNVKSSNCLLVFINQIRMKIGVMFGNPETTTGGNALKFYSSVRLDIRRTGAIKQGDEVVGNETRVKVVKNKVSPPFRQAEFQIMYGQGIYHMGEVIDLGVKEGLVDKSGAWYAYNGDKIGQGKANASKFLEENPQIANEIETELRSRLLSNPLDKPAEEDESENLDLI

SEQ ID NO: 656 - DNA, 1086 bp, Xanthobacter autotrophicus Py2
  CDS (1)..(1086): transl_table=11
atgactcagtcgacactcagactcgtcgaaggttcttccatggataagaccaaggcgctggatgccgctctctcccagatcgagcggcacttcggcaagggctcgatcatgcggctcggcaagggcggcaaagccttggaaatcgagagcgttcccaccggctcgctcgggctggacatcgccatcggcatcggcggcctgcccaagggccgcgtcgtggagatcttcgggccggaatcctccggcaagaccaccctggcgctgcacacggtcgcggaagcgcagaagcggggcggcacctgcgccttcatcgatgccgagcacgcgctcgaccccatctatgcgcgcaagctgggcgtcaatctcgacgacctgctcatctcccagcccgacgcgggcgagcaggcgctggaaatcgccgacacgctggtgcgctcgggcgccatcgacgtgctggtggtcgattcggtggccgcgctcaccccgcgcgccgaactggatggcgagatgggcgacagccagcccggcatgcaggcgcgcctcatgagccaggcgctgcgcaagctcacggcctccatctccaagtccaacaccatggtcatcttcatcaaccagatccggatgaagatcggcgtcatgtacggctcgccggagaccaccaccggcggcaatgcgctcaagttctacgcctcggtgcggctcgatatccgccgtatcggcatgatcaaggagcgcgacgaggtggtgggcaaccagacccgcgtgaaggtggtgaagaacaagctggcgccgcccttcaagcaggtggaattcgacatcatgtacggcgaggggatttccaagaccggcgaactgctggatctcggggtcaaggccggcgtggtggagaagtccggcgcctggttctcccacgacagccagcgcctcggccagggccgcgagaacgccaagaccttcctgaagcagaatcaggagattgccggccgcatcgaggcggcgatccgccagaatgcgggcctcatcgccgagaagatcctcgccggcacgccggaggatgacgccgacggcgacccggctgacgcctga

SEQ ID NO: 657 - protein, 361 aa, Xanthobacter autotrophicus Py2
MTQSTLRLVEGSSMDKTKALDAALSQIERHFGKGSIMRLGKGGKALEIESVPTGSLGLDIAIGIGGLPKGRVVEIFGPESSGKTTLALHTVAEAQKRGGTCAFIDAEHALDPIYARKLGVNLDDLLISQPDAGEQALEIADTLVRSGAIDVLVVDSVAALTPRAELDGEMGDSQPGMQARLMSQALRKLTASISKSNTMVIFINQIRMKIGVMYGSPETTTGGNALKFYASVRLDIRRIGMIKERDEVVGNQTRVKVVKNKLAPPFKQVEFDIMYGEGISKTGELLDLGVKAGVVEKSGAWFSHDSQRLGQGRENAKTFLKQNQEIAGRIEAAIRQNAGLIAEKILAGTPEDDADGDPADA

SEQ ID NO: 658 - DNA, 1023 bp, marine gamma proteobacterium HTCC2207
  CDS (1)..(1023): transl_table=11
atggacgcgaacaagtcaaaagcactagaagccgcactggggcaaatcgaacgccagtttggtaaaggaaccgtcatgcgcatgggtgagggtactcgccaagccattccggctatttctactggttctctgggactggatatcgcgcttggcattggcggcttgccaaaaggccgtattgttgaaatctatggtcccgagtcgtcgggtaaaaccactttgaccctgcaagtgattgccgaagcgcaaaaagcaggcggaacctgtgcctttatcgatgcggagcatgcactggatccggtttatgcagagaagttgggtgtcagtgttgacgacttgattgtttcgcagccggataccggcgagcaagcactggaagttaccgatatgttagtccgctctggtgcctgtgatgtactggtagtggattcggttgcggcattgaccccaagggcagaaattgaaggcgatatgggcgaccaccacgttggtctgcaagcccgactgatgtctcaggcgctgcgtaagttgaccggtaatattaaaaatgccaactgcctggttatctttatcaaccagattcgtatgaagattggtgtgatgtttggcaaccctgaaacaacgactggcggcaacgcgctgaagttttactcctcagtgcgtctggatatccgccgtattggtgcggttaaagatggcgacgagattgtcggcaatgaaactcgcgttaaggtggttaaaaataaagtggcgccgccgtttaagcagaccgaatttcagattctctatggccgcggcatcaaccgcaacggtgagctggttgatctaggtgttaaaaatggtttgatcgataaatccggtgcctggtatgcctataagggcagcaagattggtcaaggtaaagccaatgtaggtatttacctcactgaaaaccctgagattgcggctgagattgaagccatgatccgtgagaaagagatgggtggcccagcgcctgttgctaaagagtctgtcgagaagtaa

SEQ ID NO: 659 - protein, 340 aa, marine gamma proteobacterium HTCC2207
MDANKSKALEAALGQIERQFGKGTVMRMGEGTRQAIPAISTGSLGLDIALGIGGLPKGRIVEIYGPESSGKTTLTLQVIAEAQKAGGTCAFIDAEHALDPVYAEKLGVSVDDLIVSQPDTGEQALEVTDMLVRSGACDVLVVDSVAALTPRAEIEGDMGDHHVGLQARLMSQALRKLTGNIKNANCLVIFINQIRMKIGVMFGNPETTTGGNALKFYSSVRLDIRRIGAVKDGDEIVGNETRVKVVKNKVAPPFKQTEFQILYGRGINRNGELVDLGVKNGLIDKSGAWYAYKGSKIGQGKANVGIYLTENPEIAAEIEAMIREKEMGGPAPVAKESVEK

SEQ ID NO: 660 - DNA, 1083 bp, delta proteobacterium MLMS-1
  CDS (1)..(1083): transl_table=11
atggcagtagcgagcgcggacaaaggcaagaccctggacagcgccatcaatcagatccagaaacagttcggcaagggcgccatcatgcgcctgggggccgatgagcgggtggcggtgccggccatctccaccggcattttaagccttgatatcgcctgcgggatcggtggtattccctgcggccggatcaccgaaatttacggccccgaatcctcgggtaaaaccaccctggctttgcagatcatcgcctcatcccagcagcggggcggctcggtggccttcattgatgccgagcacgccctggatgtcacctacgccgagcggctgggggtcaacgccgacgagttgctggtcagtcagcccgattatggcgagcaggccctggagatcgccgaggtgctgatccgcagcgccgccgttgatgtcatcgtggtcgattcggtggcggccctgacccccaaggcggaaatcgacggtaacatcggcgactcccatgtcggcctccaggccaggctgatgtcccaggcgatgcgcaagctggccagcctgctgcaacggaccaataccgccatcatcttcatcaaccagttgcggatgaagatcggggtgatgttcggcaaccccgaaaccaccaccggcggcaacgccctgaagttttacagctccatgcggatcgatatccggcggatttccaccatcaaggatggcgatgaaatgatcggcaaccgggtcaaggctaagctggtcaagaacaaggtggcgccgcccttcaagattgccgagttcgatatcatcttcggggagggctcctcccgggagggggatctgctggatctggcggtgggtcagaacatcgtcgacaagagcggcgcctggtattcctacaacggtgagcggatcggccagggtcgggaaaattccaagacctatctgaaagagcatccggaaatggccgatgagatcgaaaccaaggtgcggctgggtttcggcctggccatgcccggccaggaagcggacaaggaacaggcggcggccaacgccgccaaggccgaaccgctggcgaaaaagggagacaaggcttaa

SEQ ID NO: 661 - protein, 360 aa, delta proteobacterium MLMS-1
MAVASADKGKTLDSAINQIQKQFGKGAIMRLGADERVAVPAISTGILSLDIACGIGGIPCGRITEIYGPESSGKTTLALQIIASSQQRGGSVAFIDAEHALDVTYAERLGVNADELLVSQPDYGEQALEIAEVLIRSAAVDVIVVDSVAALTPKAEIDGNIGDSHVGLQARLMSQAMRKLASLLQRTNTAIIFINQLRMKIGVMFGNPETTTGGNALKFYSSMRIDIRRISTIKDGDEMIGNRVKAKLVKNKVAPPFKIAEFDIIFGEGSSREGDLLDLAVGQNIVDKSGAWYSYNGERIGQGRENSKTYLKEHPEMADEIETKVRLGFGLAMPGQEADKEQAAANAAKAEPLAKKGDKA

SEQ ID NO: 662 - DNA, 1056 bp, Rickettsiella grylli
  CDS (1)..(1056): transl_table=11
atgagtgatgcaactaattcacgagaaaaagcccttaaaatggcattaagtcagattaaaaagcagcatggtgaaggtgctgttatgcgcttgggtgattcaagtcgggtttctgtcgatgtaatctccaccggatctttaggactcgatattgctttaggaataggagggctaccacgcgggcgtatcgttgaaatctatggtcctgaatcttcggggaaaacaacactgaccttacaaaccattgcggaatgccaaaaaatggggggggtcgccgcattcgttgatgctgaacatgcacttgatgcgaattatgccgaaaaattaggcgtaaaaaaagatgatcttcttgtttctcagccggataccggagaacaggcattagaaattgttgatatgttagttcgttctaatgcaattgacattattgtcgttgactcggttgccgcacttactccgcgggctgaaattgaaggagagatgggcgattcgcacatgggtttgcaagcgcgtttaatgtcacaagcgttacgtaaacttgcaggaaatattaaacgctccaatacgctcgttatttttattaatcaaattcgtatgaaaattggcgttatgtttggtaaccctgaaacaacaacaggtggaaatgcattaaaattttatgcgtcagtacgtcttgatatacgtcgtacgggttcaatcaaaaaaagtgacgaagtcatcgggaatgaaacacgagtcaaagtcgttaaaaataaagtggctccccccttcaaacaagctgaatttgaaattctttataatcaaggtatctgtcacagaggagaaatcgttgatctgggtgtcgcgcaagggttaattgataaagccggcgcatggtatagctatcaaggggaacggattggtcaaggtaaggacaatgtaaagcagtttttacgcgatcgcattgaactttgtcaacaaatagaaacagaaatccgaaaaaatttattgggtaactccactaaagagagtcgacgtgaaacgccagaattggaaactgaaatcattgaaccttaa

SEQ ID NO: 663 - protein, 351 aa, Rickettsiella grylli
MSDATNSREKALKMALSQIKKQHGEGAVMRLGDSSRVSVDVISTGSLGLDIALGIGGLPRGRIVEIYGPESSGKTTLTLQTIAECQKMGGVAAFVDAEHALDANYAEKLGVKKDDLLVSQPDTGEQALEIVDMLVRSNAIDIIVVDSVAALTPRAEIEGEMGDSHMGLQARLMSQALRKLAGNIKRSNTLVIFINQIRMKIGVMFGNPETTTGGNALKFYASVRLDIRRTGSIKKSDEVIGNETRVKVVKNKVAPPFKQAEFEILYNQGICHRGEIVDLGVAQGLIDKAGAWYSYQGERIGQGKDNVKQFLRDRIELCQQIETEIRKNLLGNSTKESRRETPELETEIIEP

SEQ ID NO: 664 - DNA, 1089 bp, Oceanobacter sp. RED65
  CDS (1)..(1089): transl_table=11
atggaccagaatcgccaaaaagccctagacgcggctcttagtcagattgaacgtcaattcggtaaaggcgccatcatgaaaatgggcgagcaaccccgtgaggcgattccttctgtatcaaccggttcactatcattggacattgctctaggtataggcggcttgccatttggtcgtatcgttgagatttatggtcctgagtcttctggtaaaaccaccatgtgtttgtccgccatggcagaagcgcaaaaggatggtaaaacggttgcgatcgttgatgcggagcatgccttagatccttcttatgcggaaaagctgggtgtggatcttgatagcctgttggtatctcaaccggatactggtgaacaagctctagagattgttgatagcctagtgcgctccaatgcggtggatctgattgttgttgactctgtggcagcgttaacaccaaaagcagaaattgaaggtgacatgggtgactcccacgtaggcttgcaggctcgtcttatgtcacaagcgttacgtaaactaacggcgaatgtaaaaaatgctaactgtatggtgatcttcattaaccagattcgtatgaagattggtgtgatgtttggtaaccctgaaaccacaaccggtggtaacgcacttaagttctactcttctgtccgcttggatattcgtcgcacaggtgctgttaagaacggtgacgaagtggtaggtaacgaaactcgcgttaaagtagtgaaaaacaaggttgctccaccgtttaaacaagcggaattccaaatcatgtataaccaaggtatcaaccgtcaggcggaaatcattgatttgggtgtgaagcttggtttagtggataagtctggtgcttggtacgcttacaagggcgataagattggtcagggtaaagccaatgcttgtgtctatcttcaggagaacccagaagttagtaaagaacttgaaaagcaaatccgtgatcaactgttagtggttgctaagccagcagaagaaaaagcggaagcggaagcacaagcggaagcgcctgctgcagaggcgaaacccgcaaaaaagactaaagcgaaagaagaagcatag

SEQ ID NO: 665 - protein, 362 aa, Oceanobacter sp. RED65
MDQNRQKALDAALSQIERQFGKGAIMKMGEQPREAIPSVSTGSLSLDIALGIGGLPFGRIVEIYGPESSGKTTMCLSAMAEAQKDGKTVAIVDAEHALDPSYAEKLGVDLDSLLVSQPDTGEQALEIVDSLVRSNAVDLIVVDSVAALTPKAEIEGDMGDSHVGLQARLMSQALRKLTANVKNANCMVIFINQIRMKIGVMFGNPETTTGGNALKFYSSVRLDIRRTGAVKNGDEVVGNETRVKVVKNKVAPPFKQAEFQIMYNQGINRQAEIIDLGVKLGLVDKSGAWYAYKGDKIGQGKANACVYLQENPEVSKELEKQIRDQLLVVAKPAEEKAEAEAQAEAPAAEAKPAKKTKAKEEA

SEQ ID NO: 666 - DNA, 1041 bp, Desulfitobacterium hafniense DCB-2
  CDS (1)..(1041): transl_table=11
atggccggtaacgataaattaaaagccctggatatggctttaagtcagattgaaaagcaatttggaaaagggtcgattatgagattgggggaggcttctgccaaaatggcggtggaagtgattccgacgggctgtctggccattgatatagcccttggggtgggtggagtgcccagggggcgtgttatagaaatctatggacctgagtcttccggtaagaccaccgttgcattgcatattgcggcagaagcccagaagctgggcggcgttgctgcttttatcgatgcggagcatgctcttgacccggtctatgccaaggccttaggggtcaacatcgacaatcttctggtatcccagccggatacaggggagcaggctctggagatttgcgaagctttagtgcgcagtggggctatcgacgtcattatcattgactctgtggcagctcttgttccccgggcagagattgaaggagaaatgggagattcccatgtgggtttacatgcccgcttaatgtctcaagccttgagaaaattgaccggtgccatcagtaagagcaatacctgcgttatctttatcaaccaaattcgggaaaaagtgggaattatgtttggtaatccagagaccacaaccggcggacgggctttgaagttctatgcctccgtccgtttggaagtacgccgtgcggataccctgaagcaaggtcaggatatgattggcaaccgtaccaaagtcaaggttgttaagaataaggtggctccgccctttaaacaagccgaatttgacattatgtacggagaaggtatttcccgtgaaggcagcatggtggatgtgggtgcggagttggatatcattaataagtccggggcttggtactcttataaaggtgagcgcttaggtcagggaagagagaatgtcaaggagtttctgaagaagaatcctgagattgccgccgaaatcgaacaagggatccgggccagcattgctaacgtaagcgctccggttgcagatgatgtccaagaggagccggaagacatctaa

SEQ ID NO: 667 - protein, 346 aa, Desulfitobacterium hafniense DCB-2
MAGNDKLKALDMALSQIEKQFGKGSIMRLGEASAKMAVEVIPTGCLAIDIALGVGGVPRGRVIEIYGPESSGKTTVALHIAAEAQKLGGVAAFIDAEHALDPVYAKALGVNIDNLLVSQPDTGEQALEICEALVRSGAIDVIIIDSVAALVPRAEIEGEMGDSHVGLHARLMSQALRKLTGAISKSNTCVIFINQIREKVGIMFGNPETTTGGRALKFYASVRLEVRRADTLKQGQDMIGNRTKVKVVKNKVAPPFKQAEFDIMYGEGISREGSMVDVGAELDIINKSGAWYSYKGERLGQGRENVKEFLKKNPEIAAEIEQGIRASIANVSAPVADDVQEEPEDI

SEQ ID NO: 668 - DNA, 1044 bp, Alteromonadales bacterium TW-7
  CDS (1)..(1044): transl_table=11
atgaacgataacaaacaaaaagcgttagacgctgcactatcacaaattgagcgtcaatttggtaaaggttcaatcatgaagctgggcgacaataaagccctgaacattgatgcagtatctacaggttcattagggatcgacattgctttaggcataggcggtttaccaatgggtcgtattgttgaagtatatggtcctgaatcttcaggtaaaacaacactgactttgcaagttatcgcacaagctcaaaaagaaggtaaaacatgtgcctttgttgatgctgagcatgctctagatcctgtatacgctcaaaagctaggtgttaacattgatgagctgttagtttctcaaccagatacgggtgagcaagcgttagaaatttgtgacatgttagtgcgttcaagtgctgtagatgttgtgattgtcgattcagttgcagccctaacacctaaagctgaaattgaaggcgacatgggcgactcgcacatgggcttacaagcacgtttaatgtcgcaagcattacgtaagcttacgggtaatattaaacgttcaaatacattatgtattttcattaaccaaattcgtatgaaaattggtgtaatgtttggtaacccagaaacaacaaccggtggtaacgcgcttaagttttacgcatcagttcgtattgatattcgtcgtattggttcggtgaaagaaggtgatgaagttgttggtaacgaaacgcgcgttaaaattgttaaaaacaaagtagcgcctccgtttaaacaagccgaatttatcatcatgtatggtgaaggtatttctaagcaaggcgagctaattgatttaggtgttaagcacaaaattgttgaaaaagcaggtgcttggtacagctacaatggtaacaaggtaggccaaggtaaaaacaattcaattaaattcttaaaagaaaacgtagaaattgcaaacgaaattgaaggcaaactacgcgatatgttattgcttaaagcaacaattgaaccagaagatggtgaagatgtacttggtgatgacgctgacctttaa

SEQ ID NO: 669 - protein, 347 aa, Alteromonadales bacterium TW-7
MNDNKQKALDAALSQIERQFGKGSIMKLGDNKALNIDAVSTGSLGIDIALGIGGLPMGRIVEVYGPESSGKTTLTLQVIAQAQKEGKTCAFVDAEHALDPVYAQKLGVNIDELLVSQPDTGEQALEICDMLVRSSAVDVVIVDSVAALTPKAEIEGDMGDSHMGLQARLMSQALRKLTGNIKRSNTLCIFINQIRMKIGVMFGNPETTTGGNALKFYASVRIDIRRIGSVKEGDEVVGNETRVKIVKNKVAPPFKQAEFIIMYGEGISKQGELIDLGVKHKIVEKAGAWYSYNGNKVGQGKNNSIKFLKENVEIANEIEGKLRDMLLLKATIEPEDGEDVLGDDADL

SEQ ID NO: 670 - DNA, 1059 bp, marine gamma proteobacterium HTCC2143
  CDS (1)..(1059): transl_table=11
atgattatggacactaacaaagaaaaagcgcttcaagccgcacttgcccagattgagcggcagtttggtaaaggttcgatcatgaaaatgggagaggaggcgagagaagctattcctgccatttctactggttcattgggcttggatgttgctctgggaataggtggtttaccgaaaggtcggatcgttgaaatttatgggccagagtcctctggtaaaacaacgctgacgttaagtgtgattgccgaagcgcaaaaagcaggagcaacctgtgctttcatcgacgcggaacatgcacttgatcctggttacgccgagaagttgggggtgaatattgatgatatgttggtgtctcaacctgatacgggtgaacaggcattggaaattaccgatatgttggttcgctccggatcggttgatgtcatcgttgttgactcggttgcagcattaacacccaaagcagaaattgagggtgacattggcgattctcacatgggcttggcagcacgaatgatgtctcaagcgatgagaaaaatgaccgggaacattaagaatgctaattgtttggtaatctttatcaatcagattcgtatgaaaattggcgtgatgtttggtagcccggagacaacaacgggaggtaacgcgctaaagttttacgcctcagttcgtttggatatccgtcgtaccggtgcggttaaagacggcgacgaaattgttggcaatgaaacacgggttaaggttgttaagaacaaagtagcaccaccctttaaacaggctgaattccagattttatacggtaaaggcatttaccgtatgggtgaagtaatagacctcggtgtaaagcaaggactggttgataaagcgggtgcctggtatgcctacaatggtaataaaattggtcagggtaaggcgaatgctgcgaagtttttgttagacaaccctgacattgcaagcgttatcgaaggcaaaattcggcaggagttgctaggaagcaagaagtctcctgatctgcaggttgttgaagcctcgcttgatggtgctgcagaagtcgccgagtaa

SEQ ID NO: 671 - protein, 352 aa, marine gamma proteobacterium HTCC2143
MIMDTNKEKALQAALAQIERQFGKGSIMKMGEEAREAIPAISTGSLGLDVALGIGGLPKGRIVEIYGPESSGKTTLTLSVIAEAQKAGATCAFIDAEHALDPGYAEKLGVNIDDMLVSQPDTGEQALEITDMLVRSGSVDVIVVDSVAALTPKAEIEGDIGDSHMGLAARMMSQAMRKMTGNIKNANCLVIFINQIRMKIGVMFGSPETTTGGNALKFYASVRLDIRRTGAVKDGDEIVGNETRVKVVKNKVAPPFKQAEFQILYGKGIYRMGEVIDLGVKQGLVDKAGAWYAYNGNKIGQGKANAAKFLLDNPDIASVIEGKIRQELLGSKKSPDLQVVEASLDGAAEVAE

SEQ ID NO: 672 - DNA, 1044 bp, marine gamma proteobacterium HTCC2080
  CDS (1)..(1044): transl_table=11
atggatcccaataaagcgaaggcacttgacgctgcaatgtctcagattgaacggcagtttggtaaaggcactgtcatgcgaatgggtgatcaggagcgcgtggcaatcccatctatttctaccggttccttggggctagatattgcccttggcattggtggcctacccaaagggcgcatctgcgaaatatacggcccggagtcgtcgggtaaaaccactatgacgctgcaggtaattgcggaagcgcagaaaaaagggggcacggcagcctttattgacgcagaacatgctcttgacccgcagtacgcagagcggttgggagttcaagtagacgatatgatcgtgtcgcagcccgacaccggtgagcaggctctcgaggttgccgagatgttggttcgatcgggcgcagtcgacgtcttggtgatcgactctgtggcagcattgacccccaaagccgaaatcgaaggtgaaatgggacaatctcatgtgggcttgcaggcccggctattgagtcaggcgatgcgaaaactgacgggtgccatcaagcaaacgaactgtctcgttattttcattaaccagattcgcatgaaaatcggcgttatgtttggaagccctgagacgaccaccggtggtaatgcgctgaagttctacgcctcagttcgtctcgatatccgtcgaactggagcggtcaaagacggcgacgaggttgtcggtaacgaaacacgagtcaaagtggttaaaaacaaagtatcaccgccctttaagcaggctgaatttcagattatgtatggcgagggcatctaccacatgggcgaggtaattgattggggcgttaagctcaatctggtggataagagcggcgcctggtatgcctataagggcgataaaattgggcaaggtaaagcgaatgcctctcggtttttagaagagcaccccgatatcgccaatgaaattgagagccagattcgtcatcaaacaatgggaatgcctttggctgtcgtagaagcggcgccaattgagagtggagaggcttctgccgagtaa

SEQ ID NO: 673 - protein, 347 aa, marine gamma proteobacterium HTCC2080
MDPNKAKALDAAMSQIERQFGKGTVMRMGDQERVAIPSISTGSLGLDIALGIGGLPKGRICEIYGPESSGKTTMTLQVIAEAQKKGGTAAFIDAEHALDPQYAERLGVQVDDMIVSQPDTGEQALEVAEMLVRSGAVDVLVIDSVAALTPKAEIEGEMGQSHVGLQARLLSQAMRKLTGAIKQTNCLVIFINQIRMKIGVMFGSPETTTGGNALKFYASVRLDIRRTGAVKDGDEVVGNETRVKVVKNKVSPPFKQAEFQIMYGEGIYHMGEVIDWGVKLNLVDKSGAWYAYKGDKIGQGKANASRFLEEHPDIANEIESQIRHQTMGMPLAVVEAAPIESGEASAE

SEQ ID NO: 674 - DNA, 1077 bp, Candidatus Desulfococcus oleovorans Hxd3
  CDS (1)..(1077): transl_table=11
atgagtaacgcagaaaagaccaaggcggttgaaagcgcgattacccagatcgagcggcagttcggcaagggcgccatcatgaagctgggcaccggaaccgtgatcaatgttccgtccatatccaccggctccattgccctggatgtggccctgggcgtgggcgggcttcccaggggccgggtgaccgagatatacgggcaggagtcgtcgggcaagaccaccattgcccttcataccgttgccgaggcccagaaaaagggtggcattgccgcctttatcgacgccgagcacgctctggacacggcctatgccaaaaagctgggggtcaacaccgatgaactgctggtctcccagcccgacaccggcgagcaggccctggagatcgcggacatgctggtgagaagcggcgccatcgacatcctggtaatcgactcggtggcggccctggtgcccaaggccgagatcgagggcgagatgggcgactcccacatgggactgcaggcccggcttatgtcccaggccctgcgaaagctcaccggcgtgatcggcaaaaccaatacatccattatttttatcaaccagatccgtgaaaagatcggcgtgtttttcggcaaccccgagaccacgcccggcggcaacgccctgaagttttacgcgtctgtgcggctggacattcgccgcagcgcggccatcaaggacggccaggaggtggtgggcaaccgggtgcgggtcaaggtggtcaagaacaagatcgcgccccccttcaagaccgtggagtttgacatgatgtatggcgaaggcatatcgaaaaccggtgaactgctggacatcggcgtggaaaacaacattattgaaaagagcggctcgtggtactcatataacggcgagcgcatcggccagggccgggagaatgtgaagcagttttttgccgacaagcccgaggtgtttaacgaactctatgccaaagtgcgcgagagcgttggccttgccggcgggcagcccgccgcggtggagaaaccggacaaggccgacaaggccgataaggcggcaaaggccactgaagcggataaagcatag

SEQ ID NO: 675 - protein, 358 aa, Candidatus Desulfococcus oleovorans Hxd3
MSNAEKTKAVESAITQIERQFGKGAIMKLGTGTVINVPSISTGSIALDVALGVGGLPRGRVTEIYGQESSGKTTIALHTVAEAQKKGGIAAFIDAEHALDTAYAKKLGVNTDELLVSQPDTGEQALEIADMLVRSGAIDILVIDSVAALVPKAEIEGEMGDSHMGLQARLMSQALRKLTGVIGKTNTSIIFINQIREKIGVFFGNPETTPGGNALKFYASVRLDIRRSAAIKDGQEVVGNRVRVKVVKNKIAPPFKTVEFDMMYGEGISKTGELLDIGVENNIIEKSGSWYSYNGERIGQGRENVKQFFADKPEVFNELYAKVRESVGLAGGQPAAVEKPDKADKADKAAKATEADKA

SEQ ID NO: 676 - DNA, 1068 bp, Pseudomonas putida GB-1
  CDS (1)..(1068): transl_table=11
atggacgacaacaagaagcgcgccttggctgcggccctgggtcagatcgaacgtcaattcggtaaaggcgcggtcatgcgcatgggtgaccaggagcgtcaaggcattccggccatctccaccggctcgctgggcctggacatcgcccttggcatcggcggcctgccaaaaggccgtatcgtcgagatctacggcccggaatcgtcgggcaagaccacgctgaccctatcggtcatcgccgaagctcagaaaaacggtgccacctgcgccttcgtcgacgccgaacacgccctcgaccctgagtacgccggcaagctgggcgtcaacgtcgacgacctgctggtttcgcagccggacactggcgaacaggccctggaaatcaccgacatgctggtgcgctccaacgccgttgacgtgatcatcgtcgactccgtggccgcgttggtgccgaaggccgagatcgaaggcgagatgggtgacatgcacgtcggcctgcaggctcgcctgatgtcccaggcgctgcgcaagatcactggtaacatcaagaacgctaactgcctggtcatcttcatcaaccagatccgtatgaagattggcgtgatgttcggcagcccggaaaccaccaccggtggtaacgccctgaagttctacgcctcggtgcgtctggatatccgtcgtaccggcgcggtcaaggaaggcgacgaagtggtcggtagcgaaacccgcgtcaagatcgtcaagaacaaggtatcgcctccgttccgtcaggccgagttccagattctttacggcaaaggtatctaccgtaacggcgagatcattgacctgggtgtgtctcagggcctggtcgagaaatccggtgcctggtacgcctaccagggcaacaagatcggtcaaggtaaagccaacgctgccaagtatctggcggaaaacccggctattggtgccgagatcgagaagcagatccgtgaaaagctgttgaaagccggtgctgccgctgaagccggcaaggctgccgccgttgatgccagtgccgacgatgtggctgacgccgaagccggttattga

SEQ ID NO: 677 - protein, 355 aa, Pseudomonas putida GB-1
MDDNKKRALAAALGQIERQFGKGAVMRMGDQERQGIPAISTGSLGLDIALGIGGLPKGRIVEIYGPESSGKTTLTLSVIAEAQKNGATCAFVDAEHALDPEYAGKLGVNVDDLLVSQPDTGEQALEITDMLVRSNAVDVIIVDSVAALVPKAEIEGEMGDMHVGLQARLMSQALRKITGNIKNANCLVIFINQIRMKIGVMFGSPETTTGGNALKFYASVRLDIRRTGAVKEGDEVVGSETRVKIVKNKVSPPFRQAEFQILYGKGIYRNGEIIDLGVSQGLVEKSGAWYAYQGNKIGQGKANAAKYLAENPAIGAEIEKQIREKLLKAGAAAEAGKAAAVDASADDVADAEAGY

SEQ ID NO: 678 - DNA, 1116 bp, Marinobacter sp. ELB17
  CDS (1)..(1116): transl_table=11
atggaagacaaccgcaagaaagctttatccgccgctctgacccagattgaacgccagtttggtaaaggcgccatcatgaagatgggcgaccacccccgtgaggcaatcccgtccgtttctaccggttctcttggtctggacgttgctcttggcattggtggcctgccttatggccgggtttgtgaaatctacggccctgaaagctctggtaaaactacgctgactttgcaggttattgccgaagcccagaagcagggcaaaacgtgtgcttttgttgatgctgagcacgcccttgatcctcaatatgctgaaaagctgggcgtgaacgttgatgagctgctggtttcccagcccgacaccggtgagcaggcgttagaaatctgcgacatgctggtgcgctccaacgcggtggatgtcatcatcgtggactccgttgccgcattgacgccaaaagctgaaattgaaggcgaaatgggcgactctcatgttggtcttcaggcccgcctgatgtcacaggctctgcgcaaactgaatggcaacgtcaagaatgccaacgtcctgctgattttcatcaaccagatccgcatgaaaataggcgtgatgtttggcagccccgaaaccactaccggcggcaacgcgttgaaattctatgcctctgtgcgtctggatatccgccgcattggcgcagtgaaagacggcgacgaagtcaccggtaacgaaacccgggtgaaagtggttaaaaacaaagtggcaccgccgttccgccaggccgaattccaaattttgtacggcaagggcatttaccgcatggccgaagtggtggacatgggtgtaaaggaaggctttgtagataaggctggcgcctggtacgcctacaacggtgacaaaattggccaaggcaaagccaacgcttgcaaattcctggaagaaaacccggaaatggcgaaagaaattgaagccaaagtgcgcgacaagctgatgcccaaaccagtgaaaaaagacgcggcaaaggatgcagggaaagatgcagggaaagacgcaggaaagaatgtagggaaaaatgcaggaaaagatgccgcagtggcgcctgcagaagccagcgacgaactactgtaa

SEQ ID NO: 679 - protein, 371 aa, Marinobacter sp. ELB17
MEDNRKKALSAALTQIERQFGKGAIMKMGDHPREAIPSVSTGSLGLDVALGIGGLPYGRVCEIYGPESSGKTTLTLQVIAEAQKQGKTCAFVDAEHALDPQYAEKLGVNVDELLVSQPDTGEQALEICDMLVRSNAVDVIIVDSVAALTPKAEIEGEMGDSHVGLQARLMSQALRKLNGNVKNANVLLIFINQIRMKIGVMFGSPETTTGGNALKFYASVRLDIRRIGAVKDGDEVTGNETRVKVVKNKVAPPFRQAEFQILYGKGIYRMAEVVDMGVKEGFVDKAGAWYAYNGDKIGQGKANACKFLEENPEMAKEIEAKVRDKLMPKPVKKDAAKDAGKDAGKDAGKNVGKNAGKDAAVAPAEASDELL

SEQ ID NO: 680 - DNA, 1293 bp, Oryza sativa subsp
  CDS (1)..(1293)
atggccagggccctcctcctccggcgcggccaccccttcctccgccgcctcctgcggcctcccccgcctcccacctcctctgtactggaatcctgcaatagaaatgtgtcaccaagagttcagttgtggagattctctgcagaagggaaagaccagacaaattcaagtgaagatggttacagtgaggcaaacattaagaagaaggactttgcgctacaacaagctttggaccaaattaagtctgcatttggtgaggagtcaattatgtggctaaatcactcttacggtcctaaagaagttcctgtcatatctactggatcctttgcattggacatggctttaggaattggtgggctcccgaagggaagggttgttgaaatttatggtccagaggcatcaggaaaaaccactttagcacttcatatcatagctgaagcacagaagaatggaggatattgtgcttttattgatgccgagcatgccctggatccaacattagcagaatctataggtgttaaggcagaacacctgttattatctcaaccagactgtggtgaacaggcccttggtcttgctgatatcttaatccgaagtggctctattgatgttgtggttgtggacagtgtagcagctcttgttccaaaaactgaactggatggtgagatgggagatgcccatgttgcacttcaagcaaggcttatgagtcaagcacttcgcaagttgagccattctctttctcgctccaggacaatgttggtgtttattaatcaggtaagatcgaaattaagcacatttagtggattcggagcaccagcagaagtaacctgtggagggaatgccttaaagttctatgcttctgtccgcttgaacaccaaaaggattggtcttataaaaaagtcagaagaggttgtaggcacacaaattcaggtcaagattgtcaagaacaagcatgcacccccatttaagactgtacaccttgagcttgagtttggtaagggcctgagtcgtgaattggagattattgaattaggcttcaaacacaagttcataacaaaatcaggagtattctatcacttgaacgggcaaaatttccatggaaaggatgctcttaaatgttatctcgctgaaaacaagaatgtcctggaatctctgatgtcaatgataaaggaaagcataatgcaacaggagtcccatccagatagaaacatggaggatgccaacccagatacgagcataacagaagagttcgtttcagcaacagatgaacaagtacctgaagaggttgaggcctga

SEQ ID NO: 681 - protein, 430 aa, Oryza sativa subsp
MARALLLRRGHPFLRRLLRPPPPPTSSVLESCNRNVSPRVQLWRFSAEGKDQTNSSEDGYSEANIKKKDFALQQALDQIKSAFGEESIMWLNHSYGPKEVPVISTGSFALDMALGIGGLPKGRVVEIYGPEASGKTTLALHIIAEAQKNGGYCAFIDAEHALDPTLAESIGVKAEHLLLSQPDCGEQALGLADILIRSGSIDVVVVDSVAALVPKTELDGEMGDAHVALQARLMSQALRKLSHSLSRSRTMLVFINQVRSKLSTFSGFGAPAEVTCGGNALKFYASVRLNTKRIGLIKKSEEVVGTQIQVKIVKNKHAPPFKTVHLELEFGKGLSRELEIIELGFKHKFITKSGVFYHLNGQNFHGKDALKCYLAENKNVLESLMSMIKESIMQQESHPDRNMEDANPDTSITEEFVSATDEQVPEEVEA

SEQ ID NO: 682 - DNA, 1780 bp, Physcomitrella patens
  CDS (174)..(1481)
gaagcccggctgcactgccttggggaggggggttgtgttgtcgcggaagccatcgtcgtcgtcgtcgtctcgccccccgatcgatcgttctgatttctcactcggaagccccgcgcttctgcactaatcgctcccgaaccaatcttcaaacttgcaagaggagggggacagacatggcgggagctctgcgagtacttagatctcgccacctctttcagcgcgtatgtgctgcttgtgcggatccttccacctcctatgctctggagactgttaccattcccacgccaggttacttccgcaacaactctggctctgctacagagccaaagagaggcaggcgggtgaagaaggcagcgagggtaatcgaccctgacaaccccaatttggaccatgaatactcgaaacagagtctaatacaagccgcaatcgaccagattgctaagaagcatgggaaggagacagttatgtggcttgggcgggagagtcgtgactttattgatgtcgttcctactggctctctaaacctcgacattgctctaggtgttggcggtctgccaaagggccgggtagtggagatctttggtcaagaagcctctgggaagacgacgattgctcttcacgtgattgcacaggcccaaaaaatgggaaaaggacattgcctatttgtggatgcagagcatgcattagatatgcaatttgctgaaggcatcggtgtgaacacgaaagatcttttgtttgttcagccagattatgctgagcaggccctggatactgtcgatcacttcgttcgctctactggtgtcgatgttattgttgttgacagcgttgctgcacttgtaccgaaagctgaacttgaaggagacatgggtgattctcagatggctttgcaggctcgcctgatgagcaaagcgctccgcagacttactcactctcttaactcctccaattgtctgcttatcttcatcaatcagacacgagcaaagctcaatacgtatggaggtggtggaccaacagctgaggtgacagctggaggaaatgctcttaagttctatgcatccgtgcgcttacaagtcaggaaaaaagaacaactaagacgtggagatgtgccctttggaagttcggttattgtaaaagtggtgaagaacaaagtatcaccaccatttaggactgcggaattcgatattgaatatgggaaaggtatatctcgtgatggtgaagtcctcgatctaggtgtgaagcatggcttgctagggcaatcaggttcatggtattcgtacgagggtaagaacttcgcaaatggaagagaaggtgcgaagaagtacctgcaagaacacacagatctgactgatgctttggtggtagcaatcaaggagaagattttaggccaaccacgtgctagtggggatttggacgacgatgggttcattcaagaggaggacgcttttgaagccgatgctgataatctagaggtgacagggtaggagacagcatagtgtcgttaagtaattcaattttcacaacttcgaactcaacctgttcaacaaaagcatgggtgactaagcagcaggtattagggagttattgcgtatcttatgatattccttttgcttaggatggttgtgcgacctttcctgcctgacgagcgccatcagcaaaaagctcgtccattttggtgttagcttgccacgtgattcagcaccaatggcatgttgtagaacctttcgagccgcgttttgaagggagatctatgtgcttaagagaattaggcgaggattcctcc

SEQ ID NO: 683 - protein, 435 aa, Physcomitrella patens
MAGALRVLRSRHLFQRVCAACADPSTSYALETVTIPTPGYFRNNSGSATEPKRGRRVKKAARVIDPDNPNLDHEYSKQSLIQAAIDQIAKKHGKETVMWLGRESRDFIDVVPTGSLNLDIALGVGGLPKGRVVEIFGQEASGKTTIALHVIAQAQKMGKGHCLFVDAEHALDMQFAEGIGVNTKDLLFVQPDYAEQALDTVDHFVRSTGVDVIVVDSVAALVPKAELEGDMGDSQMALQARLMSKALRRLTHSLNSSNCLLIFINQTRAKLNTYGGGGPTAEVTAGGNALKFYASVRLQVRKKEQLRRGDVPFGSSVIVKVVKNKVSPPFRTAEFDIEYGKGISRDGEVLDLGVKHGLLGQSGSWYSYEGKNFANGREGAKKYLQEHTDLTDALVVAIKEKILGQPRASGDLDDDGFIQEEDAFEADADNLEVTG

SEQ ID NO: 684 - DNA, 1569 bp, Physcomitrella patens
  CDS (162)..(1544)
gtgtttctgacctcgctgctatgtgtcgaagcagtgcttgtagttgatgtcgcctgctgtaatttagattaaatttgcaggatcagcgtttgctgtggaatctcggacacggtaggcgggtagaagaccttgagagtgagagaattgtatctgcaattggcatggcagcaatagctgtgcagtcgaattgctgctccttcagctccgactgctgctctcagcgatgggatccattcaaaggcaatgggagggtacagcgtggactcttagctggtcccatcaacctgcgcatgccaagcccgtctcagctagtccaacaaggatcatgttccatcagctgcaaggctggcggaacttcaaagcagtctggctctgctcttcgagcaaaagccaagaaaggatcctctgatattaatcctgatgactacctatctgatgaccagttgcaatatgtcgaccggcaaaaggcattagaagccgcgatgagcgacatcaatggctcatttggcaaaggaagtgtgaccaggcttggtagtgctggcggagcgcttgtagagaccttccccagtggttgcctcactttggaccttgcattaggtggtggttttcccaaaggacgtattgtggagatatttggtcccgaaagtagtgggaaaaccacgttagcgcttcatgccatagctgagatacagaagaaaggtgggaacgcaatgttggtggatgctgagcactgttttgatccgtattattcgaaggctctcggtgttgacgtggaaagcttgattgtttgtcaacccgacaatggtgaaatggctttagaaactgctgacaggatgtgcagatctggtgctgtggacataatcgtcattgactctgtatctgcacttaccccccgagctgagattgagggagagattgggatgcaacaaatgggactacaggcccggttaatgagtcaagctcttcgtaagatgtctgccaatgctgcacgcgctaactgcacgattattttcttgaatcagattcgatacaagatagctgttatgtacggaaatcctgaagttacaagtggtggtcttgctctcaagttttttgcttctttgcgccttgacattcgcaacacgggcaagattaagtcgccaagaggtgaggatgatattggcataagggctcgagttcgagtacagaagagcaaggtttcaagaccttacaaacaagcagaattcgatataatatttggcgaaggcatttgcaaattggggagcttactggactcagcagagacagtcggtgttgttgtgaggaaaggtgcttggtacagttatggagaaaccaggttaggtcaagggcgagataaagttgttcaattcctccgagactacccggaagtgtgtgcagacattgagaaggtcgttcgagaaagaattgcagaaatcatgacaacaaagcgagattataacggtcccaatgggagtgctgtggttcatgctggaatggacatcgaggaaatgatgggcgaagacaatttgggagagcttgactgaatggttgctgtggttgtaggatttc

SEQ ID NO: 685 - protein, 460 aa, Physcomitrella patens
MAAIAVQSNCCSFSSDCCSQRWDPFKGNGRVQRGLLAGPINLRMPSPSQLVQQGSCSISCKAGGTSKQSGSALRAKAKKGSSDINPDDYLSDDQLQYVDRQKALEAAMSDINGSFGKGSVTRLGSAGGALVETFPSGCLTLDLALGGGFPKGRIVEIFGPESSGKTTLALHAIAEIQKKGGNAMLVDAEHCFDPYYSKALGVDVESLIVCQPDNGEMALETADRMCRSGAVDIIVIDSVSALTPRAEIEGEIGMQQMGLQARLMSQALRKMSANAARANCTIIFLNQIRYKIAVMYGNPEVTSGGLALKFFASLRLDIRNTGKIKSPRGEDDIGIRARVRVQKSKVSRPYKQAEFDIIFGEGICKLGSLLDSAETVGVVVRKGAWYSYGETRLGQGRDKVVQFLRDYPEVCADIEKVVRERIAEIMTTKRDYNGPNGSAVVHAGMDIEEMMGEDNLGELD

SEQ ID NO: 686 - DNA, 1098 bp, Medicago truncatula
  CDS (1)..(1098)
atgtctaagaaagatttggccctacaacaagccatggatcagatcacctctacatttggaaagggatcgatcatgtggcttggtcgtactgtctcacccaaaaatgtacctgtggtgtcaaccggttcttttgctcttgatatagcgctaggaattttcggtcttcccaagggacgtgttgtggaaatattcggtccagaggcttctgggaaaacaactcttgctttgcatgttattgcagaggcgcagaagcaaggaggctattgtgcctttattgatgctgagcatgcacttgacaagtcacttgcagaatctattggcgtaaatactgagaacttgcttctctcacaaccagattgtggtgaacaggcacttagcctcgtggataccttaattcggagtggttcgattgatgtcattgttgtcgacagcgtggctgctcttgttcctaaaggtgagcttgatggtgagatgggtgatgctcacatggcaatgcaagctaggttgatgagccaggctcttcggaaattgtgccactccttgtcactttcacagtgtatattgatttttataaaccaggtaaggtcgaagatttctacttttggcggattcggtgggcctactgaagttacttgtggtggtaatgctttgaaattctattcttctgtgaggctaaatatcaaaagagtagggtttgtcaagaagggtgaagagactgtaggaagtcaggttcttgtcaaggttgtgaagaacaagcacgcccctccatttaaaactgcacaatttgagcttgagtttggcaagggcatatgcagagaagcagagattatagagctgagcataaaacacaaattcataaaaaagagtggttcgttttacgaatataatggcaagaattaccatggcaaggatgcactaaaaagtcacctgatcaacggcgatggcttacaagatttaactacaaagcttcgagaaaagcttctcaatgctgagacggaaaccgtttcagaatcacaagagatggttggagatgttacggaagaaatgttatcacccgattctactgatgaagaaactgctgttgttgcagaagcttga

SEQ ID NO: 687 - protein, 365 aa, Medicago truncatula
MSKKDLALQQAMDQITSTFGKGSIMWLGRTVSPKNVPVVSTGSFALDIALGIFGLPKGRVVEIFGPEASGKTTLALHVIAEAQKQGGYCAFIDAEHALDKSLAESIGVNTENLLLSQPDCGEQALSLVDTLIRSGSIDVIVVDSVAALVPKGELDGEMGDAHMAMQARLMSQALRKLCHSLSLSQCILIFINQVRSKISTFGGFGGPTEVTCGGNALKFYSSVRLNIKRVGFVKKGEETVGSQVLVKVVKNKHAPPFKTAQFELEFGKGICREAEIIELSIKHKFIKKSGSFYEYNGKNYHGKDALKSHLINGDGLQDLTTKLREKLLNAETETVSESQEMVGDVTEEMLSPDSTDEETAVVAEA

SEQ ID NO: 688 - DNA, 1077 bp, Magnetospirillum gryphiswaldense
  CDS (1)..(1077): transl_table=11
atgtctcaggctgcgttgcgtctcgtggataaggacaccatggatcgtcagaaggcactggaagccgccgtcagccagattgagcgggcgttcggcaagggctccatcatgaagatggggcaaaaggaaacggtcgagaccgaggtggtttccaccggctcgctgggtttggacatcgctttgggcatcggcggcttgccgcgcggtcgcatcatcgagatttacggaccggaaagctcgggcaagaccaccttggccctgcacgttctggccgaggcgcagaaaaagggcggcacctgcgccttcatcgatgccgaacatgcccttgacccgtcctatgcccgcaagctgggggtcaacctggatgatctgctgatcagccagcccgacgccggcgaacaggccttggaaatctgcgataccctggtgcgatccggcgccgtcgacgtgctggtggtcgattcggtcgccgccttggtgccgcgtgccgaacttgaaggcgagatgggcgattcccacgtcggtctgcacgcccgcctgatgagccaggccttgcgcaagctgaccggttcggtgtccaaatccaagaccatcgtcatcttcatcaaccagatccgcatgaagatcggcgtcatgttcggcaacccggaaaccaccactggcggcaacgcgctgaagttctatgcctcggtgcgcatggaaatccgccgtgtcggcgccatcaaggaccgcgacgaggtggtgggcaaccagacccgcgtcaaggtggtcaagaacaagctggcgccgccctttaaggtggttgatttcgacatcatgtatggcgagggcatttccaagaccggcgaattgatcgatctgggcgtcaaggccaacgtggtggaaaagtcgggcgcctggttctcgtacaactcgacccgtgtcggtcagggccgcgagaacgccaagcaattcctgcgtgacaacccggccatggctggcgagatcgaagccaccatccgcgccaatgccggtctggtggccgaagccctggccgccggccccggtgacctggacggcaacgccgccgaggattga

SEQ ID NO: 689 - protein, 358 aa, Magnetospirillum gryphiswaldense
MSQAALRLVDKDTMDRQKALEAAVSQIERAFGKGSIMKMGQKETVETEVVSTGSLGLDIALGIGGLPRGRIIEIYGPESSGKTTLALHVLAEAQKKGGTCAFIDAEHALDPSYARKLGVNLDDLLISQPDAGEQALEICDTLVRSGAVDVLVVDSVAALVPRAELEGEMGDSHVGLHARLMSQALRKLTGSVSKSKTIVIFINQIRMKIGVMFGNPETTTGGNALKFYASVRMEIRRVGAIKDRDEVVGNQTRVKVVKNKLAPPFKVVDFDIMYGEGISKTGELIDLGVKANVVEKSGAWFSYNSTRVGQGRENAKQFLRDNPAMAGEIEATIRANAGLVAEALAAGPGDLDGNAAED

SEQ ID NO: 690 - DNA, 1191 bp, Ostreococcus tauri
  CDS (1)..(1191)
atggtcgcgcgaacgctcacgacgacgcgcggtggggtcgtcatggccaaggcgcgagcgagcaaggcgagcaacgcggatgacgcgaaatctggctcgccagacgcgaagaagaaggcgctgcaacgcgtgctggatgagattgatagtaatttcggcgcgggcgcgatcatgcgcctgggcgaggctggcaaggcgaaagtggcgacgtttccgtccggggcgctgacgctggacatggcgctcggtggtggactcccgagaggacgtatcgttgaggtgtatggaccagagagctcggggaagaccacgctggcgctgcacgcgatggcggagatgcaggcgatcggcggtacggtggcaatcatcgacgcggagcacgcgttcgatccggagtactcggcgagactggggttgaacctggatgatgtcatcgtgtgtcagccagaaacgggcgagatggcgctcgaggtcgtggacacgctcgtgcgatcgtcggctgttgatttgatcgtcgtggactctgtcgccgcgctcgtgccgcgaagcgaaatcgaaggcgagatcggcatggtccaggtcggtgcgcacgcacgattgatgtctcaggcgctgagaaagattaacgtcaacgccgccaaggctggaacgacgatcatcttcttgaaccagctccgctcaaaggttggggtgatttacggaagcccggaggtgacgacgggcggcaatgcgctcaagtactacgcgagcgttcgtctcgacattcgacgcaaggaggtcatcaagggtaagagcggcgaggacgacctcggcgtgagatgcaaggtcaaggtggcgaagaacaaggtggcaccgccgtacaaggtggctgagtttgacatgcttttcggccgcggaatctccaaggacggctgcctcctggacgccggcgagcaagtcggtgtcgtcgaccgcaagggtgcttattactactacaacggtgaaaagctcggccaaggccgcgagaagacgctcgcgttcttggacgaaaacctcccggtgaagggcaccatcgaagcggatgttcgccgaaaggtggctgagaagatggccggtctctcgaacaagcccgtcgccgaggaagaggaagagattcccgatgacgccttcttcggcgatgacgaagagatcgtcgctgccgaggcgcgataa

SEQ ID NO: 691 - protein, 396 aa, Ostreococcus tauri
MVARTLTTTRGGVVMAKARASKASNADDAKSGSPDAKKKALQRVLDEIDSNFGAGAIMRLGEAGKAKVATFPSGALTLDMALGGGLPRGRIVEVYGPESSGKTTLALHAMAEMQAIGGTVAIIDAEHAFDPEYSARLGLNLDDVIVCQPETGEMALEVVDTLVRSSAVDLIVVDSVAALVPRSEIEGEIGMVQVGAHARLMSQALRKINVNAAKAGTTIIFLNQLRSKVGVIYGSPEVTTGGNALKYYASVRLDIRRKEVIKGKSGEDDLGVRCKVKVAKNKVAPPYKVAEFDMLFGRGISKDGCLLDAGEQVGVVDRKGAYYYYNGEKLGQGREKTLAFLDENLPVKGTIEADVRRKVAEKMAGLSNKPVAEEEEEIPDDAFFGDDEEIVAAEAR

SEQ ID NO: 692 - DNA, 1074 bp, Anaplasma centrale
  CDS (1)..(1074): transl_table=11
atgtcaggcagtaagaaagatgttgaatctgacaagcaaaaggcgttggatgccgctataagtcagatagaaagagcgttcgggcgcggcgccatcatgaagttgaaacagcaccctgcagagaaaatggatagtgtatctactggctcaatagctctggatgcagcgctgggtattggaggcctaccaaagggtaggatagtggaaatcttcggtccagaaagctcaggaaaaaccacacttgcacttcatgttattgctgaagcacagaaacaaggaggtaactgtgccttcatcgatgcagaacacgcattggacactgtgtatgccaggaagttgggtgtgagcgtgggtgatttgatagtctcgcagcccgacactggtgagcaggctttgcacattgttgagtacctggtgtgttctggtgctatagatgtgatagtggtggattctgttgcggcgcttacccctagggctgaaatagagggtgatatgggtgatcagcacatggggttgcaggctaggttgcttagccacgcgcttcgtaagctgacttctgtggtatccaaggctaactgcatactggtgttcataaaccagatacgcataaagataggtgtgatgtacggcaacccggaagtaacaacgggcggcagtgcgctcaagttctacacatcgatacggcttgacattcgcaaggtgagtgcaattaaagacaaagacagcgttataggaaatcagacgagagtgaaagtagtcaaaaacaaggttgcgcccccgttcaagcaggcagagtttgacatcgtatacaatgaaggcatatcaaagttgggtgaaatagttgatatgggtgtcaagttcggttttgtcgagaagtctggtgcctactactcctatggcgcagttaagttggggcaagggagggagaatgccaaggcttacctgaagagcagcccagatgttgcgaatgagttggaacaaaaaatcagagcgtaccttgcggagagtatgcacaacaacgatctgtttgctgcagacgggcgtaccgatgtgctggaggaggaggttttctag

SEQ ID NO: 693 - protein, 357 aa, Anaplasma centrale
MSGSKKDVESDKQKALDAAISQIERAFGRGAIMKLKQHPAEKMDSVSTGSIALDAALGIGGLPKGRIVEIFGPESSGKTTLALHVIAEAQKQGGNCAFIDAEHALDTVYARKLGVSVGDLIVSQPDTGEQALHIVEYLVCSGAIDVIVVDSVAALTPRAEIEGDMGDQHMGLQARLLSHALRKLTSVVSKANCILVFINQIRIKIGVMYGNPEVTTGGSALKFYTSIRLDIRKVSAIKDKDSVIGNQTRVKVVKNKVAPPFKQAEFDIVYNEGISKLGEIVDMGVKFGFVEKSGAYYSYGAVKLGQGRENAKAYLKSSPDVANELEQKIRAYLAESMHNNDLFAADGRTDVLEEEVF

SEQ ID NO: 694 - DNA, 1131 bp, Streptomyces argillaceus
  CDS (1)..(1131): transl_table=11
atggcaggcaccgaccgcgagaaggccctggacgccgcactcgcacagattgaacggcaattcggcaagggcgcggtcatgcgcatgggcgaccgctcgaaggagcccatcgaggtcatcccgaccgggtcgaccgcgctcgacgtggccctcggcgtcggcggtctgccgcgcggccgtgtcatcgaggtctacggacccgagtcctccggcaagacgaccctgaccctgcacgcggtggcgaacgcccagagggccggcggccaggtggcgttcgtggacgccgagcacgccctcgaccccgagtacgcgcagaagctcggcgtggacatcgacaacctgatcctgtcccagccggacaacggcgagcaggccctggagatcgtggacatgctcgtccgctccggggccctcgacctgatcgtcatcgactccgtcgccgcgctcgtcccgcgtgcggagatcgagggcgagatgggcgacagccacgtgggtctgcaggcccgtctgatgagccaggccctgcggaagatcaccagcgcgctcaaccagtccaagaccaccgcgatcttcatcaaccagctccgcgagaagatcggtgtgatgttcggctccccggagaccacgaccggtggccgggcgctgaagttctacgcctccgtgcggctcgacatccggcgcatcgagacgctgaaggacggcaccgacgcggtcggcaaccgcacccgcgtcaaggtcgtcaagaacaaggtcgcgccgcccttcaagcaggccgagttcgacatcctctacgggcagggcatcagccgtgagggcggcctgatcgacatgggcgtggagcacggcttcgtccgcaaggccggcgcctggtacacgtacgagggcgaccagctcggccagggcaaggagaacgcccgcaacttcctcaaggacaaccccgacctcgccaacgagatcgagaggaagatcaaggagaagctgggggtgggcgtacgccccgagcagcccgccgaggccccgagtgcggatgacgcggccgccccgggcgcaccggcggctgacgcggccaaggcggttcccgcttccgcagccaaggccaccaagaccaaggccgcggctgccaagagctga

SEQ ID NO: 695 - protein, 376 aa, Streptomyces argillaceus
MAGTDREKALDAALAQIERQFGKGAVMRMGDRSKEPIEVIPTGSTALDVALGVGGLPRGRVIEVYGPESSGKTTLTLHAVANAQRAGGQVAFVDAEHALDPEYAQKLGVDIDNLILSQPDNGEQALEIVDMLVRSGALDLIVIDSVAALVPRAEIEGEMGDSHVGLQARLMSQALRKITSALNQSKTTAIFINQLREKIGVMFGSPETTTGGRALKFYASVRLDIRRIETLKDGTDAVGNRTRVKVVKNKVAPPFKQAEFDILYGQGISREGGLIDMGVEHGFVRKAGAWYTYEGDQLGQGKENARNFLKDNPDLANEIERKIKEKLGVGVRPEQPAEAPSADDAAAPGAPAADAAKAVPASAAKATKTKAAAAKS

SEQ ID NO: 696 - DNA, 1050 bp, Moraxella catarrhalis
  CDS (1)..(1050): transl_table=11
atggacgaaaataaagaaaaagcactcaaagccgccttggctcaaattgaaaaacagtttggtaaaaataccatcatgcatttgggtgatgaaacagccaagcttgatgtggatgtggtctcaacaggttcgcttgggcttgatattgcattgggtatcggtggcttgccaaaaggtcgaattattgagatttttgggcctgaaagctctggtaaaaccacactgaccttacaaaccattgccgagtgccaaaagcaaggcggtacttgtgcctttattgatgctgaacatgcacttgatccgatttatgccaaaaagcttggcgtcaatattgatgatttgcttgtctcgcagcctgacaatggcgaacaggcacttgagattgccgatatgctcgtacgctcaggtgccattgatctgattgtcgtagactcggtggctgctttgactccaaaagctgaaattgaaggtgaaatgggcgacagccacatgggtctgcaagcacgcttgatgagccaagcactgcgtaaaattactggcaacgccaagcgttcaaattgtatggtgatttttattaaccaaatccgtatgaaaattggcgtcatgtttggcagtccagaaacgaccacaggtggtaatgccctaaaattctatgcctctgtgcgtcttgatattcgacgcattggctctgtcaaagatggcgatgagattattggttcagaaacacgcgtcaaagtcatcaaaaataagatggcaccgccatttcgccaaaccgaatttcaaattatgtacggtgagggcattaaccgcctaggcgaggtgatcgatttgggtgttgatattggtgctgttggtaagtcaggtgcttggtacagttatggtgatggtaaaattggtcaaggtaaagccaatacggtcaaatatctgcaagaaaatcctgccattgccagcgaaatcgaagccaaagttcgtgagattaaattagccacagtcacacccatcgtagaatcagatgagcctgaagagcatttagaagatgataatttctaa

SEQ ID NO: 697 - protein, 349 aa, Moraxella catarrhalis
MDENKEKALKAALAQIEKQFGKNTIMHLGDETAKLDVDVVSTGSLGLDIALGIGGLPKGRIIEIFGPESSGKTTLTLQTIAECQKQGGTCAFIDAEHALDPIYAKKLGVNIDDLLVSQPDNGEQALEIADMLVRSGAIDLIVVDSVAALTPKAEIEGEMGDSHMGLQARLMSQALRKITGNAKRSNCMVIFINQIRMKIGVMFGSPETTTGGNALKFYASVRLDIRRIGSVKDGDEIIGSETRVKVIKNKMAPPFRQTEFQIMYGEGINRLGEVIDLGVDIGAVGKSGAWYSYGDGKIGQGKANTVKYLQENPAIASEIEAKVREIKLATVTPIVESDEPEEHLEDDNF

SEQ ID NO: 698 - DNA, 1047 bp, Propionibacterium acnes
  CDS (1)..(1047): transl_table=11
atggcagcgaccgctgaccgcgaaaaggcccttgccacggccttgcagcagatcgagaagcagcacggcaaaggctctatcatgcgccttggcgagcaggagaccgttaagatcgccgctatccccacgggctcggtggccctcgacgtcgcgttgggtgtcggaggcctcccacgtggcaggatcgtggagatctatggtcccgaatcctctggcaagacgacggtggctttgcacgcaatcgctaatgcccaggctgaaggcggcatctgtgcctttattgacgccgagcacgctctcgacccggaatacgcacgcaaactcggggtcgatacagattccctgctggtgagccagcctgacaatggtgagcaggctctcgagattgctgacaccctcgtccgctcgggtgccttggagctcgtcgttgttgactcggtggccgctctgaccccgaaggctgagatcgagggcgagatgggtgattcccatgttggtttgcaggcccgccttatgagccaggccctgcgcaagatgaccggtgcgttaaatgcggccggtaccactgccatcttcattaatcagctgcgcgagaagatcggtgtcatgtttggctccccggagacaacgacaggtggtcgcgccctcaagttctactcgtccgtgcgcctcgacgtgcggcgtgtcgaaactcttaaagacggatcagagatggtcggtaaccgcactcgtgtcaaggttgccaagaacaaggtcgccccaccttttaagcaggcagagtttgacatcctctacggacagggcatttctcgcgagggaagcctcatcgacatgggcgtagattgcggcatcatcaccaaatccggttcgtggttcagctacaacaatgagcagttgggtcagggtaaggagaacgtccgaaagttcctcaaaggtaacccggatgttgccaatgagattgaggacaagatcctgactcacctcggcctgcgcgaagccgaggttcctgagggtgtcgatccccgaactggcgaggtggaattctga

SEQ ID NO: 699 - protein, 348 aa, Propionibacterium acnes
MAATADREKALATALQQIEKQHGKGSIMRLGEQETVKIAAIPTGSVALDVALGVGGLPRGRIVEIYGPESSGKTTVALHAIANAQAEGGICAFIDAEHALDPEYARKLGVDTDSLLVSQPDNGEQALEIADTLVRSGALELVVVDSVAALTPKAEIEGEMGDSHVGLQARLMSQALRKMTGALNAAGTTAIFINQLREKIGVMFGSPETTTGGRALKFYSSVRLDVRRVETLKDGSEMVGNRTRVKVAKNKVAPPFKQAEFDILYGQGISREGSLIDMGVDCGIITKSGSWFSYNNEQLGQGKENVRKFLKGNPDVANEIEDKILTHLGLREAEVPEGVDPRTGEVEF

SEQ ID NO: 700 - DNA, 1050 bp, Mycobacterium wolinskyi
  CDS (1)..(1050): transl_table=11
atggcgccccaggcccccgatcgcgaaaaagccctcgagctggcgatggcccagatcgacaagaacttcggcaaaggttcggtgatgcgcctcggtgacgaggtgcgccagccgatctcggtcatcccgaccggttcgatcgcgttggatgtggcactcggtatcggcggtctgccgaggggccgtgtcgtcgagatctacggcccggagtcctcgggtaagacgacggtcgcgctgcatgcggtggccaacgcgcaagccgcaggcggcatcgcggcgttcatcgacgccgagcacgcgctcgatccggagtacgccaagaagctcggcgtggacaccgactcgctgttggtctctcagcccgacaccggtgagcaggcgctggagatcgccgacatgctggtgcgctcgggtgcgctggacatcctggtgatcgactcggtcgccgccctggtgccccgcgccgagatcgaaggcgagatgggcgacagtcacgtcggtctgcaggcccgcctgatgagccaggcgctgcggaagatgaccggtgcgctcaacaactccggcaccaccgcgatcttcatcaaccagctccgcgagaagatcggcgtgatgttcggctcgcccgagaccacaacgggcggtaaggcgctgaagttctacgcctcggtccggatggacgtccgccgcatcgagacactcaaggacggcaccgacgccgtgggtaaccgcacccgcgtcaagatcgtcaagaacaaggtgtcgccgccgttcaagcaggccgagttcgacatcctctacggccagggcatcagccgcgaaggctcgctcatcgacatgggtgtcgagcacggcttcatccgcaagtcgggctcgtggttcacctatgagggtgagcagctgggccagggcaaggagaacgcccgcaagttcttgctggagaacgtcgatgccgccaacgagatcgagaagaggatcaaagagaagctcggcatcggtgccgacgtgaccgccgcggctgatgaagcactcccggccccagttgacttctga

SEQ ID NO: 701 - protein, 349 aa, Mycobacterium wolinskyi
MAPQAPDREKALELAMAQIDKNFGKGSVMRLGDEVRQPISVIPTGSIALDVALGIGGLPRGRVVEIYGPESSGKTTVALHAVANAQAAGGIAAFIDAEHALDPEYAKKLGVDTDSLLVSQPDTGEQALEIADMLVRSGALDILVIDSVAALVPRAEIEGEMGDSHVGLQARLMSQALRKMTGALNNSGTTAIFINQLREKIGVMFGSPETTTGGKALKFYASVRMDVRRIETLKDGTDAVGNRTRVKIVKNKVSPPFKQAEFDILYGQGISREGSLIDMGVEHGFIRKSGSWFTYEGEQLGQGKENARKFLLENVDAANEIEKRIKEKLGIGADVTAAADEALPAPVDF

SEQ ID NO: 702 - DNA, 1056 bp, Mycobacterium porcinum
  CDS (1)..(1056): transl_table=11
atggcgcagcaagcccctgatcgcgaaaaagcgctcgaactggcgatggcccagatcgacaagaacttcggtaaaggctcggtgatgcgcctcggcgaggaggtgcgccagccgatctcggtgatccccaccggttcgatctccctggacgtggccctcggcatcggcggcctgccgcgcggccgcgtggtcgagatctacggcccggaatcctcgggtaagaccactgtggcgctgcacgcggtggccaacgcccaggccgccggcggcatcgcggcattcatcgacgccgagcacgccctggatcccgagtacgccaagaagctcggtgtggacaccgattccctgttggtgagccagccggacaccggtgagcaggcgctggagatcgccgacatgctggtgcgctcgggtgcgctggacatcctggtgatcgactcggtggcagccctggtgccccgcgccgagatcgagggcgagatgggtgacagccacgtcggcctgcaggcccgcctgatgagccaggcgctgcgcaagatgaccggtgcgctgaacaactcgggcaccaccgcgatcttcatcaaccagctccgcgagaagatcggtgtgatgttcggctcgcccgaaaccaccacgggtggtaaggctttgaagttctacgcctcagtccgcctggacgtgcgtcgtatcgagacgctcaaggacggcaccgacgcggtcggtaaccgcacccgcgtcaaggtcgtcaagaacaaggtgtcgccgccgttcaagcaggctgagttcgacatcctgtacggccagggcatcagccgcgaaggctcgctcatcgacatgggtgtcgagcacggcttcatccgcaagtccgggtcctggttcacctacgaaggtgagcagctgggccagggcaaggagaacgcccgcaagttcctgctggagaacgtcgacgtcgccaacgagatcgagaagaagatcaaggaaaagctcggcatcggtgctgtcgtgacggccgaggcgaaggctgatgaagtccttcccgccccggttgatttctga

SEQ ID NO: 703 - protein, 351 aa, Mycobacterium porcinum
MAQQAPDREKALELAMAQIDKNFGKGSVMRLGEEVRQPISVIPTGSISLDVALGIGGLPRGRVVEIYGPESSGKTTVALHAVANAQAAGGIAAFIDAEHALDPEYAKKLGVDTDSLLVSQPDTGEQALEIADMLVRSGALDILVIDSVAALVPRAEIEGEMGDSHVGLQARLMSQALRKMTGALNNSGTTAIFINQLREKIGVMFGSPETTTGGKALKFYASVRLDVRRIETLKDGTDAVGNRTRVKVVKNKVSPPFKQAEFDILYGQGISREGSLIDMGVEHGFIRKSGSWFTYEGEQLGQGKENARKFLLENVDVANEIEKKIKEKLGIGAVVTAEAKADEVLPAPVDF

SEQ ID NO: 704 - DNA, 1041 bp, Mycobacterium immunogenum
  CDS (1)..(1041): transl_table=11
atggcgcaggcaccggatcgcgagaaggctctcgagctcgcgctcgcacaaatcgacaagagtttcggtaaaggctcggtcatgcggttgggcgacgaggtgcgccagcccatctccgtgatccccaccggatccatcgcgctggacgtggcactcggtatcggtggcctgcctcgcggccgcgtcatcgagatctacggtccggaatcttcgggtaagaccacggtggcgttgcatgccgtggccaacgcacaacgtgccggcggcatcgcggcgttcatcgatgccgagcacgctctggatcccgagtacgccaagaagctcggtgtcgacaccgattcgctgctggtatcacagcccgacaccggtgagcaggcgctggagatcgccgacatgctggtgcgctccggcgctatcgacctcatcgtcatcgactcggtggccgcgctggtgccacgcgctgagatcgagggcgagatgggcgacagccacgtcggtctgcaggctcgtctgatgagccaggcgttgcgcaagatgaccggcgcgctcaacaactccggtaccaccgcgatcttcatcaaccagctgcgtgagaagatcggcgtgatgttcggttcgcccgaaaccactactggtggtaaggctttgaagttctattcctccgtgcgcctggatgtgcgtcgtatcgagactctcaaggacggtaccgaggcggtgggtaaccgcacccgcgtcaaggttgtcaagaacaaggtgtcgccgccgttcaagcaggccgagttcgacatcctctacggcaagggcatctccaaggagggctcactcatcgacatgggtgtggagcaaggctttatccgtaagtccggttcctggttcacgtatgaaggtgaacagctgggccagggcaaggaaaatgcccgcaacttcttgctggagaacgtcgatgtcgccaatgagatcgagaagaagatcaaggaaaagcttggtatcggagcggtgctgaccgatgacgaagtcgtcccggccccagtcgatttctga

SEQ ID NO: 705 - protein, 346 aa, Mycobacterium immunogenum
MAQAPDREKALELALAQIDKSFGKGSVMRLGDEVRQPISVIPTGSIALDVALGIGGLPRGRVIEIYGPESSGKTTVALHAVANAQRAGGIAAFIDAEHALDPEYAKKLGVDTDSLLVSQPDTGEQALEIADMLVRSGAIDLIVIDSVAALVPRAEIEGEMGDSHVGLQARLMSQALRKMTGALNNSGTTAIFINQLREKIGVMFGSPETTTGGKALKFYSSVRLDVRRIETLKDGTEAVGNRTRVKVVKNKVSPPFKQAEFDILYGKGISKEGSLIDMGVEQGFIRKSGSWFTYEGEQLGQGKENARNFLLENVDVANEIEKKIKEKLGIGAVLTDDEVVPAPVDF

SEQ ID NO: 706 - DNA, 1041 bp, Mycobacterium chelonae
  CDS (1)..(1041): transl_table=11
atggcgcaggcaccggatcgcgagaaggcgcttgaactcgcgctcgcacaaatcgacaagagcttcggtaagggctcggtcatgcggctgggtgacgaggtgcgtcagcccatctccgtgatcccgaccggatccatcgcgctggatgtggcgcttggtatcggtggcctgcctcgtggccgcgtggtcgagatctatggaccggaatcctcgggtaagaccaccgtcgcgctgcacgcggtcgccaacgcgcaagccgccggcggtatcgctgcgttcatcgacgccgagcatgcgctcgaccccgaatacgccaagaagctcggtgtcgataccgactcgctgctcgtctctcagccggataccggtgagcaggctctagaaatcgccgacatgctggtgcgctccggcgccatctctcttatcgtgatcgactcggtggcggccttggtgcctcgtgccgaaatcgagggtgagatgggtgacagccatgtcggtctgcaggctcgtctgatgagccaggccctgcgcaagatgaccggtgcactcaacaactcgggtaccaccgcgatcttcatcaaccagctccgcgagaagatcggtgtgatgtttggttcgcccgaaaccaccaccggtggtaaggctttgaagttctactcgtcggtgcgtcttgatgtgcgccgtatcgagaccctcaaggacggcaccgatgcggtgggtaaccgcactcgcgtcaaggtggtcaagaacaaggtgtcgccgccgttcaagcaggccgagttcgacatcctctacggcaagggcatctccaaggaggggtcgctcatcgacatgggcgtggagcagggcttcatccgcaagtccggttcctggttcacctacgagggtgagcagttgggtcagggcaaggaaaatgcccgcaacttcctgttggagaacgtcgatgtcgccaacgagatcgagaagaagatcaaggaaaagctgggtatcggagcggtgctgaccgatgacgaagtcgtcccggccccagtcgatttctga

SEQ ID NO: 707 - protein, 346 aa, Mycobacterium chelonae
MAQAPDREKALELALAQIDKSFGKGSVMRLGDEVRQPISVIPTGSIALDVALGIGGLPRGRVVEIYGPESSGKTTVALHAVANAQAAGGIAAFIDAEHALDPEYAKKLGVDTDSLLVSQPDTGEQALEIADMLVRSGAISLIVIDSVAALVPRAEIEGEMGDSHVGLQARLMSQALRKMTGALNNSGTTAIFINQLREKIGVMFGSPETTTGGKALKFYSSVRLDVRRIETLKDGTDAVGNRTRVKVVKNKVSPPFKQAEFDILYGKGISKEGSLIDMGVEQGFIRKSGSWFTYEGEQLGQGKENARNFLLENVDVANEIEKKIKEKLGIGAVLTDDEVVPAPVDF

SEQ ID NO: 708 - DNA, 1056 bp, Mycobacterium fortuitum
  CDS (1)..(1056): transl_table=11
atggcgcagcaggcccctgatcgcgaaaaagcgctcgaactggcgatggcccagatcgacaagaacttcggtaaaggctcggtgatgcgcctcggcgaggaggtgcgccagcccatctcggtgatccccaccgggtccatctccctggatgtggcactcggcatcggcgggctgccgcgcggccgcgtggtcgagatctacggtccggaatcctcgggtaagaccacggtggcgctgcatgcggtggccaacgcccaggccgcaggcggtatcgcggcattcatcgatgccgagcatgcactggatcccgagtacgccaagaagctcggtgtggacaccgattcactgctggtcagccagcccgacaccggtgagcaggcactcgagatcgccgacatgctggtgcgctcgggcgcgctggacatcctggtgatcgactcggtggccgcgctggtaccccgcgccgagatcgagggcgagatgggggacagccacgtcggtctgcaggcgcgcctgatgagccaggcactgcgcaagatgaccggtgcgctgaacaactcgggcaccaccgcgatcttcatcaaccagctccgcgagaagatcggcgtgatgttcggctcacccgaaaccaccacgggcggtaaggctttgaagttctacgcctcggtccggctggacgttcggcgcatcgagacgctcaaggacggcaccgacgcggtcggtaaccggacccgcgtcaaggtcgtcaagaacaaggtctcgccgccgttcaagcaggccgagttcgacatcctgtacggccagggcatcagccgcgagggttcgctcatcgacatgggcgtcgagcacgggttcatccgcaagtcagggtcctggttcacctacgagggtgaacagctgggtcagggcaaggagaacgcccgcaagttcctgttggagaacgtcgatgtcgccaacgagatcgagaagaagatcaaggaaaagctcggtatcggtgctgtcgtgacggccgaggccaaggctgatgacgtcctccccgccccggttgacttctga

SEQ ID NO: 709 - protein, 351 aa, Mycobacterium fortuitum
MAQQAPDREKALELAMAQIDKNFGKGSVMRLGEEVRQPISVIPTGSISLDVALGIGGLPRGRVVEIYGPESSGKTTVALHAVANAQAAGGIAAFIDAEHALDPEYAKKLGVDTDSLLVSQPDTGEQALEIADMLVRSGALDILVIDSVAALVPRAEIEGEMGDSHVGLQARLMSQALRKMTGALNNSGTTAIFINQLREKIGVMFGSPETTTGGKALKFYASVRLDVRRIETLKDGTDAVGNRTRVKVVKNKVSPPFKQAEFDILYGQGISREGSLIDMGVEHGFIRKSGSWFTYEGEQLGQGKENARKFLLENVDVANEIEKKIKEKLGIGAVVTAEAKADDVLPAPVDF

SEQ ID NO: 710 - DNA, 1050 bp, Mycobacterium farcinogenes
  CDS (1)..(1050): transl_table=11
atggcgcaacaggcccctgatcgcgaaaaagcgctcgaactggcgatggcccagatcgacaagaatttcggtaaaggctcggtgatgcgcctcggcgacgaggtccgccagcccatctcggtgattcccaccggctccatcgcactggatgtggcgctcggtatcggtggcctgccgcgtggccgcgtggtcgagatctacggcccggaatcctcgggtaagacgacggtggcactgcatgcggtggccaacgcccaggccgccggcggcatcgcggcgttcatcgacgccgagcacgccctggatcccgagtacgccaagaagctcggcgtcgataccgactcactgctggtgagccagcccgacaccggtgagcaggcgttggagatcgccgacatgctggtgcgctcgggcgcgctcgacatcctggtcatcgactcggtggcggcgctggtgccccgcgctgagatcgagggcgagatgggtgacagccacgtcggtctgcaggcccgcctgatgagtcaggcgctgcgcaagatgaccggcgcgctgaacaactcgggtaccaccgcgatcttcatcaaccagctgcgcgagaagatcggtgtgatgttcggctcgcccgaaaccaccacgggcggtaaggcattgaagttctacgcctcggtccggatggatgtccggcgtatcgagacgctcaaggacggcaccgacgcggtcggcaaccggacccgcgtcaagatcgtcaagaacaaggtctcgccgccgttcaagcaggccgagttcgacatcctctacggccagggcatcagccgcgaaggctcactcatcgacatgggtgtcgagcacggcttcatccgcaagtccggctcctggttcacctacgagggcgagcagctgggccagggcaaggagaacgcccgcaagttcctgctggagaacgttgacgtcgccaacgagatcgagaagaagatcaaggaaaagctcggtatcggtgccgtcgtgaccgctgaagctgatgacgtccttcccgctccggtcgacttctga

SEQ ID NO: 711 - protein, 349 aa, Mycobacterium farcinogenes
MAQQAPDREKALELAMAQIDKNFGKGSVMRLGDEVRQPISVIPTGSIALDVALGIGGLPRGRVVEIYGPESSGKTTVALHAVANAQAAGGIAAFIDAEHALDPEYAKKLGVDTDSLLVSQPDTGEQALEIADMLVRSGALDILVIDSVAALVPRAEIEGEMGDSHVGLQARLMSQALRKMTGALNNSGTTAIFINQLREKIGVMFGSPETTTGGKALKFYASVRMDVRRIETLKDGTDAVGNRTRVKIVKNKVSPPFKQAEFDILYGQGISREGSLIDMGVEHGFIRKSGSWFTYEGEQLGQGKENARKFLLENVDVANEIEKKIKEKLGIGAVVTAEADDVLPAPVDF

SEQ ID NO: 712 - DNA, 1044 bp, Bacillus amyloliquefaciens
  CDS (1)..(1044): transl_table=11
atgagtgatcgtcaggcagccttagatatggctcttaagcaaatagaaaaacaattcggcaaaggttccatcatgaagctcggagaaaaaacggatacaagaatttcaacggtgccaagcggttcccttgcacttgataccgctctcggaataggcggatacccgcgcggacggattattgaagtatacggacctgaaagctcaggtaaaacgactgtagcgcttcacgcaatcgctgaggttcaggaaaaaggcggacaggcagcatttattgatgctgagcatgctcttgatcctgtttacgcgcaaaagctcggtgtcaatatcgaagagcttctgctttctcagccggatacgggagagcaggcgctagagattgctgaagcgctggtgcgaagcggagctgttgatatcgtagtcgttgactctgttgcggcgcttgttccaaaagctgaaattgaaggtgacatgggtgattcacacgtcggtttacaggcgcgtctcatgtctcaggcgctccgtaagctttccggcgccatcaataaatctaaaacaatcgcaatctttattaaccagattcgtgaaaaagtcggcgttatgttcggaaatccggagacgacaccgggcggccgcgcgctgaaattctattcttccgtgcgccttgaagtgcgccgtgccgagcaattaaagcagggcaacgacgtcatggggaataaaacgagaattaaagtcgtaaaaaacaaagtcgctcctccgttccgtacggctgaagtggacattatgtacggtgaaggaatctccaaagaaggggaaatcatcgaccttggaactgaactggatatcgtgcaaaaaagcggttcgtggtattcttatgaagaagaacgcctcggtcagggccgtgaaaacgccaagcagttcttaaaagaaaataaagatatcatgctgatgattcaggaacaaatccgtgaatattacggtttagacaataacggtgtaacggacaaagcggaagaagttcaggaagagatggaattagaagaataa

SEQ ID NO: 713 - protein, 347 aa, Bacillus amyloliquefaciens
MSDRQAALDMALKQIEKQFGKGSIMKLGEKTDTRISTVPSGSLALDTALGIGGYPRGRIIEVYGPESSGKTTVALHAIAEVQEKGGQAAFIDAEHALDPVYAQKLGVNIEELLLSQPDTGEQALEIAEALVRSGAVDIVVVDSVAALVPKAEIEGDMGDSHVGLQARLMSQALRKLSGAINKSKTIAIFINQIREKVGVMFGNPETTPGGRALKFYSSVRLEVRRAEQLKQGNDVMGNKTRIKVVKNKVAPPFRTAEVDIMYGEGISKEGEIIDLGTELDIVQKSGSWYSYEEERLGQGRENAKQFLKENKDIMLMIQEQIREYYGLDNNGVTDKAEEVQEEMELEE

SEQ ID NO: 714 - DNA, 1660 bp, primary endosymbiont of Sitophilus oryzae
  CDS (11)..(1078): transl_table=11
aggagtaaaaatggctattgatgagaataaacaaaaggcgttagcggcagcactgggtcaaattgaaaagcaattcggcaagtgttcgatcatgcgcctgggtgaagatcgctccatggatgttgaaacgatctccacaggttctctgtctctggatattgcgttgggcgccggtgggctgcccatgggccgtatcgttgaaatctacggcccggaatcatcgggtaaaaccactctgaccctgcaggttatcgccgcggcgcagcgcgaaggcaaaacctgcgcctttatcgatgccgagcatgccctggaccctatctacgccaaaaagctgggcgtcgatatcgataatctgttgtgctcccagccggacaccggcgaacaggcgctggaaatctgcgatgctctgacccgctccggcgctgtagacgtcatcatcgtcgactccgtggcggcactgacgccgaaagcggaaatcgagggtgagatcggcgattcccatatgaggctggccgcccgtatgatgagccaggcgatgcgcaaactggcgggtaatttgaaaaacgccaatacgctgctgattttcattaaccagatccgcatgaagatcggcgtcatgttcggtaacccggagaccacgaccggtggtaatgcgcttaagttttacgcatcggttcgtctggatattcgccgtatcggctcggtgaaagaaggcgatgtggtggtgggcagtgaaacccgcgtcaaagtcgtgaagaacaaagtcgccgcgccgtttaaacaggccgaattccagatcatgtacggcgaaggcatcaacattcgcggtgagctggtcgatctgggcgtcaagcacaagctgatagagaaagcgggcgcctggtacagctataacggcgagaagatcggtcagggcaaggccaatgcctgcacctttctgaaggaccatcccgaactggcggcggagctggacaaaaagctgcgcgacatgctgctgcatagcgccgatggcaacagcctggtcagcgacgtggaaagcgaggacgaaagcgccagcgagagcaatgaagagttttaatcgacgggcggtgaagacgacggcgcaacccgcgaccgcggtaagccaggacgagatcgaccaggcgatcgcttattgtcatgaccacgactggcttgacgatgggcgcttcgcacggcgctatgtcagccgccgcagcaaacaaggctatggcgaacagcgcattcgtatggaactgctgcagaaaggaatcaacagggacgacatcaatgcggccttcgccgaagcggagatcgatcgtacggcgcaggcgttcgccgtggcggtgaaaaagttcgggcagccactgccggccgagccgcagtccaaaatcaaagtgcagagttatctactctcccgcggcttttcctttgacgaaatccggtctatttatacaaatttataaatagatggcgtgcgggattttacttcgcaccaaagaaaatttatcttattcccactttttacgatcctgaacgctactgcagcgccttactactgcgctattctgttcacgattcgatcttttttttgcatgattccgggacaactatgagcaagagcactgctgagatccgtcaggcgtttctcgactttttccat

SEQ ID NO: 715 - protein, 355 aa, primary endosymbiont of Sitophilus oryzae
MAIDENKQKALAAALGQIEKQFGKCSIMRLGEDRSMDVETISTGSLSLDIALGAGGLPMGRIVEIYGPESSGKTTLTLQVIAAAQREGKTCAFIDAEHALDPIYAKKLGVDIDNLLCSQPDTGEQALEICDALTRSGAVDVIIVDSVAALTPKAEIEGEIGDSHMRLAARMMSQAMRKLAGNLKNANTLLIFINQIRMKIGVMFGNPETTTGGNALKFYASVRLDIRRIGSVKEGDVVVGSETRVKVVKNKVAAPFKQAEFQIMYGEGINIRGELVDLGVKHKLIEKAGAWYSYNGEKIGQGKANACTFLKDHPELAAELDKKLRDMLLHSADGNSLVSDVESEDESASESNEEF

SEQ ID NO: 716 - DNA, 1044 bp, Bacillus amyloliquefaciens
  CDS (1)..(1044): transl_table=11
atgagtgatcgtcaggcagccttagatatggctcttaagcaaatagaaaaacaattcggcaaaggttccatcatgaagctcggagaaaaaacggatacaagaatttcaacggtgccgagcggttcccttgcacttgataccgctctcggaataggcggatacccgcgcggacggattattgaagtatacggacctgaaagctcaggtaaaacgactgtagcgcttcacgcaatcgctgaggttcaggaaaaaggcggacaggcagcatttattgatgccgagcatgctcttgatcctgtgtacgcgcaaaagctcggtgtcaatatcgaagagctgctgctttctcagccggatacgggagagcaggcgctggagattgctgaagcgctggtgcgaagcggagctgtcgatatcgtagtcgttgactctgttgcggcgcttgttccaaaagctgaaattgaaggtgacatgggtgattcacacgtcggtttacaggcgcgtctcatgtctcaggcgctccgtaagctttccggcgccatcaataaatctaaaacaatcgcaatctttattaaccagattcgtgaaaaagtcggcgttatgttcggaaatccggagacgacaccgggcggccgcgcgctgaaattctattcttccgtgcgtcttgaagtgcgccgtgccgagcaattaaagcagggcaacgacgttatggggaataaaacgagaattaaagtcgtaaaaaacaaagtcgctcctccgttccgtacggctgaagtggacattatgtacggtgaaggaatctccaaagaaggggaaatcatcgaccttggaactgaacttgatatcgtgcagaaaagcggctcgtggtattcttatgaagaagaacgcctcggacagggccgtgaaaacgccaagcagttcttaaaagaaaataaagacatcatgctgatgattcaagaacaaatccgtgaacattacggtttggacaataacggtgttacggaaaaagcggaagaagttcaggaagagcttgaattcgaagaataa

SEQ ID NO: 717 - protein, 347 aa, Bacillus amyloliquefaciens
MSDRQAALDMALKQIEKQFGKGSIMKLGEKTDTRISTVPSGSLALDTALGIGGYPRGRIIEVYGPESSGKTTVALHAIAEVQEKGGQAAFIDAEHALDPVYAQKLGVNIEELLLSQPDTGEQALEIAEALVRSGAVDIVVVDSVAALVPKAEIEGDMGDSHVGLQARLMSQALRKLSGAINKSKTIAIFINQIREKVGVMFGNPETTPGGRALKFYSSVRLEVRRAEQLKQGNDVMGNKTRIKVVKNKVAPPFRTAEVDIMYGEGISKEGEIIDLGTELDIVQKSGSWYSYEEERLGQGRENAKQFLKENKDIMLMIQEQIREHYGLDNNGVTEKAEEVQEELEFEE

SEQ ID NO: 718 - DNA, 1487 bp, Chlamydomonas reinhardtii
  CDS (121)..(1365)
cgtagacgcacctgccaggacggatttgcgagctcgcttccaacgcacaacgagagagaacaaagtcacgtcaatttttccgcgacccgctagctccttttactcggttcgcttgaagccatgcagaccgcaattcaaatgcctagtggtggctgcttgagcagtggggcccgggcccggagcagcgcacgggccactcaacagattctttgcgcgccacgtcgcgacgtcgttgcgaaggcgcggcgcaccaaaactgccacgacaacctatactcagggcgaacgcccggatgccgataccaaggccaagctcttcaacgagacagtcgaccgcatcactcgccgctttggtgacgggtccatcatgcgtctcagcgacagcgtcacggcgaacattgagaccttccccagcggctcactcacgctggacgcggccctgggcggcggctacccccgcggccgcattatcgaggtgtacggtccggaggccagcggcaagaccacgctggccatgcacggctgcggcgagatccagcgcctgggcggcacggtcgcctacatagacgtggagcacgccttcgaccgcacctacgcgagcgctgggcatcacctgaacaacttctggtacgcgcagcccatgacgggcgaggaggcgctggaggtgatggacgagctgtgccgcagcaacgtgtgcgacctggtggtcatcgactcggtggcggcgctggtgccgagggccgagctggagggagacatcggcagcgtgcagatcggcagccaggcccgcctgctgagccaggccctgcgcaagctgtccgcctccgcctccaaaagcaagaccaccctgttcttcatcaaccagctgcggaacaagattggcgtcatgttcggcaaccccgagaccacctcgggcggcaacgcgctcaagtactacagcagcgtgcgcatcgacatccgcaagaaggagacactcagcgagtcggaccaggcctacgccaaccgggtccgcgccaaggtggtgaagaacaaggtggcctcgccgcataaggaggctctgtttgagatctactacggccgtggcattgacttcctgggcggactcatcgacaccgcggagcgcctcaaggtgctcacccgccgcggtgccttctactactacggcgaccagcggctgggccagggccgggagaaggtgttggcggcgctgcgcgaggacgcggagcgcacagccgccattgaggccgcggtgcgggacgtgctgcgggccaaccccgacgcggcgctggtggacacggaggagggcgacgacgacgacggcctgggcaccgcctccaccgtggcgctggacatggacgacgtgtagggggaggcaggagggctggcaggcagggaggccagtgctgttatggggggggggctgtggtagtacacagctgggcggcagtgggcagcgccaggacgccacctgagcccaattcgccctat

SEQ ID NO: 719 - protein, 414 aa, Chlamydomonas reinhardtii
MQTAIQMPSGGCLSSGARARSSARATQQILCAPRRDVVAKARRTKTATTTYTQGERPDADTKAKLFNETVDRITRRFGDGSIMRLSDSVTANIETFPSGSLTLDAALGGGYPRGRIIEVYGPEASGKTTLAMHGCGEIQRLGGTVAYIDVEHAFDRTYASAGHHLNNFWYAQPMTGEEALEVMDELCRSNVCDLVVIDSVAALVPRAELEGDIGSVQIGSQARLLSQALRKLSASASKSKTTLFFINQLRNKIGVMFGNPETTSGGNALKYYSSVRIDIRKKETLSESDQAYANRVRAKVVKNKVASPHKEALFEIYYGRGIDFLGGLIDTAERLKVLTRRGAFYYYGDQRLGQGREKVLAALREDAERTAAIEAAVRDVLRANPDAALVDTEEGDDDDGLGTASTVALDMDDV

SEQ ID NO: 720 - DNA, 1077 bp, Myxococcus xanthus
  CDS (1)..(1077): transl_table=11
atggccgtgaatcaggagaaggaaaaggcgatcgaactggcgatgtccgcggtggagcgccagttcggcaaggggtccatcatgcggctcggcaacgacgagccaatgatgcgagacgttcaggccatcccgacgggctccatctcgctggacatcgccctgggcgtgggtggcgtgcccaagggccgcatcatcgaaatcttcgggccggagtcgtccggtaagacgacgctgtgtctccacatcgtcgccgaagcgcagaagcgcggcggcatctgcggctacgtggacgcggagcacgcgctggacgtgggctacgcgcgcaagctgggcgtgcgcaccgatgacctgctgctgagccagccggacaccggtgagcaggcgctggaaatcgcggagatgctggtgcgctcgggcgccatcgacgtgctggtggtggactcggtggccgcgctcgtgccgaaggcggagctcgagggtgagatgggcgacgcgcacatgggtgtgcaggcccgcctcatgagccaggcgctccgcaagctgacgggcaccatcgccaagagccagacgtgcgtcatcttcatcaaccagattcgcatgaagattggcgtgatgttcggcaacccggagacgacgacgggcggtaacgcgctgaagttctacgcgtcgcagcgcctggacatccgccgcatcggcgccatcaagaatggcgacaacgtggtgggcagccgcacccgcgtgaaggtggtgaagaacaaggtcgcgccgccgttcaaggaagtcgagttcgacatcatgtacggcacgggcatctcccgtgagggcgacctcatcgacctcgcctccaacgagaacatcgtggagaagagcggcagctggttctccttcaatggtgagcgcatcggccagggccgggagaacgtgaaggagtacctgcgcgagcacccggagatcgcgaaggacatcgaaggccgcgtgctggagaagtacggcatcggcaagtcgggtgcgccgtcgccgcggcgccggacgagtccgcgccggccgaaggtggcagcgagaagcgcggccgtgtga

SEQ ID NO: 721 - protein, 358 aa, Myxococcus xanthus
MAVNQEKEKAIELAMSAVERQFGKGSIMRLGNDEPMMRDVQAIPTGSISLDIALGVGGVPKGRIIEIFGPESSGKTTLCLHIVAEAQKRGGICGYVDAEHALDVGYARKLGVRTDDLLLSQPDTGEQALEIAEMLVRSGAIDVLVVDSVAALVPKAELEGEMGDAHMGVQARLMSQALRKLTGTIAKSQTCVIFINQIRMKIGVMFGNPETTTGGNALKFYASQRLDIRRIGAIKNGDNVVGSRTRVKVVKNKVAPPFKEVEFDIMYGTGISREGDLIDLASNENIVEKSGSWFSFNGERIGQGRENVKEYLREHPEIAKDIEGRVLEKYGIGKSGAPSPRRRTSPRRPKVAARSAAV

SEQ ID NO: 722 - DNA, 1351 bp, Arabidopsis thaliana
  CDS (1)..(1320)
atggattcacagctagtcttgtctctgaagctgaatccaagcttcactcctctttctcctctcttccctttcactccatgttcttctttttcgccgtcgctccggttttcttcttgctactcccgccgcctctattctccggttaccgtctacgccgcgaagaaactctcccacaaaatcagttctgaattcgatgacagaatcaacggcgctctctctcccgacgctgattcccgcttcctcgaccgccaaaaggctttagaggcagctatgaatgacattaacagttcatttggtaaaggaagtgtaacaagattggggagtgctggtggagcattagtggagaccttttcgagtggtattttgactcttgatcttgctttaggtggaggcctaccaaagggtcgggtagtcgaaatatatggaccagaaagtagtggcaagaccacgctagcactccatgctattgctgaagtgcagaagcttggaggcaatgcaatgcttgttgatgcagagcatgcctttgatccagcgtattctaaagcattaggtgttgatgtagaaaatttgatagtgtgccagccagataatggcgagatggctttagaaactgcagaccgtatgtgtcgctcaggtgcggttgaccttatatgtgttgattctgtttcagcacttactccacgagctgagattgaaggtgagattggaatgcagcaaatgggtttgcaagctcgtcttatgagtcaagctcttcgtaaaatgtcaggaaacgcctctaaagctgggtgtactcttattttcctaaaccaaataagatacaagattggtgtgtactatgggaatccagaggtgactagcggaggaattgcgttaaagttcttcgcgtcggtccgtctagaaattcgttctgctgggaagatcaaatctagcaaaggggatgaagatattggtcttcgggctcgtgtaagagtgcagaagagcaaggtttcaagaccgtataagcaagcagagtttgagattatgtttggggaaggagtcagtaaactgggatgcgttcttgattgtgctgaaattatggaagttgtggtcaagaaaggttcctggtacagctacgaagaccaaaggctcgggcaaggaagagagaaagcactgcagcacttaagggaaaaccctgctcttcaagacgaaattgagaagaaagtgagattgttgatgttagatggagaagttcatcgatcaactcctttgatgagcagcagctcttcctcggcttcacatcgcgaagaagaagaagaagactcgcttgacgatttccaatgacataacacttaagcttgagactttcggatct

SEQ ID NO: 723 - protein, 439 aa, Arabidopsis thaliana
MDSQLVLSLKLNPSFTPLSPLFPFTPCSSFSPSLRFSSCYSRRLYSPVTVYAAKKLSHKISSEFDDRINGALSPDADSRFLDRQKALEAAMNDINSSFGKGSVTRLGSAGGALVETFSSGILTLDLALGGGLPKGRVVEIYGPESSGKTTLALHAIAEVQKLGGNAMLVDAEHAFDPAYSKALGVDVENLIVCQPDNGEMALETADRMCRSGAVDLICVDSVSALTPRAEIEGEIGMQQMGLQARLMSQALRKMSGNASKAGCTLIFLNQIRYKIGVYYGNPEVTSGGIALKFFASVRLEIRSAGKIKSSKGDEDIGLRARVRVQKSKVSRPYKQAEFEIMFGEGVSKLGCVLDCAEIMEVVVKKGSWYSYEDQRLGQGREKALQHLRENPALQDEIEKKVRLLMLDGEVHRSTPLMSSSSSSASHREEEEEDSLDDFQ

SEQ ID NO: 724 - DNA, 1170 bp, Arabidopsis thaliana
  CDS (1)..(1170)
atgggtcgactctcatgggccagtccgattcagagattccgtttcttctcttacttatctcagctgaatggaagaagaagcgttttggcttgctctggctatgaaaatcgttatctttcgtctttagttgaagcttcagattgtgaacttgatgaagttccagatgatagaaaagtagcggagaaagacactgctctacatttagcattgtcacagctttcaggtgattttgataaagactctaagttgtcattgcagcggttttacagaaaaaggagagtttctgtgatatccacgggttccctcaaccttgatctagctcttggagttggaggattgccaaagggaagaatggttgaggtttacggaaaagaagcatctggaaagacaactctagctctgcatatcatcaaggaagctcaaaagcttggaggttattgcgcttatcttgatgcagagaatgccatggatccttctctagcagaatcaataggtgtgaacacagaagagcttctgatatcacgacctagttctgctgaaaagatgctaaatattgttgatgtgctgaccaagagtgggtcagtagacgtaattgtggtagacagtgttgctgctcttgcccctcaatgtgaacttgatgctcctgtaggagaaagatacagagacacacaatcaagaataatgacacaggcgctcagaaaaatccattactcagttggctattctcagacactgatcgtttttcttaatcaggtcagatcacatgtgaaatctaacatgcatttcccgcacgccgaagaagtgacttgtggaggaaacgcattaccgtttcatgcagctatacgtctcaaaatgataagaaccgggctaataaagactgccaataagataagtggtctcaatgtctgcgtccaagtggtgaagaataaactggcgcccggaaagaagaaatctgaattggggattcactttggtcatggtttctacgtggagcgagaggtattagaattggcttgtgagcatggagttatcttaagagaaggaactagctatttcattgaaggcgaggtcattgaagggaaagacgcagctgagaagtatctggtggaaaataaagaggctctcgatactgtcgttgcaatcctgaggaaccagctcttcaagatgtga

SEQ ID NO: 725 - protein, 389 aa, Arabidopsis thaliana
MGRLSWASPIQRFRFFSYLSQLNGRRSVLACSGYENRYLSSLVEASDCELDEVPDDRKVAEKDTALHLALSQLSGDFDKDSKLSLQRFYRKRRVSVISTGSLNLDLALGVGGLPKGRMVEVYGKEASGKTTLALHIIKEAQKLGGYCAYLDAENAMDPSLAESIGVNTEELLISRPSSAEKMLNIVDVLTKSGSVDVIVVDSVAALAPQCELDAPVGERYRDTQSRIMTQALRKIHYSVGYSQTLIVFLNQVRSHVKSNMHFPHAEEVTCGGNALPFHAAIRLKMIRTGLIKTANKISGLNVCVQVVKNKLAPGKKKSELGIHFGHGFYVEREVLELACEHGVILREGTSYFIEGEVIEGKDAAEKYLVENKEALDTVVAILRNQLFKM

SEQ ID NO: 726 - DNA, 1050 bp, Acinetobacter sp
  CDS (1)..(1050): transl_table=11
atggatgataataaaagcaaggcattacaagctgctttaagtcagattgaaaaacaatttggcaaaaatacagtaatgcgtttaggtgataataccgttcaagctgttgaagccgtttcgacaggctctcttactctagatattgcattaggtattggtggcttacctaaagggcgtattgtagagatttacggtcctgaatcttctggtaaaacaaccatgactttgcaagcaattgcacaatgtcagaaagcaggtggtacctgtgcttttattgatgcagaacatgcattagaccctcagtatgcccgtaagctgggtgtagacatagacaatcttttggtatcgcagcctgatcatggtgaacaagctctggaaattgcagatatgcttgtacgctctggtgcgattgatctgattgtagtcgactctgtagcagcattaaccccaaaagccgaaattgaaggtgaaatgggcgactcccacatgggtttacaagcccgcttaatgagtcaagccttacgtaaaatcacgggtaatgctaaacgttcgaattgcatggtaatcttcattaaccagattcgtatgaaaattggcgtaatgtttggcagcccagaaaccacaactggtggtaatgcactaaaattctatgcatctgtacgtctagatatacgccgtattggtcaagttaaagaaggtgatgaaatcattggttctgaaaccaaagtcaaagtcgttaaaaataaaatggcccctcctttccgtgaagcaatcttccaaattttatatggcaagggtgtcaatcaacttggcgaattggttgatcttgcagttcaacaaaatattgtacaaaaagctggtgcttggtattcataccaaggcaataaaattggtcagggtaagaataacgtgattcgttatcttgaagagaaccctcagatttctacagaaattgaagcggttatccgtgaacaattattgactaaggcatcagatcagaccgctgctcacgatgaaactgaagaagaaccagatttactggaaagttaa

SEQ ID NO: 727 - protein, 349 aa, Acinetobacter sp
MDDNKSKALQAALSQIEKQFGKNTVMRLGDNTVQAVEAVSTGSLTLDIALGIGGLPKGRIVEIYGPESSGKTTMTLQAIAQCQKAGGTCAFIDAEHALDPQYARKLGVDIDNLLVSQPDHGEQALEIADMLVRSGAIDLIVVDSVAALTPKAEIEGEMGDSHMGLQARLMSQALRKITGNAKRSNCMVIFINQIRMKIGVMFGSPETTTGGNALKFYASVRLDIRRIGQVKEGDEIIGSETKVKVVKNKMAPPFREAIFQILYGKGVNQLGELVDLAVQQNIVQKAGAWYSYQGNKIGQGKNNVIRYLEENPQISTEIEAVIREQLLTKASDQTAAHDETEEEPDLLES

SEQ ID NO: 728 - DNA, 1059 bp, Actinobacillus actinomycetemcomitans
  CDS (1)..(1059): transl_table=11
atggcaactcaagaagaaaagcaaaaagcactcgacgcggcgttaggtcaaattgaaaaacaatttggtaaaggcgccatcatgaaactcggcgacagccaaaaactggacattgaagcgatttccaccggttctttcggtcttgacctagcactaggcatcggcggtttgccgatggggcgtatcgtggagattttcgggccggaatcttcaggtaaaactaccttaaccctttctgtgattgcggaagcgcaaaaaaccggcaaaacctgtgcctttattgatgcggaacatgctttagacccgatttatgcctccaaactcggcgtggatgtaaaagaacctttagtttcccagccggacaacggcgaacaggcgctggaaatttgtgatgcgttggtgcgttccggtgcggtggatgtaattatcgttgactccgttgccgccttaacgccgaaagcggaaattgaaggcgacatgggcgattcccacatgggattacaagcgcgtttaatgtctcaagcattgcgtaaacttaccagccaaattaaaaacgccaactgcttggtgattttcatcaaccaaattcggatgaaaatcggcgtgatgttcggtaatccggaaaccaccaccggcggtaacgcgttgaaattctatgcctccgtgcgtttggatattcgccgcgtgggttctatcaaagagggtgatgaagttatcggtaatgaaactcgtgtgaaagtggtgaaaaacaaagtggcgccaccgttccgccaagtggatttccaaattctgtacggcgaaggtatttccaaagaaagcgaactgattgagctcggcgtgaaacataaactcatcagcaaagcaggtgcgtggtacgcttaccaaaacgagaaaatcggtcagggcaaaaccaatgctatgaaatggttgaaagacaatcctgaacaagccaaatttatcgaaagcaccttgcgtgatgaattgttggcacatccggaatctgccatcactgcggaagtagaagacgaagcgggtaatggcgaaggcgatttcgaataa

SEQ ID NO: 729 - protein, 352 aa, Actinobacillus actinomycetemcomitans
MATQEEKQKALDAALGQIEKQFGKGAIMKLGDSQKLDIEAISTGSFGLDLALGIGGLPMGRIVEIFGPESSGKTTLTLSVIAEAQKTGKTCAFIDAEHALDPIYASKLGVDVKEPLVSQPDNGEQALEICDALVRSGAVDVIIVDSVAALTPKAEIEGDMGDSHMGLQARLMSQALRKLTSQIKNANCLVIFINQIRMKIGVMFGNPETTTGGNALKFYASVRLDIRRVGSIKEGDEVIGNETRVKVVKNKVAPPFRQVDFQILYGEGISKESELIELGVKHKLISKAGAWYAYQNEKIGQGKTNAMKWLKDNPEQAKFIESTLRDELLAHPESAITAEVEDEAGNGEGDFE

SEQ ID NO: 730 - DNA, 1092 bp, Agrobacterium tumefaciens
  CDS (1)..(1092): transl_table=11
atggcacaaaattctttgcgtctcgtagaggataaatcggtggataaaagcaaggcactggaagcggcgctctcccagatcgaacggtcgttcggcaagggatcgatcatgaagctcggttccaatgaaaatgtggttgaagtggaaaccgtttcgacgggctcgctcagcctggatatcgcgctcggcatcggcggcttgccgaaggggcgtatcattgagatttacggcccggaaagctccggtaaaacgacgctggcgctgcagacgatcgcggaagcccagaagaagggcggcatctgcgccttcgtggacgccgaacacgcgctcgatccggtttatgcccgcaagctcggtgtggatttgcagagccttctgatctcgcagcccgataccggcgagcaggcgcttgagatcaccgatacgctggtgcgttcgggcgctgtggacgttcttgtcatcgattcggttgcggccttgacgccgcgggcggaaatcgaaggtgaaatgggcgatagcctgccgggtcttcaggcccgtctgatgagccaggcgctgcgcaagctgaccgcctcgatctccaagtcgaagtgcatggtgatcttcatcaaccagattcgcatgaagatcggcgtcatgtttggttcgccggaaacgacgacgggcggtaacgctctcaagttctatgcgtccgtccgcctcgacatccgccgtatcggcgccgtcaaggagcgcgaagaggttgtcggcaaccagacgcgcgtcaaggtcgtcaagaacaagatggcgccgcccttcaaacaggttgaattcgacatcatgtatggcgaaggtgtttccaagaccggtgagctggtcgatctcggcgtgaaggccggtatcgtcgagaagtccggcgcatggttctcctataacagccagcgtctggggcaggggcgtgaaaacgccaagacctttctgcgcgacaatccggatacggccaatgagatcgaactggcgttgcgccagaatgccggtctgattgccgaccgcttcctgcagaatggtggcccggacgccggtgaaggcgacgacggcagcgacgagggctga

SEQ ID NO: 731 - protein, 363 aa, Agrobacterium tumefaciens
MAQNSLRLVEDKSVDKSKALEAALSQIERSFGKGSIMKLGSNENVVEVETVSTGSLSLDIALGIGGLPKGRIIEIYGPESSGKTTLALQTIAEAQKKGGICAFVDAEHALDPVYARKLGVDLQSLLISQPDTGEQALEITDTLVRSGAVDVLVIDSVAALTPRAEIEGEMGDSLPGLQARLMSQALRKLTASISKSKCMVIFINQIRMKIGVMFGSPETTTGGNALKFYASVRLDIRRIGAVKEREEVVGNQTRVKVVKNKMAPPFKQVEFDIMYGEGVSKTGELVDLGVKAGIVEKSGAWFSYNSQRLGQGRENAKTFLRDNPDTANEIELALRQNAGLIADRFLQNGGPDAGEGDDGSDEG

SEQ ID NO: 732 - DNA, 1047 bp, Amycolatopsis mediterranei
  CDS (1)..(1047): transl_table=11
atgcctgcagcacccgacaaggacaaggcgctcgagctcgcgctcgcgcagatcgacaagcagtacggcaagggctcggtcatgcgcctcggcgaagagggccgcgcccccatcgccgtgatccccaccggcgcgatcgccctcgacgtcgcgctcggcatcggcggcctgccccgcggccgggtcatcgaggtctacggcccggagtcctccggtaagaccacggtcgccctgcacgcggtggcgaacgcccagcgcaacggtggcatcgcggccttcatcgacgcggagcacgcgctggacccggactacgccaagaagctcggcgtggacaccgacgccctgctcgtctcccagcccgacaccggtgagcaggccctggagatcgcggacatgctggtccgctccggcgcgctcgacatcctggtcatcgactccgtggccgcgctcgtgccccgcgccgagatcgaaggcgagatgggcgactcgcacgtcggtctccaggcccggctgatgagccaggcgctgcgcaagatgaccggtgcgatgaacaactccggcaccaccgcgatcttcatcaaccagctgcgcgagaagatcggcgtcatgttcggctccccggaaaccaccaccggtggcaaggcgctgaagttctacgcgtcggtccggctcgacgtccgccgcatcgagacgctcaaggacggcggcgaggcggtcggcaaccgcacccgcgtcaaggtcgtgaagaacaagatggccccgcccttcaagcaggccgaattcgacatcctgtacggccacggcatctcccgcgagggttcgctcatcgacatgggggtcgaccaggccatcctgcgcaagtccggcgcctggtacacctacgagggcgaccagctcggccagggcaaggagaacgcccggaagttcctgcgcgacaacccggacatcgccaacgagatcgagaagcggatcaaggagaagctcggtatcggtgcgcagctcgacgcggaagccgtcgaggccgttccggcaccggtcgacttctag

SEQ ID NO: 733 - protein, 348 aa, Amycolatopsis mediterranei
MPAAPDKDKALELALAQIDKQYGKGSVMRLGEEGRAPIAVIPTGAIALDVALGIGGLPRGRVIEVYGPESSGKTTVALHAVANAQRNGGIAAFIDAEHALDPDYAKKLGVDTDALLVSQPDTGEQALEIADMLVRSGALDILVIDSVAALVPRAEIEGEMGDSHVGLQARLMSQALRKMTGAMNNSGTTAIFINQLREKIGVMFGSPETTTGGKALKFYASVRLDVRRIETLKDGGEAVGNRTRVKVVKNKMAPPFKQAEFDILYGHGISREGSLIDMGVDQAILRKSGAWYTYEGDQLGQGKENARKFLRDNPDIANEIEKRIKEKLGIGAQLDAEAVEAVPAPVDF

SEQ ID NO: 734 - DNA, 1080 bp, Anaplasma marginale
  CDS (1)..(1080): transl_table=11
gtgtccatgtcaggcagtaagaaagatgttgaatctgagaagcagaaggcgttggatgcggccataagccagatagaaagggcgtttgggcggggtgccattatgaagttgaagcagcatcctgccgagaagatggatagcgtgtctacaggttctatagctctggatgcggcgttgggtattggagggttgccgaaaggtaggatagtagagatttttggtcctgagagctccgggaagactacacttgcgcttcacgtcattgcagaggcccaaaagcagggcggtaactgtgcttttattgatgccgaacatgcgttggacaccgtgtacgccagaaagctgggcgtaaatgtgggggatttgatagtctcacagcccgacaccggcgagcaggctttgcacattgttgaatacttagtgtgctccggtgccatagatgtgatagtagtggattccgtcgccgcgctcactcccagggcggaaatagagggtgacatgggtgaccagcacatggggttgcaggctaggttgctgagccacgcgcttcgcaagctgacctcggtggtctccaaggctaactgtatattggtgtttatcaaccagatacgcataaagataggtgtgatttacggcaacccggaagtgacaacgggtggtagtgcgctcaagttctacacgtcaatacggcttgacattcgcaaagtaagcgcgattaaagacaaagacaacgttatagggaaccagacgagagtaaaggtcgtcaaaaacaaggttgcacccccgttcaagcaggcggagtttgacatcgtgtacaatgagggcatatcgaagctgggcgagatagtcgacatgggcgtcaagttcggttttgtcgagaagtctggtgcgcactattcctacggcgcggtaaagttgggacaaggtagggagaatgccaagggttatttgaaaagcaacccagatgtcgcgaatgagttagagcagaaaatcagagcatgccttgcggaaagtatgcacaatagcgatctgttcgctgtagatgagcgtaccgatgtgttggaggaggaggttttctag

SEQ ID NO: 735 - protein, 359 aa, Anaplasma marginale
MSMSGSKKDVESEKQKALDAAISQIERAFGRGAIMKLKQHPAEKMDSVSTGSIALDAALGIGGLPKGRIVEIFGPESSGKTTLALHVIAEAQKQGGNCAFIDAEHALDTVYARKLGVNVGDLIVSQPDTGEQALHIVEYLVCSGAIDVIVVDSVAALTPRAEIEGDMGDQHMGLQARLLSHALRKLTSVVSKANCILVFINQIRIKIGVIYGNPEVTTGGSALKFYTSIRLDIRKVSAIKDKDNVIGNQTRVKVVKNKVAPPFKQAEFDIVYNEGISKLGEIVDMGVKFGFVEKSGAHYSYGAVKLGQGRENAKGYLKSNPDVANELEQKIRACLAESMHNSDLFAVDERTDVLEEEVF

SEQ ID NO: 736 - DNA, 1110 bp, Azospirillum lipoferum
  CDS (1)..(1110): transl_table=11
atgtcgtccgcacagcttcgtttggtcgagaaggattccatggacaagcagaaggcgctcgatgccgccctgagccagatcgaacgcgcgttcggcaagggctcgatcatgaagctcggcgcccgtgagaacctggtcgagacggaggtcatttccaccggctccctgggtctcgatatcgcgctgggcatcggtggcctgccgaagggccgcatcgtcgaaatctacgggccggaaagctcgggcaagaccacgctggcgctgcacgccatcgcccaggcccagaaggccggcggcacctgcgccttcgtggacgccgaacacgcgctcgacccgtcctatgcccgcaagctgggcgtcaacatcgacgagttgctgatctcccagccggatgccggcgagcaggcgctggagatcgccgatacactggtgcgctccggcgccatcgacgtgctggtcgtcgactcggttgccgcgctggttccgcgcgccgaactggaaggcgagatgggtgacgccatgtcgggcctgcatgcccgcctgatgagccaggcgctgcgcaagctgaccggctcgatctccaagtcgaattgcctggtgatcttcatcaatcagatccgcctgaagatcggcgtgatgttcggcaacccggagacgacgaccggcggcaacgcgctgaagttctacgcctccgttcgtctcgacatccgccgcatcggctcgatcaaggaccgcgacaccgtcgtcggcaaccagacccgcgtcaaggtggtgaagaacaagatggccccgccgttccgcgtggtcgagttcgacatcatgtatggcgagggtgtgtcgaaggtcggcgagttgctcgacctcggcatccaggccggtgtggtcgataagtcgggtgcgtggttcagctatgacggcacccgcatcggccagggccgcgagaatgccaagacctacctgcgcaacaaccccgagatggccgatgcgatcgaggccaagatccgcggcaacgccggtctggtcgccgacgccatgatgggcacccggaagccgacggcgaagcctccacaccggagtgaggttcccagcgagcaggaagcccgctgctga

SEQ ID NO: 737 - protein, 369 aa, Azospirillum lipoferum
MSSAQLRLVEKDSMDKQKALDAALSQIERAFGKGSIMKLGARENLVETEVISTGSLGLDIALGIGGLPKGRIVEIYGPESSGKTTLALHAIAQAQKAGGTCAFVDAEHALDPSYARKLGVNIDELLISQPDAGEQALEIADTLVRSGAIDVLVVDSVAALVPRAELEGEMGDAMSGLHARLMSQALRKLTGSISKSNCLVIFINQIRLKIGVMFGNPETTTGGNALKFYASVRLDIRRIGSIKDRDTVVGNQTRVKVVKNKMAPPFRVVEFDIMYGEGVSKVGELLDLGIQAGVVDKSGAWFSYDGTRIGQGRENAKTYLRNNPEMADAIEAKIRGNAGLVADAMMGTRKPTAKPPHRSEVPSEQEARC

SEQ ID NO: 738 - DNA, 1041 bp, Azoarcus sp
  CDS (1)..(1041): transl_table=11
atggacgacaacaaggccaaggccctcgccgccgcgctctcgcagatcgagaagcagttcggcaaaggctcgatcatgcggatgggcgacggcaccatcgaacgtgacatccagacggtgtcgaccggctcgctcggtctcgacatcgcgctcggtctgggcggtttgccgcgcggccgggtcgtcgaaatctacggcccggaatcctccggcaagacgacgttgacgctgcaggtcatcgccgaaatgcagaagctcggcggcaccgccgcattcatcgatgccgagcatgcgctcgacgtcggctacgccgagaagctcggcgtgaacatccaggacctcctgatctcgcagccggacaccggtgagcaggcgctcgagatcgccgacatgctggtgcgttcgggaggcgtcgagatcgtcgtcatcgactcggtcgcggcgctgactccgaaagccgagatcgaaggcgagatgggcgaccagctgcccggcctgcaggcccgcctgatgagccaggcgctcaggaagctcaccgcgaacatcaagcgcaccaacaccctggtgatcttcatcaaccagatccgcatgaagatcggcgtgatgttcggtagcccggagaccacgaccggcggcaacgcgctgaagttctacgcctcggtacggctcgacatccgccgcactggcgcgatcaagaaaggcgacgaagtggtcggctccgagacgcgctgcaaggtcgtcaagaacaaggtcgcgccgccgttcaaggaagcgcatttcgacatcctctacggcgaaggcatctcgcgcgaaggcgagatcatcgacctcggcgtgcagcacaagatcgtcgacaagtccggcgcatggtatgcgtacaagggcgagaagatcggccagggcaaggacaattcacgcgaattcctgcgcgcgaacccggctctcgcgcgcgagatcgaaaacaaggtccgcgcgcaggtcggcctgaacgcgatggctgtcgaggctgcacccgccggggtggctccggtcgagccctga

SEQ ID NO: 739 - protein, 346 aa, Azoarcus sp
MDDNKAKALAAALSQIEKQFGKGSIMRMGDGTIERDIQTVSTGSLGLDIALGLGGLPRGRVVEIYGPESSGKTTLTLQVIAEMQKLGGTAAFIDAEHALDVGYAEKLGVNIQDLLISQPDTGEQALEIADMLVRSGGVEIVVIDSVAALTPKAEIEGEMGDQLPGLQARLMSQALRKLTANIKRTNTLVIFINQIRMKIGVMFGSPETTTGGNALKFYASVRLDIRRTGAIKKGDEVVGSETRCKVVKNKVAPPFKEAHFDILYGEGISREGEIIDLGVQHKIVDKSGAWYAYKGEKIGQGKDNSREFLRANPALAREIENKVRAQVGLNAMAVEAAPAGVAPVEP

SEQ ID NO: 740 - DNA, 1433 bp, Azotobacter vinelandii
  CDS (311)..(1360): transl_table=11
tgccggccccgatggcggctcgccggaaaccccggtcggcaccgtctggctggccgggcagatggcgagcgcttgttgcggtgcgccagcagtttcccggcgaccgcggcgaggtacgtcgacggacggtgcaggccgccctggccggtctgatccgcctggttgccgatgggacgctcgaatgaggtgctggacatcacggaaatggatcggcccaggggtaggcgcccgagcttttcctatgctctaatactgtctacttatacagtgtatggcgccgcaaggccctcctgaatacgtgaggtcttcaatggacgagaacaagaagcgcgccttggctgcggccttgggccagatcgaaaagcagttcggcaagggcgcggtgatgcgcatgggcgatcacgagcggcaggcgattccggccatttccaccggttccctggggctggacatcgcgctcggcatcggcggcctgcccaaggggcggatcgtcgagatctacggccccgaatcctccggcaagaccaccctgaccctgtcgaccatcgccgaggctcagaagcagggtgccacctgcgccttcgtcgacgccgagcacgcgctcgatccggactacgccgccaagctcggggtgaacgtcgacgacctcctggtttcccagcccgataccggcgagcaggcgctggagatcaccgacatgctggtgcgttccaacgcggtggacgtgatcatcgtcgactccgtggcggcgctggtgcccaaggcggagatcgagggcgagatgggcgaccagcacgtcggtctgcaggcccgtctgatgtcccaggccctgcgcaagatcaccggcaacatccagaacgccaactgcctggtcatcttcatcaaccagatccgcatgaagatcggtgtgatgttcggcaacccggaaaccaccaccggcgcgaatgccctgaagttctacgcctcggtgcgtctggacatccgccgcaccggcgcggtgaaggagagcgacgaggtgatcggcagcgagacccgcgtcaaggtggtgaagaacaaggtggcgccgccgttccgtcaggccgagttccagattctctacggcaagggcatctaccgtaacggtgagatcatcgacctcggtgtgcaactcggcctgctggagaagtccggcgcctggtacagctaccagggcagcaagatcggccagggcaaggccaatgcggccaagtttctcgaggacaacccggaggtcgccgcagcggtcgagaagagcatccgcgatcagttgctcgccgcgccggccagcgcccgtccggcagccttggccgacgagccggccgacgcggatctcgattattgatgagtgcgtcgatgccggggctcgacagtcccgccgccgtgcgccgggccgccatggacctgctggcgcgtcg

SEQ ID NO: 741 - protein, 349 aa, Azotobacter vinelandii
MDENKKRALAAALGQIEKQFGKGAVMRMGDHERQAIPAISTGSLGLDIALGIGGLPKGRIVEIYGPESSGKTTLTLSTIAEAQKQGATCAFVDAEHALDPDYAAKLGVNVDDLLVSQPDTGEQALEITDMLVRSNAVDVIIVDSVAALVPKAEIEGEMGDQHVGLQARLMSQALRKITGNIQNANCLVIFINQIRMKIGVMFGNPETTTGANALKFYASVRLDIRRTGAVKESDEVIGSETRVKVVKNKVAPPFRQAEFQILYGKGIYRNGEIIDLGVQLGLLEKSGAWYSYQGSKIGQGKANAAKFLEDNPEVAAAVEKSIRDQLLAAPASARPAALADEPADADLDY

SEQ ID NO: 742 - DNA, 1032 bp, Bacillus anthracis
  CDS (1)..(1032): transl_table=11
atgagtgatcgtcaagcagcgttagatatggcgttaaaacaaatagagaagcaattcggtaaaggttcaattatgaaattaggagaacaagcagagcgcaaagtttctacggtttctagtggttctttagcacttgatgtggcattaggggtaggcggatacccacgcggccgtattatcgaaatttacggacctgaaagttcaggtaaaacaacagtttcattacacgcaattgcagaagtacagcgtcaaggtggacaagcagcgttcattgatgctgagcatgcaatggatcctgtatatgcacaaaaactaggtgttaacatcgatgaattactattatcacaacctgatacaggggagcaaggtttagaaatcgcagaagcacttgtacgaagtggtgcggttgatattatcgtaattgactctgtagcagctcttgtaccgaaagctgaaattgaaggagacatgggtgactcacacgtaggtttacaagctcgtctaatgtctcaagcacttcgtaaactttcaggtgcaatcaataaatcaaaaacaatcgcaatctttattaaccaaattcgtgaaaaagttggggttatgttcggaaatccagaaacaactccaggtggtcgtgcgttgaaattctattcaactgttcgtcttgaagtgcgtcgtgcggagcaattaaaacaaggtaacgacatcgttggtaataaaacaaaagtaaaagtagttaaaaataaagtggcaccaccattccgtgttgcggaagttgatattatgtacggagaaggtatttcaagagaaggtgaaatcttagatatggcctctgaacttgatatcgttcaaaagagcggtgcttggtactcttataatgaagaacgcttaggacaaggtcgtgaaaattcgaagcagttcttaaaagaaaatacggatttaagagaagaaattgccttctttattcgtgagcatcacggaattagcgaagattctggtgctgaaggtatggaagatccaaatcttcttgattaa

SEQ ID NO: 743 - protein, 343 aa, Bacillus anthracis
MSDRQAALDMALKQIEKQFGKGSIMKLGEQAERKVSTVSSGSLALDVALGVGGYPRGRIIEIYGPESSGKTTVSLHAIAEVQRQGGQAAFIDAEHAMDPVYAQKLGVNIDELLLSQPDTGEQGLEIAEALVRSGAVDIIVIDSVAALVPKAEIEGDMGDSHVGLQARLMSQALRKLSGAINKSKTIAIFINQIREKVGVMFGNPETTPGGRALKFYSTVRLEVRRAEQLKQGNDIVGNKTKVKVVKNKVAPPFRVAEVDIMYGEGISREGEILDMASELDIVQKSGAWYSYNEERLGQGRENSKQFLKENTDLREEIAFFIREHHGISEDSGAEGMEDPNLLD

SEQ ID NO: 744 - DNA, 1053 bp, Bacillus clausii
  CDS (1)..(1053): transl_table=11
atgagtgatagaaaacaagcgcttgacatggctttacgccatattgaaaaacaatttggcaaaggctctattatgaagctaggtgaacaggctgaacagcgcgtatcgacggtatcaagcggcaccctcgcccttgatattgctttgggcgtaggtggctatccaaaaggaagagtcattgaagtatatggaccagaatcttccggtaaaacaaccgttgctctccatgcaattgctgaagtgcagcgcaatggtggccaagccgcttttattgatgctgagcatgccctggatcctgtctatgcgagcaaactaggcgttaatatcgatgaactcttgctgtcccaacctgatacaggcgaacaggcacttgaaattgcggaagcacttgtgcgcagcggtgcccttgatatcattgtcattgatagtgtagctgcgcttgtaccaaaagcggaaattgaaggggaaatgggcgactcgcatgtcggcttgcaagcacgtttaatgtcacaagcgctacggaaattatccggagcgatcaataagtcgaaaacgattgcgatcttcatcaaccaaatccgtgaaaaagtcggcgttatgttcggcaatccagaaacgacgccagggggacgcgcccttaaattttactcgtccgtccgcttggaagtgcgccgtgccgaggcgttaaagcaagggaatgagattgtcggcaaccgaaccaaaatcaaagtcgtcaaaaacaaagtcgctccgcctttccgtttagcggaagtcgacattatgtacggagaaggtatttccagggaaggttcgatgcttgacattgcctcggaactcgacattgtcgaaaaaagcggtgcttggtattcttacaaaggcgaccgcctcgggcaaggccgcgagaattcaaaacaatttttgaaagaaaacccggaaattacagccgaaattgagcgtttgattcgtgaccaccacgggctcgacggggaagcgaagctggaagaggcagctgaagaacaagcttttgaagatgtgcctttagatttaaaataa

SEQ ID NO: 745 - protein, 350 aa, Bacillus clausii
MSDRKQALDMALRHIEKQFGKGSIMKLGEQAEQRVSTVSSGTLALDIALGVGGYPKGRVIEVYGPESSGKTTVALHAIAEVQRNGGQAAFIDAEHALDPVYASKLGVNIDELLLSQPDTGEQALEIAEALVRSGALDIIVIDSVAALVPKAEIEGEMGDSHVGLQARLMSQALRKLSGAINKSKTIAIFINQIREKVGVMFGNPETTPGGRALKFYSSVRLEVRRAEALKQGNEIVGNRTKIKVVKNKVAPPFRLAEVDIMYGEGISREGSMLDIASELDIVEKSGAWYSYKGDRLGQGRENSKQFLKENPEITAEIERLIRDHHGLDGEAKLEEAAEEQAFEDVPLDLK

SEQ ID NO: 746 - DNA, 1044 bp, Bacillus subtilis
  CDS (1)..(1044): transl_table=11
atgagtgatcgtcaggcagccttagatatggctcttaaacaaatagaaaaacagttcggcaaaggttccattatgaaactgggagaaaagacagatacaagaatttctactgtaccaagcggctccctcgctcttgatacagcactgggaattggcggatatcctcgcggacggattattgaagtatacggtcctgaaagctcaggtaaaacaactgtggcgcttcatgcgattgctgaagttcagcagcagcggacaagcgcgtttatcgatgcggagcatgcgttagatccggtatacgcgcaaaagctcggtgttaacatcgaagagcttttactgtctcagcctgacacaggcgagcaggcgcttgaaattgcggaagcattggttcgaagcggggcagttgacattgtcgttgtcgactctgtagccgctctcgttccgaaagcggaaattgaaggcgacatgggagattcgcatgtcggtttacaagcacgcttaatgtctcaagcgcttcgtaagctttcaggggccattaacaaatcgaagacaatcgcgattttcattaaccaaattcgtgaaaaagtcggtgttatgttcgggaacccggaaacaacacctggcggccgtgcgttgaaattctattcttccgtgcgtcttgaagtgcgccgtgctgaacagctgaaacaaggcaacgacgtaatggggaacaaaacgaaaatcaaagtcgtgaaaaacaaggtggctccgccgttccgtacagccgaggttgacattatgtacggagaaggcatttcaaaagaaggcgaaatcattgatctaggaactgaacttgatatcgtgcaaaaaagcggttcatggtactcttatgaagaagagcgtcttggccaaggccgtgaaaatgcaaaacaattcctgaaagaaaataaagatatcatgctgatgatccaggagcaaattcgcgaacattacggcttggataataacggagtagtgcagcagcaagctgaagagacacaagaagaactcgaatttgaagaataa

SEQ ID NO: 747 - protein, 347 aa, Bacillus subtilis
MSDRQAALDMALKQIEKQFGKGSIMKLGEKTDTRISTVPSGSLALDTALGIGGYPRGRIIEVYGPESSGKTTVALHAIAEVQQQRTSAFIDAEHALDPVYAQKLGVNIEELLLSQPDTGEQALEIAEALVRSGAVDIVVVDSVAALVPKAEIEGDMGDSHVGLQARLMSQALRKLSGAINKSKTIAIFINQIREKVGVMFGNPETTPGGRALKFYSSVRLEVRRAEQLKQGNDVMGNKTKIKVVKNKVAPPFRTAEVDIMYGEGISKEGEIIDLGTELDIVQKSGSWYSYEEERLGQGRENAKQFLKENKDIMLMIQEQIREHYGLDNNGVVQQQAEETQEELEFEE

SEQ ID NO: 748 - DNA, 1044 bp, Bartonella henselae
  CDS (1)..(1044): transl_table=11
gtggataaaataaaagctctcgatgctgctctctcacaaattgaacgttccttcggtaaaggctcaattatgcgtcttgggcaaaaagagcaggttgttgaaattgaaacaataccaactggttcattatctttggatattgctttgggtgttggtggattaccaaaggggcgtattgttgaaatttatggaccagaaagttctggaaaaacaacattagctctccatgctattgctgaggcacagaaaaatggtggagtttgtgcttttattgatgcggaacatgctcttgatcctatttatgcgcgtaagcttggtgttgatttagaaaatttattcatttctcaaccagatacgggtgaacaggcgttagaaattacagaaacattggttcgttctggtgctgttgatgtgctcgttgttgattccgtagccgctttgacaccgcgtgcggaaattgatggtgaaatgggagatgctttgcctggattgcaagctcggttaatgagcaaagctttgcggaaactcactgcatcgattttccgctctaactgtatggtcatttttattaatcaaattcgtatgaaaattggggtgatgtttggttctcctgaaacgacaacgggcggaaatgctttaaagttttatgcttctgttcgtttggatattcgccgcattggctctattaaagatagggatatgatcgttggaaatcagacccgtgttaaagtggtcaaaaataagttggcacctccattcaaacaggttgagtttgatattatttatggtgaaggtatttccaaattaggtgagttgattgatttgggggtcaaagttggtactgtagaaaaatctggttcgtggttctcttataattctcaacgtttagggcagggacgagagaatgcgaagcagtttttacgcgaacatccagaaatagctacagagatcgaaacggctttgcgtcaaaatgctggtttaattgcaattgaattgttagaaaatgcaggatcagaaaatacagaaagtgatgaggtcatttga

SEQ ID NO: 749 - protein, 347 aa, Bartonella henselae
MDKIKALDAALSQIERSFGKGSIMRLGQKEQVVEIETIPTGSLSLDIALGVGGLPKGRIVEIYGPESSGKTTLALHAIAEAQKNGGVCAFIDAEHALDPIYARKLGVDLENLFISQPDTGEQALEITETLVRSGAVDVLVVDSVAALTPRAEIDGEMGDALPGLQARLMSKALRKLTASIFRSNCMVIFINQIRMKIGVMFGSPETTTGGNALKFYASVRLDIRRIGSIKDRDMIVGNQTRVKVVKNKLAPPFKQVEFDIIYGEGISKLGELIDLGVKVGTVEKSGSWFSYNSQRLGQGRENAKQFLREHPEIATEIETALRQNAGLIAIELLENAGSENTESDEVI

SEQ ID NO: 750 - DNA, 1044 bp, Bartonella quintana
  CDS (1)..(1044): transl_table=11
gtggataaaacaaaagctctcgatgctgctctctcacaaattgaacgttcttttggtaaaggctcaattatgcgtcttgggcaaaaagagcaggttgttgaaattgaaacaatcccaactggttcattatctttggatattgctttgggtgttggtggattaccgaaggggcgtattgttgaaatttatggaccagaaagttctggaaaaacaacattagctcttcatgctattgctgaagcacaaaaaaatggtggggtttgcgcttttattgatgcggagcacgctcttgatcctatttatgcgcgtaaacttggtgttgatttagagaacttgttcatttctcagccagataccggtgaacaggcattggaaattaccgagacacttgttcgttctggtgcggttgatgtactcgttgttgattccgtagccgctttgacgccgcgtgcggaaattgatggtgaaatgggtgatgctttgcccggattgcaagctcggttgatgagcaaagctttgcgaaaattaaccgcatcgattttccgctctaactgtatggtgatctttattaaccaaattcgtatgaaaattggggtgatgtttggttctcctgaaacgacaacaggcggaaacgctttaaagttttatgcttctgttcgtttggacattcgccgcgttggctccattaaagatcgggatatgattgttggtaatcagacacgtgttaaagtggtcaaaaataaattggcacctccatttaaacaggttgagtttgacattatttatggtgaaggtatttctaaattaggtgagttgattgatttgggtgtcaaagttggcattgtggaaaaatcaggttcgtggttctcttataattctcaacgtttaggacaagggcgagaaaatgcgaagcagtttttacgcgaacacgcagagatagcaacagagatcgaaacggctttgcgtcaaaatgctggtttgattgcgattgagttgttagaaaatgcaggatcagaaaatacagaaagcaatgaagcaatttga

SEQ ID NO: 751 - protein, 347 aa, Bartonella quintana
MDKTKALDAALSQIERSFGKGSIMRLGQKEQVVEIETIPTGSLSLDIALGVGGLPKGRIVEIYGPESSGKTTLALHAIAEAQKNGGVCAFIDAEHALDPIYARKLGVDLENLFISQPDTGEQALEITETLVRSGAVDVLVVDSVAALTPRAEIDGEMGDALPGLQARLMSKALRKLTASIFRSNCMVIFINQIRMKIGVMFGSPETTTGGNALKFYASVRLDIRRVGSIKDRDMIVGNQTRVKVVKNKLAPPFKQVEFDIIYGEGISKLGELIDLGVKVGIVEKSGSWFSYNSQRLGQGRENAKQFLREHAEIATEIETALRQNAGLIAIELLENAGSENTESNEAI

SEQ ID NO: 752 - DNA, 1134 bp, Bdellovibrio bacteriovorus
  CDS (1)..(1134): transl_table=11
atggcaaacgctactgtagacaacaaagcgaactcagaaaaaatcaaagctcttgaattggctgtttcgactatcgaaaagcaattcggtaaaggctccatcatgcgtttgggcgcgaacgaatctttggttaaagacgttgaagcgatcagcacgggtgcattgagcttggatatcgctttgggtatcggcggtcttcctaaaggtcgtatctgtgaaatctatggaccagagtcctctggtaaaacaactctgtgcttgtctgttatcgctcaagctcagaaaaagggcggcgttgtcgctttcgttgatgccgaacacgctttggatatcaactatgctcgtaaactgggtgtgaacacggaagatcttttgatctctcagccagacactggtgaacaagctttggaaatcactgaaacacttgttcgttccggcgcgattgacgtattggttgtcgactccgtagcagccttggttcctcgtgcagagatcgaaggtgacatgggtgattcccacgttggtttgcaggctcgtttgatgtcccaggctttgcgtaagctgactgcggcgatcaaccgttccaacactcttgttatctttattaaccaaatccgtatgaaaatcggtgttatgttcggtaaccctgaaacaactacgggtggtaacgctttgaaattctactcttctgttcgtttggatgtacgccgtgtgggcgcgatcaaaaacggtgaggacgtgactggtaaccgtactgcggtgaaagttgttaagaataaaatggcgcctccgttcaccaaagttgaattcgacttgatgtacggtgaaggtatctctgaagagggtgaccttctggatctggcagtgactgcgaacatggttgaaaaatccggtgcgtggttctctatcaatggtgagcgcatgggccaaggccgtgatgctgcgaagaacttcctgaaagagcacccagaatacatggttgaacttcgtaagaaaatccttgcagcaaacggtatcggcaaacttttggttgataccaacggcaacaacggtgaagaccacgaaggtacagagccagttgaaatcgaagcagaagatgctgctccgaaaaaaggcaaaaaaggcaaacactag

SEQ ID NO: 753 - protein, 377 aa, Bdellovibrio bacteriovorus
MANATVDNKANSEKIKALELAVSTIEKQFGKGSIMRLGANESLVKDVEAISTGALSLDIALGIGGLPKGRICEIYGPESSGKTTLCLSVIAQAQKKGGVVAFVDAEHALDINYARKLGVNTEDLLISQPDTGEQALEITETLVRSGAIDVLVVDSVAALVPRAEIEGDMGDSHVGLQARLMSQALRKLTAAINRSNTLVIFINQIRMKIGVMFGNPETTTGGNALKFYSSVRLDVRRVGAIKNGEDVTGNRTAVKVVKNKMAPPFTKVEFDLMYGEGISEEGDLLDLAVTANMVEKSGAWFSINGERMGQGRDAAKNFLKEHPEYMVELRKKILAANGIGKLLVDTNGNNGEDHEGTEPVEIEAEDAAPKKGKKGKH

SEQ ID NO: 754 - DNA, 1179 bp, Bifidobacterium breve
  CDS (1)..(1179): transl_table=11
atggcacttgagaccaagccggcccaagatccggcaaccgagatcaagcacgagctcgatcccaagcgcaaggcggcgctggacactgctttggcgcaggtcgaaaaaagcttcggcaagggctcggccatgcgcctcggcgatcagcccgtgcaaaatgtcgaagtaatccctaccggttcgctcgcgctcgacatggcgttgggcattggcggcctgccgaagggccgcatcgtggaaatctatggtcccgaatcgtccggtaaaaccacgcttgccctgcatgtggtggccaatgcccagaagaagggtggcgtggccgcctacattgacgccgagcacgcgctcgatccggcctatgctcgcaaacttggcgtggacactgattcgcttatcgtttctcagccggacaacggcgaacaggctcttgagattgcggacatgctgattcgttccggtgcgcttgatgtcatcgttatcgattcggtggcggctctggtgccaaaggccgagatcgaaggcgagatgggagacagccacgtcggtttgcaggcccgactcatgagccaggctctgcgcaagatgaccggtgccttggcccaagcaggtaccaccgccatcttcatcaaccagctacgcgaaaagatcggcgtgttcttcggtaatcccgaaaccactaccggtggcaaggctctgaagttctatgcctccgtgcgtcttgacattcgccgtatccagaccttgaagaacggtgatgaagcggtgggcaaccgtacgcgcgtcaaggtggtcaagaacaagatggccccgcctttcaagtccgccgaattcgacatgctttacggcgaaggtatctcccgcgaaggttcggtcatcgacatggcccaacaggtcggcgtggtcaagaagtccggctcgtggttcacctatgagggcgaccagcttggtcagggtcgagagaaggttcgtcagttcctcaaggacaacccggccatcaccgaagagattgaaaacaaggtcaaggcagaatttggtttgatcggttccgccgatcagtttgccgaagacgaagacgctgctgcagctgccgcagtcagcgaggccgccgcggccgatgccgccaaggacaccaaggccactgcagcgcctgccgccaagtcgtctcgcgccaaggcctga

SEQ ID NO: 755 - protein, 392 aa, Bifidobacterium breve
MALETKPAQDPATEIKHELDPKRKAALDTALAQVEKSFGKGSAMRLGDQPVQNVEVIPTGSLALDMALGIGGLPKGRIVEIYGPESSGKTTLALHVVANAQKKGGVAAYIDAEHALDPAYARKLGVDTDSLIVSQPDNGEQALEIADMLIRSGALDVIVIDSVAALVPKAEIEGEMGDSHVGLQARLMSQALRKMTGALAQAGTTAIFINQLREKIGVFFGNPETTTGGKALKFYASVRLDIRRIQTLKNGDEAVGNRTRVKVVKNKMAPPFKSAEFDMLYGEGISREGSVIDMAQQVGVVKKSGSWFTYEGDQLGQGREKVRQFLKDNPAITEEIENKVKAEFGLIGSADQFAEDEDAAAAAAVSEAAAADAAKDTKATAAPAAKSSRAKA

SEQ ID NO: 756 - DNA, 1194 bp, Bifidobacterium longum
  CDS (1)..(1194): transl_table=11
atggcacttgagaccaagccggccaaggacccggcagccgaggacaagcacgagctcgatcccaagcgcaaggcggcgctggacaccgcgctggcgcaggtcgagaagagttttggcaaaggttccgcaatgcgactgggcgaccagcccgagcagaacgtcgaggtgattcccaccggttcgttggctctcgatatggcactcggcatcggcggcctacccaagggccgcatcgtggagatctacggccccgaatcatccggtaagaccacgctcgcattgcatgtggtggccaatgcccagaagaagggcggcgtggcggcctacatcgatgccgaacacgcgctcgacccggcctacgcccgcaagctcggcgtggacaccgactcactcatcgtctcccagccggataacggcgagcaggccctcgaaatcgctgacatgctgattcgctccggtgcgcttgacgtcatcgtcatcgactcggtcgccgctttggtgccgaaggccgaaatcgaaggcgaaatgggagacagccatgttggtttgcaggcccgactcatgagtcaggcgctgcgcaagatgaccggcgcgttggctcaggccggcaccaccgccatcttcatcaaccagctgcgtgagaagatcggcgtgttcttcggcaaccctgaaaccaccaccggtggtaaagctctgaagttctacgcctccgtgcgtctcgacatccgccgcatccagaccttgaagaacggcgacgaagcggtgggcaaccgcacgcgcgtcaaggtggtcaagaacaagatggccccgcctttcaagtccgccgaattcgacatgctctacggtgaaggcatttcccgtgagggctcggtgatcgacatggcccagcaggttggcgtggtcaagaagtccggttcgtggttcacctatgagggtgatcagctcggtcagggacgagagaaggtccgtcagttccttaaggacaacccggccatcaccgaggagattgagaacaaggtcaaggccgagttcggtctgatcggttccgccgatcagttcgcggaagatggcgaagccgcagcagcggccgccgtcagcgaggctgctgcggctgacgtggccaaggacagcaaggccgcagcggcgcctgctgccaaaacgacccgtgccaaggccggcacagctaaggcctga

SEQ ID NO: 757 - protein, 397 aa, Bifidobacterium longum
MALETKPAKDPAAEDKHELDPKRKAALDTALAQVEKSFGKGSAMRLGDQPEQNVEVIPTGSLALDMALGIGGLPKGRIVEIYGPESSGKTTLALHVVANAQKKGGVAAYIDAEHALDPAYARKLGVDTDSLIVSQPDNGEQALEIADMLIRSGALDVIVIDSVAALVPKAEIEGEMGDSHVGLQARLMSQALRKMTGALAQAGTTAIFINQLREKIGVFFGNPETTTGGKALKFYASVRLDIRRIQTLKNGDEAVGNRTRVKVVKNKMAPPFKSAEFDMLYGEGISREGSVIDMAQQVGVVKKSGSWFTYEGDQLGQGREKVRQFLKDNPAITEEIENKVKAEFGLIGSADQFAEDGEAAAAAAVSEAAAADVAKDSKAAAAPAAKTTRAKAGTAKA

SEQ ID NO: 758 - DNA, 1062 bp, Bordetella bronchiseptica
  CDS (1)..(1062): transl_table=11
atggacgacaaaaccagcaaggccgccgcggccgagaaagccaaggcgctggccgccgcgctgtcgcagatcgaaaagcagttcggcaagggctcgatcatgcgctatggcgacaacgaggtcgaacacgacatccaggtcgtgtccaccggttcgctggggctggacatcgcgctgggcgtcggcggcctgccgcgcggccgcgtgatcgaggtctacggccccgagtcgtccggcaagaccacgctcacgctgcaggtcatcgccgaaatgcagaagctgggcggcacctgcgccttcgtcgacgccgaacacgcgctggacgtgcaatacgcctccaagctgggcgtcaacctgaccgacctgctgatctcccagccggacacgggcgagcaggccctcgagatcaccgacgcgctggtgcgctcgggctcggtcgacctgatcgtcatcgactcggtcgcggcgctggtgcccaaggccgaaatcgaaggcgagatgggcgactccctgccaggcctgcaggcccgcctgatgagccaggcgctgcgcaagctgacggccaccatcaagcgcaccaactgcatggtcatcttcatcaaccagatccgcatgaagatcggcgtgatgttcggcaaccccgaaaccaccaccggcggcaacgcgctcaagttctattcctcggtgcgcctggacatccgccgcatcggcgccatcaagaagggcgacgaggtggtcggcaacgaaacccgcgtcaaggtggtcaagaacaaggtggcgccgccgttcaagcaggccgagttcgacatcatgtatggcagcggcatctcgcgcgaaggcgaaatcatcgacctgggcgtgcaagccaatgtggtcgacaagtccggcgcctggtacagctacagcggcaaccgcatcggccagggcaaggacaatgtgcgcgagtacctgaaagagcacaaggaaatggccatcgagatcgaaaacaaggtgcgcgagaaccagggcatagtcagccgcgccgccacctttccggccagcgaagccgaagacggcgaataa

SEQ ID NO: 759 - protein, 353 aa, Bordetella bronchiseptica
MDDKTSKAAAAEKAKALAAALSQIEKQFGKGSIMRYGDNEVEHDIQVVSTGSLGLDIALGVGGLPRGRVIEVYGPESSGKTTLTLQVIAEMQKLGGTCAFVDAEHALDVQYASKLGVNLTDLLISQPDTGEQALEITDALVRSGSVDLIVIDSVAALVPKAEIEGEMGDSLPGLQARLMSQALRKLTATIKRTNCMVIFINQIRMKIGVMFGNPETTTGGNALKFYSSVRLDIRRIGAIKKGDEVVGNETRVKVVKNKVAPPFKQAEFDIMYGSGISREGEIIDLGVQANVVDKSGAWYSYSGNRIGQGKDNVREYLKEHKEMAIEIENKVRENQGIVSRAATFPASEAEDGE

SEQ ID NO: 760 - DNA, 1089 bp, Bradyrhizobium japonicum
  CDS (1)..(1089): transl_table=11
atgtccgcaactgccctgcgtatcgtcgaaggatcttccatggacaagagtaaagctctggccgccgcgctctcccagatcgagcgccagttcggcaagggctcggtgatgaagctcggcaagaacgaccggtcgatggatgtcgaggcggtgtcctccggttctctcgggctcgacattgcactggggatcggcggtctgcccaaggggcgcgtcgtggaaatctacgggccggaatcctcgggcaagaccacgctggcgctgcacacggtggcggaagcgcagaagaagggcggcatctgtgccttcatcgacgccgagcacgcgctcgacccggtctatgcacgcaagctcggggtcaatatcgacgagctgctgatttcgcagccggacaccggcgagcaggcgctggaaatctgcgacacgctggtgcgctcgggtgcggtggacgttctggtggtcgattcggtcgcggcgctggtgccgaaggccgaactcgagggcgagatgggcgatgcgctgccgggtctccaggcccgcctgatgagccaggcgctgcgcaagctgacggcctccatcaacaagtcccacaccatggtgatcttcatcaaccagatccgcatgaagatcggtgtgatgtatggctcaccggagaccaccaccggcggcaacgcgctgaagttctacgcctccgtccgcctcgacatccgccgcatcggcgcgatcaaggagcgcgacgaagtggtcggcaacaccacgcgcgtcaaggtggtgaagaacaagctggcgccgcccttcaagcaggtcgagttcgacatcatgtacggcgagggcgtttccaagatgggcgagatcctcgatctcggcgtcaaggccggcatcgtcgaaaagtccggcgcctggttctcctatgacagccagcgcctcggccagggccgcgagaactcgaaagcgttcctgaaggccaaccccgacatcaccgccaagatcgagaccgcgatccgccagaactccggcctgatcgccgagcagattctggccggcacccctgagcgcgacgccgacggcgaggagccggcggacgagtaa

SEQ ID NO: 761 - protein, 362 aa, Bradyrhizobium japonicum
MSATALRIVEGSSMDKSKALAAALSQIERQFGKGSVMKLGKNDRSMDVEAVSSGSLGLDIALGIGGLPKGRVVEIYGPESSGKTTLALHTVAEAQKKGGICAFIDAEHALDPVYARKLGVNIDELLISQPDTGEQALEICDTLVRSGAVDVLVVDSVAALVPKAELEGEMGDALPGLQARLMSQALRKLTASINKSHTMVIFINQIRMKIGVMYGSPETTTGGNALKFYASVRLDIRRIGAIKERDEVVGNTTRVKVVKNKLAPPFKQVEFDIMYGEGVSKMGEILDLGVKAGIVEKSGAWFSYDSQRLGQGRENSKAFLKANPDITAKIETAIRQNSGLIAEQILAGTPERDADGEEPADE

SEQ ID NO: 762 - DNA, 1086 bp, Brucella abortus
  CDS (1)..(1086): transl_table=11
atgtctcaaaattcattgcgacttgttgaggataattcagtggacaagacaaaagctctcgacgcggcattgtcgcaaatcgaacgggcgttcggcaaaggctcaatcatgcgtctgggccagaacgatcaggtggtcgaaatcgaaaccgtatcgaccggctcgctctcgctcgatattgccttgggggttggcggcttgcccaagggacgtatcgtggaaatctatgggccggaaagttccggtaaaaccacgcttgccttgcacaccatcgctgaagcgcagaagaagggcggcatctgcgcattcgtcgatgcggaacatgcgcttgacccggtctatgcgcgcaagctcggtgtcgatcttgaaaatcttctgatctcgcagcccgatacgggtgaacaggcgcttgaaatcaccgatacgctcgtgcgctctggcgccatcgacgttctcgttgtcgactcggtcgcagccctgacgccgcgtgctgaaatcgaaggtgaaatgggggattccctgccgggccttcaggcccgtctcatgagccaggcgctgcgcaagcttactggctccatttcccgttcaaactgcatggtgatcttcatcaaccagatccgcatgaagatcggtgtcatgttcggctcgccggaaacgacaacgggcggcaatgcgctcaagttctatgcttcggttcgcctcgatattcgccgtatcggctccatcaaggagcgcgacgaagtggtgggcaaccagacccgcgtgaaggtggtgaagaacaagctcgctcctccgttcaagcaggtcgaattcgatatcatgtatggcgcgggcgtttccaaggtgggcgagctggtcgatcttggtgtcaaggccggtgtggttgagaagtctggtgcctggttctcctataattcccagcgtctcgggcaggggcgcgagaacgccaagcaatatctcaaggataatccggaagtcgcgcgtgaaatcgaaaccacgcttcgccagaatgccggcctgatcgccgagcagttccttgacgatggcggaccggaagaagatgctgccggcgcggcggaaatgtaa

SEQ ID NO: 763 - protein, 361 aa, Brucella abortus
MSQNSLRLVEDNSVDKTKALDAALSQIERAFGKGSIMRLGQNDQVVEIETVSTGSLSLDIALGVGGLPKGRIVEIYGPESSGKTTLALHTIAEAQKKGGICAFVDAEHALDPVYARKLGVDLENLLISQPDTGEQALEITDTLVRSGAIDVLVVDSVAALTPRAEIEGEMGDSLPGLQARLMSQALRKLTGSISRSNCMVIFINQIRMKIGVMFGSPETTTGGNALKFYASVRLDIRRIGSIKERDEVVGNQTRVKVVKNKLAPPFKQVEFDIMYGAGVSKVGELVDLGVKAGVVEKSGAWFSYNSQRLGQGRENAKQYLKDNPEVAREIETTLRQNAGLIAEQFLDDGGPEEDAAGAAEM

SEQ ID NO: 764 - DNA, 1044 bp, Burkholderia cepacia
  CDS (1)..(1044): transl_table=11
atgaccgccgagaagagcaaggcgctggcggccgcgctcgcgcagatcgaaaagcagttcggcaagggctcgatcatgcggatgggcgacggcgaagcggccgaggatatccaggtcgtctccacggggtcgctgggtctcgacatcgcgctgggcgtcggcggcttgccgcgcggccgggtggtcgagatctacggtccggaatcgtccggtaagaccacgctcacgctgcaggtcatcgccgagctgcagaaactgggcggcaccgcggcgttcatcgacgccgagcacgcgctcgacgttcaatatgccgcgaagctcggcgtgaacgtgccggagctgctgatctcgcagccggacaccggcgagcaggccctcgaaatcaccgatgcgctggtgcgctcgggctcgatcgacatgatcgtcatcgactcggtcgcggcgctcgtgccgaaggccgaaatcgaaggcgagatgggcgattcgctgccgggtctgcaggcccgcctgatgtcgcaggcgctgcgcaagctgaccggcacgatcaagcgcacgaactgcctcgtgatcttcatcaaccagatccggatgaagatcggcgtgatgttcggcaacccggaaaccacgacgggcggtaacgcactgaagttctactcgtcggtgcgtctcgatatccgccggatcggctcgatcaagaagaacgacgaggtgatcggcaacgaaacccgcgtgaaggtcgtcaagaacaaggtgtcgccgccgttccgcgaagcgatcttcgacatcctgtacggcgaaggcatttcgcgtcagggcgagatcatcgatctcggcgtgcaggcgaagatcgtcgacaaggcgggcgcctggtacagctacaacggcgagaagatcggccagggcaaggacaacgcgcgtgaattcctgcgcgaaaatccggaaatcgcgcgcgagatcgagaaccgcatccgcgaatcgctcggcgtcgtcgcaatgcccgatggcgcaggcaacgaagccgaggcgatggacgaagaagagtga

SEQ ID NO: 765 - protein, 347 aa, Burkholderia cepacia
MTAEKSKALAAALAQIEKQFGKGSIMRMGDGEAAEDIQVVSTGSLGLDIALGVGGLPRGRVVEIYGPESSGKTTLTLQVIAELQKLGGTAAFIDAEHALDVQYAAKLGVNVPELLISQPDTGEQALEITDALVRSGSIDMIVIDSVAALVPKAEIEGEMGDSLPGLQARLMSQALRKLTGTIKRTNCLVIFINQIRMKIGVMFGNPETTTGGNALKFYSSVRLDIRRIGSIKKNDEVIGNETRVKVVKNKVSPPFREAIFDILYGEGISRQGEIIDLGVQAKIVDKAGAWYSYNGEKIGQGKDNAREFLRENPEIAREIENRIRESLGVVAMPDGAGNEAEAMDEEE

SEQ ID NO: 766 - DNA, 1071 bp, Burkholderia mallei
  CDS (1)..(1071): transl_table=11
atggaagaaagcaagaaaggctccgggctgactgccgaaaagagcaaggcgctcgccgccgcgctcgcgcagatcgagaagcagttcggcaaagggtcgatcatgcggctcggcgacggcgaggcggtcgaggatatccaggtggtgtccacgggctcgctcggtctcgatatcgcgctcggcgtcggtggcttgccgcgcggccgtgtggtcgaaatctacgggccggaatcgtccggcaagacgacgctcacgctgcaggtgatcgccgagatgcagaagctcggcggcacggcggcgttcatcgacgcggagcacgcgctcgacgtccagtatgcgtcgaagctcggcgtgaacgtgccggagctgctgatctcgcagccggacacgggtgagcaggcgctcgaaatcgtcgacgcgctggtccgctcgggctcgatcgacatgatcgtcatcgactcggtcgcggcgctcgtgccgaaggccgaaatcgaaggcgagatgggcgacgcgctgcccggcctgcaggcccgcctgatgtcgcaggcgctgcgcaagctgacgggcacgatcaagcgcacgaactgcctcgtgatcttcatcaaccagatccggatgaagatcggcgtgatgttcggcaacccggaaaccacgacgggcggcaacgcgctgaagttctactcgtcagtgcgtctcgacattcgccggatcggctcgatcaagaagaacgacgaggtgatcggcaacgaaacgcgcgtgaaggtcgtcaagaacaaggtgtcgccgccgttccgcgaagcgatcttcgacatcctgtacggcgaaggcatttcgcgccagggcgagatcatcgatctcggcgtgcaggcgaagatcgtcgacaaggcgggcgcgtggtacagctatagcggcgagaagatcggccagggcaaggacaacgcgcgcgaattcctgcgcgaaaatccggaaatcgcgcgcgagatcgagaatcgcattcgcgagtcgctcggagtcgccgcgatgccgcagggcgccggttccgaggccgagatcatggacgaagaggagtaa

SEQ ID NO: 767 - protein, 356 aa, Burkholderia mallei
MEESKKGSGLTAEKSKALAAALAQIEKQFGKGSIMRLGDGEAVEDIQVVSTGSLGLDIALGVGGLPRGRVVEIYGPESSGKTTLTLQVIAEMQKLGGTAAFIDAEHALDVQYASKLGVNVPELLISQPDTGEQALEIVDALVRSGSIDMIVIDSVAALVPKAEIEGEMGDALPGLQARLMSQALRKLTGTIKRTNCLVIFINQIRMKIGVMFGNPETTTGGNALKFYSSVRLDIRRIGSIKKNDEVIGNETRVKVVKNKVSPPFREAIFDILYGEGISRQGEIIDLGVQAKIVDKAGAWYSYSGEKIGQGKDNAREFLRENPEIAREIENRIRESLGVAAMPQGAGSEAEIMDEEE

SEQ ID NO: 768 - DNA, 1071 bp, Caulobacter crescentus
  CDS (1)..(1071): transl_table=11
atgacaagtcaggcggctttgaaactcgtggccaaggaagaaggcgataagcaacgcgcgctagaggcggctctcgcccagatcgaccgcgcgttcggcaagggctcggtgatgaagctgggcgagaagggcaaggtcgagatcgagtcggtctccaccgggtcgctcggcctcgacatcgcgctgggcatcggcggcctgcccaagggccggatcgtcgaggtctatggtccggaaagctcgggcaagaccaccctggccctgcacgtcgtggccgaggtccagaaggccggcggcaccgccgccttcgtcgacgccgagcatgcgctcgatccgtcctacgcctacaagctgggcgtcaatctcgataatctcctggtctctcagcccgacaacggcgaacaggccctggagatcaccgacaccctggtgcgctcgggcgccgtcgacatcgtggtcgtcgactcggtggcggccctgacgcccaaggccgaaatcgaaggcgagatgggcgacagcctgccgggtcttcaggcccgtctgatgagccaggcgctgcgcaagctgacggcctcgatcaacaaggccaacaccatcgtcatcttcatcaaccagatccgtcacaagatcggggtgatgtacggcagccccgaaacgaccacgggcggcaacgcgctgaagttctacgcttcagtgcgcctggatatccgccgcaccggctcggtgaaggcgcgtgacgagatcgtcggcaacaatgtccgcgtgaaggtggtcaagaacaaggtggccccgccgttccgcgaggtcgagttcgacatcatgtacggcgagggcatctccaagctgggcgaagtcatcgacctaggcgtcaaagccgggatcatcgacaaggccggctcgtggttctcgtacggcagccagcggatcggccagggccgcgacaatgtccgcgagttcctgaagaacaacccggacgtcgccgccgacatcgaaaaggctgtccgcaagtcgtcgcagaagatcgaagaagagcttctggtcggcggcccggaagagggcgaagaggactag

SEQ ID NO: 769 - protein, 356 aa, Caulobacter crescentus
MTSQAALKLVAKEEGDKQRALEAALAQIDRAFGKGSVMKLGEKGKVEIESVSTGSLGLDIALGIGGLPKGRIVEVYGPESSGKTTLALHVVAEVQKAGGTAAFVDAEHALDPSYAYKLGVNLDNLLVSQPDNGEQALEITDTLVRSGAVDIVVVDSVAALTPKAEIEGEMGDSLPGLQARLMSQALRKLTASINKANTIVIFINQIRHKIGVMYGSPETTTGGNALKFYASVRLDIRRTGSVKARDEIVGNNVRVKVVKNKVAPPFREVEFDIMYGEGISKLGEVIDLGVKAGIIDKAGSWFSYGSQRIGQGRDNVREFLKNNPDVAADIEKAVRKSSQKIEEELLVGGPEEGEED

SEQ ID NO: 770 - DNA, 1044 bp, Chromatium vinosum
  CDS (1)..(1044): transl_table=11
atggacgagaaccgaaagaaggcgttggccgccgcgttgacccagatcgaaaagcagttcggcaaaggctcggtcatgcgcatgggcgatgtcggcgccgtgcgcaacatcgaggcgatctcgaccggttcgctcgggctggatctggcgctcggcatcggcggcgtgcccaagggccgtgtcatcgagatctacggccccgagtcctcgggcaagaccacgctgacgctgcatatcatcgccgaatcgcagaaactcggcggcacagccgctttcgtcgatgccgagcacgcgctcgatccggtctatgccgaaaagctcggcgtgaacatgaccgatctgctggtctcccagcccgataccggcgagcaggcgctggagatcaccgacatgctggtgcgttccggtgcggtcgatgtcgtggtcgtcgattcggttgccgcgctcacgcccaaggctgagatcgagggcgagatgggcgactcgcacgtcggcctgcaagcgcgcctcatgtcccaggcgttgcgcaagctcaccggcaacatcaagcgctccaactgctgcgtcatcttcatcaaccagatccggatgaagatcggggtgatgttcggctcgccggagaccacgaccggcggcaatgcgctcaaattctatgcctcggtgcggctcgacatccgtcgtaccggggctatcaagaaaggcgatgaggtcatcggcaacgagaccaaggtcaaggtggtcaagaacaaggtcgcaccgcccttccggcaggccgagttcgacatcctatatggccagggcatctcgcgcgagggcgagatcatcgatctgggcgtggccgagggcttcatcgacaagtccggcgcctggtacagctatgacggcaaccgcatcgggcagggcaaggacaacgttcgcaactttctgtgcgaaaatcccgggatcgcccaggccatcgaagcgcgcatccgcgacaagctgctgcccaagggtggcgtcgaggcgcccgccgaggccgatgtacccgagccgtcggaggattga

SEQ ID NO: 771 - protein, 347 aa, Chromatium vinosum
MDENRKKALAAALTQIEKQFGKGSVMRMGDVGAVRNIEAISTGSLGLDLALGIGGVPKGRVIEIYGPESSGKTTLTLHIIAESQKLGGTAAFVDAEHALDPVYAEKLGVNMTDLLVSQPDTGEQALEITDMLVRSGAVDVVVVDSVAALTPKAEIEGEMGDSHVGLQARLMSQALRKLTGNIKRSNCCVIFINQIRMKIGVMFGSPETTTGGNALKFYASVRLDIRRTGAIKKGDEVIGNETKVKVVKNKVAPPFRQAEFDILYGQGISREGEIIDLGVAEGFIDKSGAWYSYDGNRIGQGKDNVRNFLCENPGIAQAIEARIRDKLLPKGGVEAPAEADVPEPSED

SEQ ID NO: 772 - DNA, 1053 bp, Chromobacterium violaceum
  CDS (1)..(1053): transl_table=11
atggcttccgaagacaagagcaaggcgctggccgctgccctggcccagattgaaaagcaatttggcaagggctcgatcatgcgcatgagcgacaaccagatcaccgaaaacctgcaagtgatctccaccggctcgctgaccctggacctggcgctgggcgtcggcggcctgccgcgcggccgcgtggtcgaaatctacggcccggagtcgtcgggtaaaaccaccttgtgtctgcaggccgtggccgaggcgcaaaaactgggcggcacctgcgcctacatcgacgccgaaaacgcgctggacccggtttacgcgcagaagctgggcgtcaacgtcgaagacctgctgatctcgcagccggacaccggcgagcaggcgctggaaatctgcgacatgctggttcgctccagcggcgtggacgtgatcgtggtcgactccgtcgccgcgctggtgcccaaggctgaaatcgagggcgagatgggcgacagccacgtcggcctgcaggcccgcctgatgagccaggcgctgcgcaagctgaccggcaacatcaagcgcaccaacaccctggtgatcttcatcaaccagatccgcatgaagatcggcgtgatgttcggcaacccggaaaccaccaccggcggcaacgcgctgaagttctacgcctccgtgcgcctggacatccgccgcaccggcggcatcaagaagggcgacgaagtgatcggcaacgacactcgcgtcaaagtggtgaagaacaaggtgtccccgccgttccgccaggccgatttcgaaatcctgtacggcgagggcatctcgcgccagggcgaaatcatcgagctgggcgtcaagcacggcttcatcgacaagtccggcgcctggtacgcgtacaacggccagaagatcggccagggcaaggacaacacccgcgaatggctgaaagccaacccggccatcgccgacgagatcgagcgcaagatccgcgaagcggtgggcgtgaagatcgaaatcaacgaaaaccagggcgacgaagagttcgccgacgacgccttcgacgcctga

SEQ ID NO: 773 - protein, 350 aa, Chromobacterium violaceum
MASEDKSKALAAALAQIEKQFGKGSIMRMSDNQITENLQVISTGSLTLDLALGVGGLPRGRVVEIYGPESSGKTTLCLQAVAEAQKLGGTCAYIDAENALDPVYAQKLGVNVEDLLISQPDTGEQALEICDMLVRSSGVDVIVVDSVAALVPKAEIEGEMGDSHVGLQARLMSQALRKLTGNIKRTNTLVIFINQIRMKIGVMFGNPETTTGGNALKFYASVRLDIRRTGGIKKGDEVIGNDTRVKVVKNKVSPPFRQADFEILYGEGISRQGEIIELGVKHGFIDKSGAWYAYNGQKIGQGKDNTREWLKANPAIADEIERKIREAVGVKIEINENQGDEEFADDAFDA

SEQ ID NO: 774 - DNA, 1050 bp, Clostridium acetobutylicum
  CDS (1)..(1050): transl_table=11
atggataatgaaaaattaaaagccattgatgcggctatgagtcagatagagaaacaatttggaaaaggcgctataatgaaacttggtgagcaagacatcttaaatattgatgcaatttcaacaggatgtttatctttagatatagcacttggaataggtggagttccacgtggaagagtagttgagatatatggacctgaatcatcaggtaaaactacagttgcacttcatatattagctgaagcccaaaagaagggtggagctgctgcatttattgatgccgagcatgctttagatcctcaatatgcaagagctttaggagtagatatagataacttagttgtatctcaaccagatactggtgagcaggcacttgaaattgctgaagcacttgttaggtcaggtgcaattgatgtaattgttgtagattctgtagcagcacttgtaccaaaagctgaaattgaaggtgaaatgggagattctcatgtaggtcttcaggcaagacttatgtcacaagctcttagaaaattaacaggttctataaacaagtctaaatgtatagctatatttataaaccaacttagagaaaaagttggaataatgtttggaaatcctgaaactactcctggaggaagagctcttaagttttatgcttctgtaagaatggatataagaaaaatagacactataaaacagggcgaagaaatgattggaaatagagtaagagtaaaggtagttaaaaataaagtggctcctccatttaaacaagcagaatttgatattatgtataatgaaggtatatctcgtgaaggaaatatagttgatgtaggagttaaagaaaatatcatccaaaaaagtggtgcatggttctcatatggtgatataagacttggtcagggaagagaaaatgctaaattattctttaaagaaaatatagatattagatctgaagttgaaaataaaataagagaaaagtacgatttacctatacaaaaagttaaaaatgaaaagccaaagattgaaaaaggaactgaaaataatacaaaataa

SEQ ID NO: 775 - protein, 349 aa, Clostridium acetobutylicum
MDNEKLKAIDAAMSQIEKQFGKGAIMKLGEQDILNIDAISTGCLSLDIALGIGGVPRGRVVEIYGPESSGKTTVALHILAEAQKKGGAAAFIDAEHALDPQYARALGVDIDNLVVSQPDTGEQALEIAEALVRSGAIDVIVVDSVAALVPKAEIEGEMGDSHVGLQARLMSQALRKLTGSINKSKCIAIFINQLREKVGIMFGNPETTPGGRALKFYASVRMDIRKIDTIKQGEEMIGNRVRVKVVKNKVAPPFKQAEFDIMYNEGISREGNIVDVGVKENIIQKSGAWFSYGDIRLGQGRENAKLFFKENIDIRSEVENKIREKYDLPIQKVKNEKPKIEKGTENNTK

SEQ ID NO: 776 - DNA, 1131 bp, Corynebacterium glutamicum
  CDS (1)..(1131): transl_table=11
atggctcccaagaagacagcaacaaaggcaactgccgccaaggggaatgatcgtcagaaggcacttgatgccgcactagccctgattgagaaggatttcggtaaaggcgctgtcatgcgtctgggtgatgagaatcgtccgccaatccagaccatctcatctggtaacaccgcgattgatattgccttgggtatcggtggattcccacgtggtcgaatcgttgaggtgtatggcccagaatcatcaggtaaaaccaccgttgcactgcacgcaattgcgcaggcacaaaaggccggcggcatcgctgcattcattgacgccgagcacgcgttggatccagattatgctcgcaagcttggtgtagatactgatgcgcttctggtttcgcagccagacactggtgagcaagcactagaaatcgccgacatgctggttcgttccggcgcaatcgacatcatcgtgattgactcggtggctgcgctgacaccaaaggctgaaattgaaggcgaaatgggcgatagccacgttggtcttcaggcccgcctcatgagccaggcgcttcgtaagatgacaggtgcgctgtacaactcgggtaccaccgcgatcttcattaaccagctgcgtgaaaagatcggtgtgatgttcggttccccagaaaccaccaccggtggtaaggccctgaagttctacgcatctgttcgttgtgacattcgacgaatccagactctgaaggacggacaggatgccattggtaaccgcacccgcttgaaggtcgttaagaacaaggtctccccaccgttcaagatcgctgaattcgacatcatgtacggcgaaggcatctcccgtgaatcctccgtcattgacttggcagtggacaacggcattgtgaagaagtcaggttcctggttcacctacgagggcgaacagcttggtcaaggtaaggaaaaggtgcgtctttccctcaaggagaaccctgaactcaccgatgagctggaagataagatcttcaagaagctgggagtaggcaagtacgctgcagcctcagatgaactcaccgacgatccagtagagctcgtgcctaacgttgacttcgatgatgaagccgacaccgaagcagacgctgaagactaa

SEQ ID NO: 777 - protein, 376 aa, Corynebacterium glutamicum
MAPKKTATKATAAKGNDRQKALDAALALIEKDFGKGAVMRLGDENRPPIQTISSGNTAIDIALGIGGFPRGRIVEVYGPESSGKTTVALHAIAQAQKAGGIAAFIDAEHALDPDYARKLGVDTDALLVSQPDTGEQALEIADMLVRSGAIDIIVIDSVAALTPKAEIEGEMGDSHVGLQARLMSQALRKMTGALYNSGTTAIFINQLREKIGVMFGSPETTTGGKALKFYASVRCDIRRIQTLKDGQDAIGNRTRLKVVKNKVSPPFKIAEFDIMYGEGISRESSVIDLAVDNGIVKKSGSWFTYEGEQLGQGKEKVRLSLKENPELTDELEDKIFKKLGVGKYAAASDELTDDPVELVPNVDFDDEADTEADAED

SEQ ID NO: 778 - DNA, 1110 bp, Corynebacterium pseudotuberculosis
  CDS (1)..(1110): transl_table=11
atggcagctaagaaaaattcgaagtctcagccggcaacaggggacaatcggcaaaaggcgctcgacgcagccttagctatgatcgagaaagactttggcaaaggcgcagtaatgcgccttggtgatgataaccgccctccgattagtgctatttcttccgggaacactgcaatcgatgttgctcttggtattggaggctttcccaaggggcgcattgtagaggtgtatggacctgagtcttcaggtaaaacaaccgtggcgctgcatgctatagctcaagcgcagcgtgctggaggaattgctgcttttatcgatgcggaacacgcattagatccggattatgcacgtaaacttggcgtagacacagatgcacttttggtgtctcaaccggatacaggtgagcaagctctggagattgcagatatgcttgttcgctctggagctatagatattattgtcatcgactctgtggccgcacttacccctaaagcagaaatcgaaggggaaatgggggatagccacgttggtttgcaagcgcgtttgatgagtcaggcgctgcgtaagatgaccggtgctctttataactcgggaaccaccgctatctttattaatcagctgcgcgaaaagattggcgtgatgtttggctcgcctgagacgactacgggtggcaaagcgcttaagttctatgcttcagttcgttgtgatgttcggcgtatccaaacgctaaaggacgggcaggatgccatcggtaacaggacgcggttaaaggtagtaaagaataaggtctcgcctccatttaaaatcgcggaatttgacatcatgtatggggaaggtatctctagagaatcctccattatcgatttgggtgtagataatgggatcatcaaaaaatcaggctcgtggtttacctatgatggtgatcagcttggtcagggcaaagaaaaagttcgtctgtatttaaagcagactcctgagcttgcggatgaaattgaagagaagatcttccgggcattgcagatcggaaagtacgctaaccagaacgacgcacttactgatgatccagtagacatggttcctaatatcgattttgatgatgaggacaatggataa

SEQ ID NO: 779 - protein, 369 aa, Corynebacterium pseudotuberculosis
MAAKKNSKSQPATGDNRQKALDAALAMIEKDFGKGAVMRLGDDNRPPISAISSGNTAIDVALGIGGFPKGRIVEVYGPESSGKTTVALHAIAQAQRAGGIAAFIDAEHALDPDYARKLGVDTDALLVSQPDTGEQALEIADMLVRSGAIDIIVIDSVAALTPKAEIEGEMGDSHVGLQARLMSQALRKMTGALYNSGTTAIFINQLREKIGVMFGSPETTTGGKALKFYASVRCDVRRIQTLKDGQDAIGNRTRLKVVKNKVSPPFKIAEFDIMYGEGISRESSIIDLGVDNGIIKKSGSWFTYDGDQLGQGKEKVRLYLKQTPELADEIEEKIFRALQIGKYANQNDALTDDPVDMVPNIDFDDEDNG

SEQ ID NO: 780 - DNA, 1032 bp, Coxiella burnetii
  CDS (1)..(1032): transl_table=11
atggataatcgtagtaatgcgctgaatgctgctttgtcgcaaattgaacgtcagttcggtaaaggttcggtcatgcgtttgggtgatcccggactcataccggacatcgatgtcatttcaacaggctccttgggtcttgatatcgctttgggtgtgggtggattaccccgcggtcggatcattgaaatttacgggccggaagcttccggaaaaaccacgctagccttacaaacgatcgcttcttgtcagcgtatgggcggtacggctgcttttgtggatgcggaacatgcgttggatgccatttatgcgggcaaattaggcgttaaagtagaggacttgttggtatcccagccggatacaggggaacaagctttagaaattacagacatgttggttcgctcgggcgctgttgatctgatcgtgatcgactccgttgccgccctgacgccaaaagccgaaattgaaggtgatatgggcgattctcatatgggtttgcaagcgcgtttaatgtcacaagcgctgcgcaagctcacggcaaacattaagaaatccaataccttagtgatatttattaatcaaatacgtatgaaaatcggcgttatgtttggtaatccggaaacgaccaccggagggaacgcgcttaagttttattcgtcagtacgcttggatattcgccgcatcggagcgatcaaaaagggcgaagagattttaggcagtgaaactcgagtaaaggtagttaaaaacaaggtggcgccgcctttccgtcaagtcgagtttgatattctttacggtcttggtatttcgcgtgaaagtgagttaattgacctcggtgttaaaaatgaactggtcgaaaaagcaggcgcttggtacagttacaatggcgagcgtatcggccaagggaaagaaaacgttcgacaatttttccttgaaaatccaaaaattgcaggggaaattgaaacacgtttgcgtgaaaaactgttgccgcatcggcaaggcgagaaaatcgctgaagaagtcaatgcagcagaatga

SEQ ID NO: 781 - protein, 343 aa, Coxiella burnetii
MDNRSNALNAALSQIERQFGKGSVMRLGDPGLIPDIDVISTGSLGLDIALGVGGLPRGRIIEIYGPEASGKTTLALQTIASCQRMGGTAAFVDAEHALDAIYAGKLGVKVEDLLVSQPDTGEQALEITDMLVRSGAVDLIVIDSVAALTPKAEIEGDMGDSHMGLQARLMSQALRKLTANIKKSNTLVIFINQIRMKIGVMFGNPETTTGGNALKFYSSVRLDIRRIGAIKKGEEILGSETRVKVVKNKVAPPFRQVEFDILYGLGISRESELIDLGVKNELVEKAGAWYSYNGERIGQGKENVRQFFLENPKIAGEIETRLREKLLPHRQGEKIAEEVNAAE

SEQ ID NO: 782 - DNA, 1068 bp, Desulfotalea psychrophila
  CDS (1)..(1068): transl_table=11
atggtaggtgcaacagcaaaagacaaagcaggcagcgttgagaatgcaatcagccagatccagaaacaatttggtaagggctccatcatgcgcctgggtgagcaggcactggaggcaatccctgtcatctccacgggcgctctcagcctcgacattgccctcggggtcggcggtctgcccaagggcagaatgacagagatatatggccccgaatcatcggggaaaaccaccctggccctccatgtagttgccgaggcacaaaaattaggtggaatagccgccttcatcgatgcagagcatgcccttgataccgcctacgcagaaaaactcggcgtaaatattgacaatctcctggtttctcaaccggatttcggtgagcaggccctggaaattgcagagatactcattagatcaggcggggttgacatcatcgtcgtcgactccgttgccgcccttactcccaaggctgaaatagacggtaatgttggagatgtccacgttggccttcaggctcgccttatgtcgcaggccatgcggaaatttgccggggtcctcaaccggagcaacaccgttttaatttttatcaatcaaatccgaatgaaaatcggagtgatgtttggtagtcctgaaaccacaacaggcggcaacgccctcaaattttactgttcagagcgtcttgatattcgccggataggtgccattaaagacggacaggaaattaccggtaaccgaaccagggtaaaggtcgtcaaaaataaagttgccccaccctttaagattgctgagtttgacattatctacggcgaaggcatatctaaaattggcgacatgtttgaccttgccgttggcctggatattattgacaaaagcggatcctggtattcctataaaaatgaacgtataggtcagggacgagagaattcaaaacaattccttatggacacacctgccatctgtcatgaaatagaggagaaggttcgatctgcctacggacttccggaccgggaagagaccaaaagagaggagacggcacagatacctgacacagagaaaacaaaggacgtatga

SEQ ID NO: 783 - protein, 355 aa, Desulfotalea psychrophila
MVGATAKDKAGSVENAISQIQKQFGKGSIMRLGEQALEAIPVISTGALSLDIALGVGGLPKGRMTEIYGPESSGKTTLALHVVAEAQKLGGIAAFIDAEHALDTAYAEKLGVNIDNLLVSQPDFGEQALEIAEILIRSGGVDIIVVDSVAALTPKAEIDGNVGDVHVGLQARLMSQAMRKFAGVLNRSNTVLIFINQIRMKIGVMFGSPETTTGGNALKFYCSERLDIRRIGAIKDGQEITGNRTRVKVVKNKVAPPFKIAEFDIIYGEGISKIGDMFDLAVGLDIIDKSGSWYSYKNERIGQGRENSKQFLMDTPAICHEIEEKVRSAYGLPDREETKREETAQIPDTEKTKDV

SEQ ID NO: 784 - DNA, 1065 bp, Enterobacter agglomerans
  CDS (1)..(1065): transl_table=11
atggctattgatgagaacaagcaaaaagcgttagctgcagcactgggccagattgaaaagcaattcggtaaaggctccatcatgcgtctgggtgaagatcgctctatggacgtcgaaacgatctctaccggctctttgtctttggatatcgcgttaggtgctggcggcttgccaatgggccgtatcgttgaaatttatggtccggaatcctccggtaaaaccacgctgactctgcaggttatcgctgctgcacagcgtgaaggcaaaacctgtgcgttcatcgatgcagaacacgcgctggaccctatctacgctaaaaaactgggcgtcgatatcgataacctgctgtgttctcagccagataccggtgaacaggctctggaaatctgtgatgcgctgacccgttcaggcgccgttgacgttatcatcgttgactccgttgccgcactgacgccaaaagctgaaatcgaaggcgaaattggtgactctcacatgggcctcgcagctcgtatgatgagccaggcgatgcgtaagcttgcgggtaacctgaaaaacgccaataccctgctgatcttcatcaaccagatccgtatgaaaatcggtgtgatgttcggtaacccggaaaccaccaccggcggtaacgccctgaaattctatgcctctgtacgtctggatatccgtcgtatcggcgctatcaaagaaggtgatgtggttgtcggtagtgaaacacgtgtgaaagtcgtgaagaacaaaatcgccgcaccatttaaacaagctgaattccagatcctgtacggcgaaggtatcaacatcaacggcgaactgatcgacctgggcgttaagcacaaactgatcgagaaagcgggtgcatggtacagttacaacggcgagaagattggtcagggtaaagcgaactcttgtaactacctcaaagaaaacccgaaagttgctgctgaactggacaaaaaactgcgtgatatgctgctgagcggcaccggtgaattgagcgttgcgactactgctgaagacgctgacgacaacatggaaaccagcgaagagttttaa

SEQ ID NO: 785 - protein, 354 aa, Enterobacter agglomerans
MAIDENKQKALAAALGQIEKQFGKGSIMRLGEDRSMDVETISTGSLSLDIALGAGGLPMGRIVEIYGPESSGKTTLTLQVIAAAQREGKTCAFIDAEHALDPIYAKKLGVDIDNLLCSQPDTGEQALEICDALTRSGAVDVIIVDSVAALTPKAEIEGEIGDSHMGLAARMMSQAMRKLAGNLKNANTLLIFINQIRMKIGVMFGNPETTTGGNALKFYASVRLDIRRIGAIKEGDVVVGSETRVKVVKNKIAAPFKQAEFQILYGEGININGELIDLGVKHKLIEKAGAWYSYNGEKIGQGKANSCNYLKENPKVAAELDKKLRDMLLSGTGELSVATTAEDADDNMETSEEF

SEQ ID NO: 786 - DNA, 1072 bp, Erwinia carotovora
  CDS (1)..(1029): transl_table=11
atggctattgatgaaaacaagcaaaaagcattggccgcagcacttggtcaaattgaaaagcaatttggtaaagggtctatcatgcgtctgggcgaagatcgttccatgaacgttgaaaccatctctacgggttctttatcattagacgttgctttaggtgctggtggtttaccacgcgggcgtattgttgaaatctatggcccagaatcttatggtaaaacaacattaacactacaagttatcgctgctgctcaacgtgaaggcaaaatttgtgcattcattgatgctgagcacgctttagaccctatctatgctcaaaaactaggcgtagatattgataacctgctctgttctcagcctgatactggtgaacaagccctagaaatttgtgatgcattatctcgttctggtgcagttgatgttatcgttgttgactccgttgcagctttaacaccaaaagcagaaattgaaggtgagattggtgattcacacgttggtttagctgctcgtatgatgagtcaagctatgcgtaagttagcgggtaacttgaaaaactccaacactctgcttattttcatcaaccaaattcgaatgaaaatcggtgttatgtttggtaatccagaaaccacaacaggtggtaatgcacttaaattctacgcatctgttcgtttagatattcgtcgtatcggctctgttaaaaacggtgatgaagttgttggtagtgaaacacgcgttaaagtggtgaaaaacaaaattgcagcaccatttaaacaagctgaattccaaattatgtatggtgaaggtatcaatacctttggcgaattgattgatttaggtgttaaacacaaattggtagagaaagctggtgcatggtacagctacaatggtgagaaaattggtcaaggtaaagccaatgcaacaacttatttaaaagaacaccctgaaatgtacaatgagttaaacactaaacttcgtgaaatgttattaaatcacgcaggtgaatttactagcgcacgtgatttttgctaatgatagtgatgacgccgcagatattgaagaaacagaaaaataa

SEQ ID NO: 787 - protein, 342 aa, Erwinia carotovora
MAIDENKQKALAAALGQIEKQFGKGSIMRLGEDRSMNVETISTGSLSLDVALGAGGLPRGRIVEIYGPESYGKTTLTLQVIAAAQREGKICAFIDAEHALDPIYAQKLGVDIDNLLCSQPDTGEQALEICDALSRSGAVDVIVVDSVAALTPKAEIEGEIGDSHVGLAARMMSQAMRKLAGNLKNSNTLLIFINQIRMKIGVMFGNPETTTGGNALKFYASVRLDIRRIGSVKNGDEVVGSETRVKVVKNKIAAPFKQAEFQIMYGEGINTFGELIDLGVKHKLVEKAGAWYSYNGEKIGQGKANATTYLKEHPEMYNELNTKLREMLLNHAGEFTSARDFC

SEQ ID NO: 788 - DNA, 1080 bp, Francisella tularensis subsp
  CDS (1)..(1080): transl_table=11
atgagtaaagaaaaagcgctagaatcagccttatcacagattgaaaagcaatttggtaaaggcgctatcatgagattaggagatcaagaagctgctcatgatattgatgttataccttccggtattattgcacttgatgtggcactaggaataggaggctatccaaaaggtcgaattattgagatatatggtcatgaatcatcaggtaagacaacattgacacttttagctattgcacaatgccaaaagcaaggcggtactgcagcatttgttgatgctgagcatgcactagatccaaaatatgcaaagcttttaggtgttgatgttgataatctgatcgtgtcacagccggatacgggtgagcaagctttagagattgctgatatgttggtacgttctggaggagttgatattgtagtaattgactctgttgctgcacttacgccaaaggcagagattgagggtgacatgggcgactcgcacatgggcttacaagcaagattaatgtcacaagcactaagaaaactaacggcaaatatcaagcgctcaaatactctagtgatattcattaaccaaattcgtatgaagatcggggttatgtttggtaaccctgaaactacaactggtggtaatgcgcttaaattctattcatcggtaagacttgaagtcaaaaagggtggtagcatcaaagatggtattgatgttagtggtaatgaaataaaagttaaggttgtcaaaaacaaagttgccccaccttttaaacaagctgactttgagcttatttatggcgagggtatttcgcttgaggctgagcttattgatttgggcgctaagtataacattattgagaagtctggtgcttggtatagctataagggtaaaaagattggtcaaggcaaagagaagtcaaaagagtatttaaaagaaaatactgctgaacgtgatgagattgaaagagctattttagaactcttgctaccaaataaatattctaataaagatagtaatgatagtcctaaagaaggttctaaaatcaaaactaaagtaaatccagcagttactcaagatgagcttatctaa

SEQ ID NO: 789 - protein, 359 aa, Francisella tularensis subsp
MSKEKALESALSQIEKQFGKGAIMRLGDQEAAHDIDVIPSGIIALDVALGIGGYPKGRIIEIYGHESSGKTTLTLLAIAQCQKQGGTAAFVDAEHALDPKYAKLLGVDVDNLIVSQPDTGEQALEIADMLVRSGGVDIVVIDSVAALTPKAEIEGDMGDSHMGLQARLMSQALRKLTANIKRSNTLVIFINQIRMKIGVMFGNPETTTGGNALKFYSSVRLEVKKGGSIKDGIDVSGNEIKVKVVKNKVAPPFKQADFELIYGEGISLEAELIDLGAKYNIIEKSGAWYSYKGKKIGQGKEKSKEYLKENTAERDEIERAILELLLPNKYSNKDSNDSPKEGSKIKTKVNPAVTQDELI

SEQ ID NO: 790 - DNA, 1017 bp, Geobacter sulfurreducens
  CDS (1)..(1017): transl_table=11
gtgacccaagaacgcgaaaaggcgatagagcttgcgctcagccagatagaaaagcagttcggcaagggggcgatcatgcgcctcggggcggatgaggccctccccgatgtggccgccatccccaccggttccctctccctcgacctggccctcggcgtcggcggcgtcccccgcgggcggattatcgagatctacggacccgagtcgtcgggcaagacgacgctcgccctgcacatcgcggccgaggcccagaaaatgggcggcatcgctgccttcgtcgacgccgagcacgcgctcgatatcggctatgcccgcaaactcggcgtcaagacggacgacctgctcgtctcccagcccgacaccggggagcaagccttggaaattgccgagatgctcgtcagaagcggcgctgtggacgtcctcgtcatcgactcggtggcggcactggttcccaaggccgagatcgaaggggagatgggcgactcccacatggggctccaggcccggctcatgtctcaggccctgcgcaagctcaccggcataatctccaagtccaactgctgcgtcatcttcatcaaccagatccggatgaagatcggcgtcatgttcggcaaccccgaaaccaccaccggcggcaacgccctcaagttttacgcctcggtacgtctcgatatccgcaagatcgcatccctcaagcaagggcaggacgtcatcggctcccgcaccaaggtgaaggtggtcaagaacaaggtggctccccccttcaaagaggtggagttcgacatttactacggtgagggcatttcccgcgagggcgacatcctcgacctggccgtggagaaggggatcgtggacaagagcggcgcctggttctcctacggcggagaccggattggccaggggcgcgaaaattcccgccttttcctcaaggagcggccagaactggtgaacgagatcgaagggaaggtttacgacgtggccggcattccccgcaaaggggcgaaggaagcggcatag

SEQ ID NO: 791 - protein, 338 aa, Geobacter sulfurreducens
MTQEREKAIELALSQIEKQFGKGAIMRLGADEALPDVAAIPTGSLSLDLALGVGGVPRGRIIEIYGPESSGKTTLALHIAAEAQKMGGIAAFVDAEHALDIGYARKLGVKTDDLLVSQPDTGEQALEIAEMLVRSGAVDVLVIDSVAALVPKAEIEGEMGDSHMGLQARLMSQALRKLTGIISKSNCCVIFINQIRMKIGVMFGNPETTTGGNALKFYASVRLDIRKIASLKQGQDVIGSRTKVKVVKNKVAPPFKEVEFDIYYGEGISREGDILDLAVEKGIVDKSGAWFSYGGDRIGQGRENSRLFLKERPELVNEIEGKVYDVAGIPRKGAKEAA

SEQ ID NO: 792 - DNA, 1038 bp, Gluconobacter oxydans
  CDS (1)..(1038): transl_table=11
atggacaagaccaaggcgcttgaaggcgcactcagccagattgagcgtgccttcggcaaaggctcgatcatgcgcatgggccagcgcccgaaagtggaaaccaatgtgatttccaccgggtccatcgggctggacatcgcgctggggatcggcggcatgccccgcggccgtatcgtcgaaatctacggaccggaaagctccggcaagaccaccctcgcccttcacgttctggctgaagcccagaagaagggcgggaccgtggccttcatcgatgcggaacatgcactcgatccggggtatgcccgcaagcttggcgtcaacatcgacgatcttctcctgagccagccggatgccggcgaacaggcgctggaaattgccgacacgctggtccgttccggcgccgttgacgtgctggtcgtggactccgtggctgccctcgttccccgcgccgagcttgaaggcgacatgggcgacagccatgtcggcctgcatgcccgtctcatgagccaggccctccgcaagctcacgggaacggtctcgcgctccaacacgctcgtcatcttcctgaaccagatccgcatgaagatcggcgtgatgttcggcaatccggaaacgacaactggcggtaacgcgctgaagttctactcgtccatccgcctcgacatccgccgcatcgggtccatcaaggacaaagacgaggttgtcggcaaccagacgcgcgtcaaggtcgtgaagaacaagatggcgcctccgttccgtcaggtcgagttcgacatcatgtacggagaaggcatcagcaagatgggcgaactgctcgatctgggcgtgaagggcaacatcgtcgagaaatccggcgcctggttctccttcgacagccagcgcatcggacagggccgtgaaaacgccaagcagttcctgcgcgaacatccggaaatggcctccgaaatcgagcgtcgcatccgcgctgaagccggtgtcctctccgacgccctgatgacggatccggagcccgacgcagacggcaccccggaagactga

SEQ ID NO: 793 - protein, 345 aa, Gluconobacter oxydans
MDKTKALEGALSQIERAFGKGSIMRMGQRPKVETNVISTGSIGLDIALGIGGMPRGRIVEIYGPESSGKTTLALHVLAEAQKKGGTVAFIDAEHALDPGYARKLGVNIDDLLLSQPDAGEQALEIADTLVRSGAVDVLVVDSVAALVPRAELEGDMGDSHVGLHARLMSQALRKLTGTVSRSNTLVIFLNQIRMKIGVMFGNPETTTGGNALKFYSSIRLDIRRIGSIKDKDEVVGNQTRVKVVKNKMAPPFRQVEFDIMYGEGISKMGELLDLGVKGNIVEKSGAWFSFDSQRIGQGRENAKQFLREHPEMASEIERRIRAEAGVLSDALMTDPEPDADGTPED

SEQ ID NO: 794 - DNA, 1119 bp, Haemophilus ducreyi
  CDS (1)..(1119): transl_table=11
atggcagcggataaaaaagcccaaaagaatacagcaactaaacagattgatcccgaacaaaaagaaaaagcattagcagcagcactggctcaaattgaaaagcaatttggtaaaggatctattatgcgtttgggcgatacgcaagcacttgatattgaagcagtttccaccggttcaattggtttagatgctgcattaggtattggtggtttgccaatgggacgaattgtagaaatctacggccccgaatcatcagggaaaaccacgttaactttatctgtcattgctcaagcgcaaagaataggcaaaacttgtgcatttattgatgctgaacatgcgctggatcccgtttatgcacgtaaattaggcgtagatatcgatgccttacttatttcacaacctgataatggcgaacaagcgcttgaaatttgtgatgcattagtccgctcaggtgcggttgacgtcattattgttgactcagttgccgcattaacaccaaaagctgaaattgaaggcgatatgggtgattcgtatatgggcttacaagctcgtttaatgtcacaagcattacgaaaattaaccgctaatattaaagccactaattgcctagtcgttttcattaatcaaattcggatgaaaatcggcgtaatgtttggtaatccagaaacgacgacaggcggtaatgcacttaaattctatgcctctgtccgccttgatattcgtcgttcgggtgttgtaaaagatggtgatgaagtggttggcagtgaaaccaaagttaagatcgttaaaaataaagtagcaccgccattccgtgaagtacaatttgatattatgtacggagaaggcattgctcgaatgaatgaattacttattcttgctgaagcgaatggctttattcaaaaagcaggagcatggttctcatataatggtactaaaattggtcaaggcaaaaataatgcaattaaatggttgaaagaaaatcctgaagtggcagagaaaattgaacaagagattcgcaatttattaattttaacaccagatcagccagcttctgaaaaacttgagttagatgtaaatgacgaaagtgattttgatgaagcgtttgaggagcaagaataa

SEQ ID NO: 795 - protein, 372 aa, Haemophilus ducreyi
MAADKKAQKNTATKQIDPEQKEKALAAALAQIEKQFGKGSIMRLGDTQALDIEAVSTGSIGLDAALGIGGLPMGRIVEIYGPESSGKTTLTLSVIAQAQRIGKTCAFIDAEHALDPVYARKLGVDIDALLISQPDNGEQALEICDALVRSGAVDVIIVDSVAALTPKAEIEGDMGDSYMGLQARLMSQALRKLTANIKATNCLVVFINQIRMKIGVMFGNPETTTGGNALKFYASVRLDIRRSGVVKDGDEVVGSETKVKIVKNKVAPPFREVQFDIMYGEGIARMNELLILAEANGFIQKAGAWFSYNGTKIGQGKNNAIKWLKENPEVAEKIEQEIRNLLILTPDQPASEKLELDVNDESDFDEAFEEQE

SEQ ID NO: 796 - DNA, 1044 bp, Helicobacter pylori
  CDS (1)..(1044): transl_table=11
atggcaatagatgaagacaaacaaaaagcgatttctttagcgatcaaacaaattgataaggtttttggtaagggggcgttggtgcgccttggggataagcaagtagaaaagattgactctatttctacaggctcgttagggttggatctggctttagggattgggggcgttccaaagggtaggatcattgaaatttatgggccagagtcaagtgggaagaccactctaagcttgcatattattgcagaatgccaaaaaaatggcggcgtgtgcgcgttcattgacgctgagcatgccctagatgtgcattacgctaagagattgggcgtggatacggaaaatctactcgtttcccaacctgatacaggcgagcaagctttagagattttagaaacgatcaccagaagcggagggattgatttagtggtggtggattctgtggcggctcttacgcctaaagcggagattgatggggatatgggcgatcagcatgtgggcttgcaagcaaggcttatgagccatgcgttaagaaaaatcaccggtgtcttgcacaagatgaacactactctcatttttatcaatcaaatcaggatgaagattggcatgatgggttatgggagtccagagaccacaaccggaggtaacgccttaaaattctatgcgagcgttaggattgatattagaaggattgcctccctcaaacaaaacgaacagcatatcggtaatagggctaaagccaaagtggttaaaaataaagtcgctccgccttttagagaagcggaatttgacatcatgtttggggaagggatttctaaagagggcgaaatcattgattacggtgtgaaattagacattgtggataagagtggggcatggcttagctaccaggataaaaagctagggcaaggcagagaaaacgctaaagccttactgaaagaagacaaagccctagcggatgaaatcactcttaagattaaagagagtattggctctaatgaagagatcatgcccttaccggatgagcctttagaagaaatggaataa

SEQ ID NO: 797 - protein, 347 aa, Helicobacter pylori
MAIDEDKQKAISLAIKQIDKVFGKGALVRLGDKQVEKIDSISTGSLGLDLALGIGGVPKGRIIEIYGPESSGKTTLSLHIIAECQKNGGVCAFIDAEHALDVHYAKRLGVDTENLLVSQPDTGEQALEILETITRSGGIDLVVVDSVAALTPKAEIDGDMGDQHVGLQARLMSHALRKITGVLHKMNTTLIFINQIRMKIGMMGYGSPETTTGGNALKFYASVRIDIRRIASLKQNEQHIGNRAKAKVVKNKVAPPFREAEFDIMFGEGISKEGEIIDYGVKLDIVDKSGAWLSYQDKKLGQGRENAKALLKEDKALADEITLKIKESIGSNEEIMPLPDEPLEEME

SEQ ID NO: 798 - DNA, 1056 bp, Herbaspirillum seropedicae
  CDS (1)..(1056): transl_table=11
atggacgacaaaaaagctgcgaacaactctgagaagagcaaggcgctggccgccgcgttggcacagattgaaaagcagtttggcaagggctcggtgatgcgcatggaagatggcgtcatcgccgaggaaatccaggcggtctccactggctcactgggcctggacatcgccctgggcatcggcggcctcccgcgtggccgcgtcatcgagatctacggcccggaatcctcgggcaagaccaccctgaccctgcaatcgattgccgagatgcagaaactgggcggcacctgcgccttcatcgatgccgagcacgcactggacgtcacctatgcgcaaaagctgggtgtgaacctgaacgacctgctgatctcccagcccgacaccggcgaacaggccctggaaatctgcgacgccctggtacgttccggcgccgtggacctgatcgtggtcgactccgtggccgcactgacccccaaggctgaaatcgaaggcgacatgggcgactccctgcctggcctgcaagcccgcctgatgtcgcaggcgctgcgcaagctgaccggcagcatcaaccgtaccaataccacggtcatcttcatcaaccagatccgcatgaagatcggcgtcatgttcggcaaccccgaaaccaccaccggtggtaatgccctgaagttctacgcctccgtgcgcttggacatccgccgcaccggctcgatcaagtccggcgacgaagtcatcggcagcgagaccaaggtcaaggtcgtcaagaacaaggtcgctccgccgttccgcgaagcccactttgacatcctgtatggcgaaggcacctcgcgcgaaggcgagatcctggacctcggttccgagcacaaggtggtcgagaagtccggcgcctggtacagctacaacggcgagcgcatcggccagggcaaggacaatgcccgcaactacctgaaggaacatccggaactggcgcgcgagatcgaaaacaaggtccgcgtggccctgggtgtgccggaactggccggtggcgaagccgaagccgaagcgaaagcctcctga

SEQ ID NO: 799 - protein, 351 aa, Herbaspirillum seropedicae
MDDKKAANNSEKSKALAAALAQIEKQFGKGSVMRMEDGVIAEEIQAVSTGSLGLDIALGIGGLPRGRVIEIYGPESSGKTTLTLQSIAEMQKLGGTCAFIDAEHALDVTYAQKLGVNLNDLLISQPDTGEQALEICDALVRSGAVDLIVVDSVAALTPKAEIEGDMGDSLPGLQARLMSQALRKLTGSINRTNTTVIFINQIRMKIGVMFGNPETTTGGNALKFYASVRLDIRRTGSIKSGDEVIGSETKVKVVKNKVAPPFREAHFDILYGEGTSREGEILDLGSEHKVVEKSGAWYSYNGERIGQGKDNARNYLKEHPELAREIENKVRVALGVPELAGGEAEAEAKAS

SEQ ID NO: 800 - DNA, 1119 bp, Idiomarina loihiensis
  CDS (1)..(1119): transl_table=11
atgagcaatgatcgtcaaaaggcgttagatgcagcgctcggacaaatcgaacgtcaatttggtaaaggttctatcatgcgtctgggtgataaccagactctggatatcgattctgtttcaaccggttcgttagggctggatattgctcttggtattggtggcttgccttttgggcgggttgtagaaatttacggtcctgagtccagtggtaaaacgactatgactctggaagtgattgccgaagcgcaaaaaatgggtaagacctgtgccttcgtagatgctgagcacgcgttagaccctatttatgccgaagctttaggtgttaacgttgatgacttattaatatcgcaaccagataccggtgagcaggctttagaaatttgtgacatgctggttcgttccggcgcagtcgatattgtgattgttgactcggtagcagcgctgacaccaaaagcggaaattgaaggcgaaatgggcgatagccatgttggcttgcaggctcgtttaatgtcacaagccctgcgtaaattaacgtcgaacattaagaagtccaacaccatgtgtattttcatcaaccaaattcggatgaaaattggtgtgatgtttggtaaccctgaaactaccacgggtggtaacgccctgaagttttactcttctgttcgtctggatattcgccgtaccggtgcattgaaagaaggtgacgaagttgtgggtaacgaaacccgcgtgaaagtggttaaaaacaaggtggctcctccgtttaaagaagcgcacttccaaattttatacggcaaaggtatttctaaagaaggtgagcttattgacctgggtgttaagcacaaaatggttgataaagccggtgcctggtacagttataacggcgacaaaattggtcagggtaaagctaactcaatgaagtttttgcaggacaaccctaaaattgccgatgaattagaaggtcgtattcgcgaactgttgttgtcaaaaccagaaaagagaacaaaagaaattcgtgaagctgagcgcgctgctgcgaaagaagacgcgaaaagcgaagctaaagcagataagaaaacagaaaagaaaggtaatgagaaagatgatatcagtttgtcataa

SEQ ID NO: 801 - protein, 372 aa, Idiomarina loihiensis
MSNDRQKALDAALGQIERQFGKGSIMRLGDNQTLDIDSVSTGSLGLDIALGIGGLPFGRVVEIYGPESSGKTTMTLEVIAEAQKMGKTCAFVDAEHALDPIYAEALGVNVDDLLISQPDTGEQALEICDMLVRSGAVDIVIVDSVAALTPKAEIEGEMGDSHVGLQARLMSQALRKLTSNIKKSNTMCIFINQIRMKIGVMFGNPETTTGGNALKFYSSVRLDIRRTGALKEGDEVVGNETRVKVVKNKVAPPFKEAHFQILYGKGISKEGELIDLGVKHKMVDKAGAWYSYNGDKIGQGKANSMKFLQDNPKIADELEGRIRELLLSKPEKRTKEIREAERAAAKEDAKSEAKADKKTEKKGNEKDDISLS

SEQ ID NO: 802 - DNA, 1047 bp, Legionella pneumophila
  CDS (1)..(1047): transl_table=11
atggaagaaaataaacaaaaagcactatcagcggccgtttcgcaaattgaacgccaatttggcaaagggtctgtaatgcgtatgggagatagcacggtatcacgggatattgaagcaatctctacaggttcattaggtcttgatattgccttagggataggcggtttgccaaaaggccgtattgttgaaatttatggccctgagtcttctggtaaaaccacgctcactcttcaagtgatcgctgaatgtcaaaaaatgggtggtacagcagcatttatcgatgcggaacatgctctggatccaagctatgctcagaaacttggtgtgaaggtggatgagctgttggtttctcagccggatacaggcgagcaagctctggaaattactgatatgctggtgcgttctgcagcagttgatgtcgtaataattgactcggttgctgccttgactcccaaagcagaaattgagggagaaatgggcgattcccatgttggtttacaggcaagattgatgtcgcaagccctgcgtaaattgaccgctaacattaaacgttcgaacacactggttatttttattaatcaaatacgtatgaaaattggtgtgatgtttggtagccctgaaactactacagggggcaatgctttgaagttttatgcttcagttcgtttggatattcgccgtattggttcaattaaaaagggtgaagaaatattaggcagtgaaacccgagttaaagtagttaaaaataaggtagcgccaccgtttaaaatgactgagtttgatattttatataacgaaggtatatctcgtgagagtgaaattattaatctgggtgttcaattgaatttaattgagaaatcaggtgcctggtatagctacaaacaggaaaaaatcgggcagggcaaagaaaatgtcagattatatttgaaagaaaatccccaagtcgctgcagagcttgaacaacaaatccgtactgagctcttggaaaaaaagttatctgtgttggctagttcatcagaagatctttttgagactatagatgactaa

SEQ ID NO: 803 - protein, 348 aa, Legionella pneumophila
MEENKQKALSAAVSQIERQFGKGSVMRMGDSTVSRDIEAISTGSLGLDIALGIGGLPKGRIVEIYGPESSGKTTLTLQVIAECQKMGGTAAFIDAEHALDPSYAQKLGVKVDELLVSQPDTGEQALEITDMLVRSAAVDVVIIDSVAALTPKAEIEGEMGDSHVGLQARLMSQALRKLTANIKRSNTLVIFINQIRMKIGVMFGSPETTTGGNALKFYASVRLDIRRIGSIKKGEEILGSETRVKVVKNKVAPPFKMTEFDILYNEGISRESEIINLGVQLNLIEKSGAWYSYKQEKIGQGKENVRLYLKENPQVAAELEQQIRTELLEKKLSVLASSSEDLFETIDD

SEQ ID NO: 804 - DNA, 1164 bp, Leptospira biflexa
  CDS (1)..(1164): transl_table=11
atgaaaaaagagaaagctgacaaggctcaagaaaaagaaaccgaccaaagaaagcaggcaattgatgcagcgctcggccaaatcgaaaaacaattcggtaagggttccatcatgcgccttggtgccgatacacgtatggcagaaatgaacgttgtatccactggatctttggatttagacattgccttggggataggcgggtttccttccggtcgtatcgtagaaatctacggaccagaatcttctggtaaaacaacactcactctttctgcgattgcagaaacgcaaaaaaaaggaggcattgctgccttcattgatgcggaacatgctttagatccatcttatgctaaaaaattaggggtcaatgtagacgacctactggttgcccaaccagataatggggaagaggctctggaaatttgtgaatcactcgttcgttccaacgccatcgatctcatcgtcatcgactctgtagccgcacttgttcctaaggccgagatcgaaggagatatgggagattctcacatgggactccaagcgcgtctgatgtcccaagccctccgtaaactcacgggaaccatttcaaaatccaataccactgtcatcttcatcaaccaaatccgtatgaagattggggttatgtttggaagtcctgaaaccactactggtggaaacgcgttaaaattctatgcttccattcgattggacattcgtcgcatcgaaactctaaaagaaaaagaagaacctgttggtaaccgtgtgcgagtgaaagttgtaaaaaacaaatgcgctcctcctttccgacaagcagagtttgacatcatgtatgcgaacggaatcaacagagaaagttctctcattgatctagcggttcgccacgacctagttgcaaaagcaggttcttggtattcttacggtggagagaaaatcggacaaggaaaggaacaagtgaaaaacttttttctcgaaaatccagatatcgcatttaaaattgaaaaccaagttcgagatctcaatagcctcccactcatggaccaatccaaaatccaaaccagagaagtgaaatccattgaaagggaccctaaggaaactaaagaaacaaaatctaaacaacctgttagtttctctaccgaagcagaagtagatattgctgttggagaataa

SEQ ID NO: 805 - protein, 387 aa, Leptospira biflexa
MKKEKADKAQEKETDQRKQAIDAALGQIEKQFGKGSIMRLGADTRMAEMNVVSTGSLDLDIALGIGGFPSGRIVEIYGPESSGKTTLTLSAIAETQKKGGIAAFIDAEHALDPSYAKKLGVNVDDLLVAQPDNGEEALEICESLVRSNAIDLIVIDSVAALVPKAEIEGDMGDSHMGLQARLMSQALRKLTGTISKSNTTVIFINQIRMKIGVMFGSPETTTGGNALKFYASIRLDIRRIETLKEKEEPVGNRVRVKVVKNKCAPPFRQAEFDIMYANGINRESSLIDLAVRHDLVAKAGSWYSYGGEKIGQGKEQVKNFFLENPDIAFKIENQVRDLNSLPLMDQSKIQTREVKSIERDPKETKETKSKQPVSFSTEAEVDIAVGE

SEQ ID NO: 806 - DNA, 1101 bp, Leptospira interrogans serogroup Icterohaemorrhagiae serovar
  CDS (1)..(1101): transl_table=11
atgggagaaagtatcatgaagaaagcaaaagaagatgctccgagcgtagatgattctaaaaagttagcgatcgagcaagcaatgagccaaattgaaaaacaatttggaaagggttcgattatgaaattaggatcggattctgccaaacaaaccgttcaagtaattccttccggttctttggatttagacattgcactgggtataggtggttatccgatcggtagaattgtagaaatttacggacctgagtcttctggaaaaactactctcacactttctgcaattgcagaggctcagaaaagaggtggtgtggctgcgtttatagatgcagaacacgctttggatccatcttatgccaaaaaacttggggtcaatatagacgaacttttagtttctcaaccggataatggagaagaagcattagaaatctgtgaatctttagttcgaagtaatgcaattgatttaatcgtaattgattctgtggcggctttggttcccaaggctgaaatagaaggagatatgggagattcacacatgggtttacaagcaagactcatgtcccaggcgcttagaaaactaactggtaccattgcaaaatccaaaaccgtagtaatctttatcaatcaaattcgtatgaaaatcggtgttatgttcggttctcctgaaactacaactggcggaaatgctttgaaattctattgttcagttcgtttggatatccgtaaaatagaaacgatcaaagaaaaagaagaatctgtaggaaacagagtacgggtcaaagtagtcaaaaataagtgtgctcctccgtttaaacaggctgaatttgacataatctttaacgctgggattagcagagaaggttctctggttgacctaggtgtaaagcatgatattattcataaggccggagcttggtattcttacaatacggaaaaaattggccaaggtaaggaggccgctaaggaatacttgaaaaacaaccctgaaattgccttaaccatcgaaaatatggtcagagatctaaattctcttcctttgttagttcaggaaaataataaaaaatctcgtaaagaggaaaaattagaacaggccgcaggctaa

SEQ ID NO: 807 - protein, 366 aa, Leptospira interrogans serogroup Icterohaemorrhagiae serovar
MGESIMKKAKEDAPSVDDSKKLAIEQAMSQIEKQFGKGSIMKLGSDSAKQTVQVIPSGSLDLDIALGIGGYPIGRIVEIYGPESSGKTTLTLSAIAEAQKRGGVAAFIDAEHALDPSYAKKLGVNIDELLVSQPDNGEEALEICESLVRSNAIDLIVIDSVAALVPKAEIEGDMGDSHMGLQARLMSQALRKLTGTIAKSKTVVIFINQIRMKIGVMFGSPETTTGGNALKFYCSVRLDIRKIETIKEKEESVGNRVRVKVVKNKCAPPFKQAEFDIIFNAGISREGSLVDLGVKHDIIHKAGAWYSYNTEKIGQGKEAAKEYLKNNPEIALTIENMVRDLNSLPLLVQENNKKSRKEEKLEQAAG

SEQ ID NO: 808 - DNA, 1035 bp, Magnetospirillum magnetotacticum
  CDS (1)..(1035): transl_table=11
atggatagacagaaggctttggaagctgccgtcagccagatcgagcgggcattcggcaagggctccatcatgaagctgggcggcaaggatcaggtggtcgagaccgaagtggtctccacccggatcctgggccttgatgtggcgctcggcatcggcggcgttccgcgcggccgtatcatcgaggtctatggcccggaaagctcgggcaagaccaccctggcgctgcacatcatcgccgaggcgcagaagaagggcggcacctgcgccttcgtcgatgccgaacacgcgcttgacccctcctatgcccgtaagctgggcgcgctggacgagctgctgatcagcgagcccgacgctggcgagcaggccctggaaatcgccgacaccctggtacgccccggcgccgtggacgttctggtggtggattcggtggccgcattggtgccccgcggcgagctggaaggcgagatgggcgacaaccatatgggcctgcacgcccgcctgatgagccaggcgctgcgcaagctgaccggttcggtatccaagtccaaaaccatcgtcatcttcatcaaccagatccgcatgaagatcggcgtgatgttcggcaatcccgagaccaccaccggcggcaacgcgctcaagttctacgcctcggtgcgcatggagatccgccgggtcggcgccatcaaggacagggacgaggtcgtgggcaaccagacccgcgtcaaggtggtgaagaacaagctggctccgccgttcaaggtggtggacttcgacatcatgtatggcgaaggcatctccaagatgggtgagctcatcgatctgggcgtcaaggccaatgtggtgaagaaatcgggggcctggttctcctacaactccacccgcatcggccagggccgcgagaacgccaagcagttcctgcgcgacaatccggccatggccgccgagatcgaaggcgccatccgccagaatgccggcctcatctccgaggccctggccgcggtcccggacctggacggcacgccggtcgcggaataa

SEQ ID NO: 809 - protein, 344 aa, Magnetospirillum magnetotacticum
MDRQKALEAAVSQIERAFGKGSIMKLGGKDQVVETEVVSTRILGLDVALGIGGVPRGRIIEVYGPESSGKTTLALHIIAEAQKKGGTCAFVDAEHALDPSYARKLGALDELLISEPDAGEQALEIADTLVRPGAVDVLVVDSVAALVPRGELEGEMGDNHMGLHARLMSQALRKLTGSVSKSKTIVIFINQIRMKIGVMFGNPETTTGGNALKFYASVRMEIRRVGAIKDRDEVVGNQTRVKVVKNKLAPPFKVVDFDIMYGEGISKMGELIDLGVKANVVKKSGAWFSYNSTRIGQGRENAKQFLRDNPAMAAEIEGAIRQNAGLISEALAAVPDLDGTPVAE

SEQ ID NO: 810 - DNA, 1056 bp, Mannheimia succiniciproducens
  CDS (1)..(1056): transl_table=11
atggcaacgaatgatgaaaaatccaaagcgctggctgccgctttaggtcaaattgaaaaacaatttggtaaaggcgcaattatgaaattaggcgatacgcaagcgcttgacgtagagtcaatttcaaccggctcaatcggtttggatgtggcgcttggtatcggcggcttgccaatggggcgtgtcgttgaaattttcgggccggaatcttcaggtaaaaccacattaactctgtccgttatcgcgcaggcgcaaaaagcaggcaaggtttgcgcatttattgatgctgaacatgcgttagatccgatttatgccgcaaaattaggtgttgacgttaaagaattattagtttctcaacccgataacggagaacaggcattggaaatttgcgatgcgttggttcgttccggcgcagtggatgtgattattgtggactcggtggccgccttaaccccgaaagcggaaattgaaggcgacatgggcgattcgcatgttggtttgcaagcccgtttaatgtctcaagctttgcgtaaattaaccggtcagattaaaaacgccaattgtttagtggtatttatcaaccaaatccgtatgaagattggtgttatgttcggtaacccggaaaccaccaccggcggtaatgcgttgaaattctattcgtccgtacgtttagatattcgccgcgtaggcgcggtaaaagacggtgatgaaatcatcggtaatgaaacccgtgtgaaagtagtgaaaaacaaattagcgccgccgttccgccaagtggatttccagattctttatggcgaaggtatctctaaaaacggcgaattaatcgaacttggggtaaaacacaaactggttgataaatccggtgcgtggtatgcctacaacggcgataaaataggtcagggtaaagcgaatgccatgaaatggttagcggaaaatcctaccgttgccgccgagttggaaaataaaatccgcgccgaattgctggcaaatccggaacaggcattgttagccgatatcgaaaccaatagcgaagaaaaagaagatttcgaataa

SEQ ID NO: 811 - protein, 351 aa, Mannheimia succiniciproducens
MATNDEKSKALAAALGQIEKQFGKGAIMKLGDTQALDVESISTGSIGLDVALGIGGLPMGRVVEIFGPESSGKTTLTLSVIAQAQKAGKVCAFIDAEHALDPIYAAKLGVDVKELLVSQPDNGEQALEICDALVRSGAVDVIIVDSVAALTPKAEIEGDMGDSHVGLQARLMSQALRKLTGQIKNANCLVVFINQIRMKIGVMFGNPETTTGGNALKFYSSVRLDIRRVGAVKDGDEIIGNETRVKVVKNKLAPPFRQVDFQILYGEGISKNGELIELGVKHKLVDKSGAWYAYNGDKIGQGKANAMKWLAENPTVAAELENKIRAELLANPEQALLADIETNSEEKEDFE

SEQ ID NO: 812 - DNA, 1044 bp, Methylococcus capsulatus
  CDS (1)..(1044): transl_table=11
atggacgagaacaaacgcaaggccttgggtgccgctctttcccagatcgagaaacagttcggcaagggatcggtgatgcgcatgggcgatgtcgcggcggtccgggacatcgacgtgattcccaccggctccctggcgctggacatcgcgctgggctgcggcggtttgccgcgtggtcgcatcgtcgagatttacgggccggagtcctcgggcaagacgacgctgactctggaggtcatcgcccaggcgcagaagaccggcggcgtggcggctttcgtggatgccgagcatgccctggacccggtctatgccgagaagatcggagtgaacctcgacgatctgctggtgtcccagccggataccggcgagcaggcgctggaaatcgcggacgtgctggtgcgttccggcggcgtggacgtcgtggtgatcgactcggtggcggcgctgacgcccaaggccgaactcgaaggcgagatgggcgattcgcacatgggtctgcaggccagactgatgtcgcaggccttgcgcaagctgaccgccaacatcaagcgctccaacaccctggtgatcttcatcaatcagatccgcatgaagatcggcgtgatgttcggcaatccggagaccaccaccggcggtaacgcgctcaagttctacgcctcggtgcggctggacatccgccgttcgggggcgatcaagaacggcgacgaggtgatcgggaacgaaacccgcgtcaaggtcgtgaagaacaaggtggctccgccgttccgcaccgccgacttcgagattctctatggcgagggcatctcgcgcgagggcgaactgatcgacctcggcgtgaaccacgacatcgtacagaagtccggttcctggtacagctatggcggcgaccgcatcggccagggcaaggacaacgtccggatctatctcaaggagcatccggaggtcgcggctgccatcgaggcggccgttcgcgagaaggcgttggccgggttccagcacgcaccgtccgccgagcgtgcagcgctggaggagagcgggttctga

SEQ ID NO: 813 - protein, 347 aa, Methylococcus capsulatus
MDENKRKALGAALSQIEKQFGKGSVMRMGDVAAVRDIDVIPTGSLALDIALGCGGLPRGRIVEIYGPESSGKTTLTLEVIAQAQKTGGVAAFVDAEHALDPVYAEKIGVNLDDLLVSQPDTGEQALEIADVLVRSGGVDVVVIDSVAALTPKAELEGEMGDSHMGLQARLMSQALRKLTANIKRSNTLVIFINQIRMKIGVMFGNPETTTGGNALKFYASVRLDIRRSGAIKNGDEVIGNETRVKVVKNKVAPPFRTADFEILYGEGISREGELIDLGVNHDIVQKSGSWYSYGGDRIGQGKDNVRIYLKEHPEVAAAIEAAVREKALAGFQHAPSAERAALEESGF

SEQ ID NO: 814 - DNA, 1029 bp, Methylomonas clara
  CDS (1)..(1029): transl_table=11
atggatgacaacaaaagcaaagcgctcgccgccgcactttcccaaattgaaaaacagttcggcaaaggctccattatgcgcatgggcgatgctgatatcggcgaagacctgcaagtggtttccaccggctccctgggtctggatatcgcactgggggtgggtggcttgccacgtggccgtattatcgaaatttatggccctgagtcttcaggtaaaaccacattgaccttgtctgccattgccgaaatgcaaaagctgggtggtgtcgcagcatttatcgacgcggacgatgccctggacccgcaatacgcgtccaagctgggcgtgaatgtgccagagttgttgatttcacagccagacaccggcgaacaggcgctggaaatcgccgatatgctggtgcgctccggttccgtggatatcgtggtggtggactcggtagctgccttgactccgcgtgccgaaattgaaggtgaaatgggcgacagccatatgggtttgcaggcacgcttgatgtcacaggcattgcgtaaactgactggtaacatcaagcgtaccaatacgctggtgatttttattaaccagatccgtatgaagatcggtgtcatgttcggcaatccggaaacgaccaccggcggtaacgcgctcaagttttactcctcagtccgtctcgatatccgccgtaccggtgcgattaaaaaaggcgacgaggtcattggctccgagaccaaggtgaaggtgatcaagaacaaggttgcgccgccgttcaagcaggctgaatttgacatcatgtacggcgaaggtatttcccgtctgggcgaaatcattgagttgggtacaaatttgaaactggttgagaaatcaggtgcgtggtacagctacaacggtgaaaaaatcggccagggtaaagaaaacgctaaagagttcctgcgcgagaatccagcgattgcggcagaaattgaagccaagattcgcgacaactctaatgtgctggcagatagcatgactgcggccagaagtgaggacgattaa

SEQ ID NO: 815 - protein, 342 aa, Methylomonas clara
MDDNKSKALAAALSQIEKQFGKGSIMRMGDADIGEDLQVVSTGSLGLDIALGVGGLPRGRIIEIYGPESSGKTTLTLSAIAEMQKLGGVAAFIDADDALDPQYASKLGVNVPELLISQPDTGEQALEIADMLVRSGSVDIVVVDSVAALTPRAEIEGEMGDSHMGLQARLMSQALRKLTGNIKRTNTLVIFINQIRMKIGVMFGNPETTTGGNALKFYSSVRLDIRRTGAIKKGDEVIGSETKVKVIKNKVAPPFKQAEFDIMYGEGISRLGEIIELGTNLKLVEKSGAWYSYNGEKIGQGKENAKEFLRENPAIAAEIEAKIRDNSNVLADSMTAARSEDD

SEQ ID NO: 816 - DNA, 1035 bp, Methylobacillus flagellatum
  CDS (1)..(1035): transl_table=11
atggatgaaaacagaagcaaagcgctagccgccgccctctcgcaaatcgagaaacaatttggcaaaggctctatcatgcgcatgggcgacaccgatgtcgctgctgacatccaggcagtttctaccggctccctgggcctggacatcgccctgggtattggcggcttgccgcgcggccgcatcgtcgagatttacggcccggaatcctccggcaagaccacgctgacattgtctgtgatcgcgcagatgcaaaagctgggcggcacggcagcattcatcgacgcagaacacgcgctcgacccggtctacgcgcagaagctcggtgtcaatgtttccgatctgctcatctcccagcccgacaccggcgaacaggcgctcgagatcgccgacatgctggtgcgttccggctcggtagatgtcgtggtggtcgactccgtcgctgcgctgacgcccaaggccgaaatcgaaggcgaaatgggcgactcgcacatgggcctgcaggcccgcctgatgtcgcaggcactgcgcaagctcaccgccaacatcaagcgcaccaacaccttggtcatcttcatcaaccagatccgcatgaagatcggcctgatgttcggcaaccccgagaccaccaccggcggcaatgcactcaagttctacgcctccgtgcgcctggacatccgccgcaccggcgcgatcaagaagggggacgaggtcacgggatcagaaacccgggtcaaggtagtgaagaacaacgtggcccctccgttcaagctagcggaattcgacatcctctatggcgaaggtatctcgcgcgagggcgaaatcatcgaactcggcgtcaaccttaaattgatcgagaaggccggtgcctggtacagctacaagggcgagaagatcggccagggcaaggacaacgcgcgcgagttcctcagggagcacccggaaatcgccaatgagatcgacgccaagattcgcgagcattccaatctggccaacgccgcgatgacgacggcaccggatgaagaaagcgacgaataa

SEQ ID NO: 817 - protein, 344 aa, Methylobacillus flagellatum
MDENRSKALAAALSQIEKQFGKGSIMRMGDTDVAADIQAVSTGSLGLDIALGIGGLPRGRIVEIYGPESSGKTTLTLSVIAQMQKLGGTAAFIDAEHALDPVYAQKLGVNVSDLLISQPDTGEQALEIADMLVRSGSVDVVVVDSVAALTPKAEIEGEMGDSHMGLQARLMSQALRKLTANIKRTNTLVIFINQIRMKIGLMFGNPETTTGGNALKFYASVRLDIRRTGAIKKGDEVTGSETRVKVVKNNVAPPFKLAEFDILYGEGISREGEIIELGVNLKLIEKAGAWYSYKGEKIGQGKDNAREFLREHPEIANEIDAKIREHSNLANAAMTTAPDEESDE

SEQ ID NO: 818 - DNA, 1050 bp, Mycobacterium smegmatis
  CDS (1)..(1050): transl_table=11
atggcgcagcaggccccagatcgcgaaaaggccctcgaactggcgatggcccagatcgacaagaatttcggcaaaggctcggtgatgcgcctcggcgaagaggtgcgccagccgatctcggtgatccccaccggctccatctcgctggatgtggcgctcggcatcggcggcctgccgcggggccgcgtcatcgagatctacggcccggagtcctcgggtaagaccaccgtggccctgcatgccgtcgccaacgcgcaggccgcgggcggtatcgcggcgttcatcgacgccgagcacgcgctggatcccgagtacgccaagaagctgggtgtggacaccgactcgctgctggtgtcgcagcccgacaccggtgagcaggcgctggagatcgccgacatgctggtgcggtccggcgcgctggacatcatcgtcatcgactcggtcgccgccctggtgccgcgcgccgagatcgagggcgagatgggtgacagccacgtcggcctgcaggcccgcctgatgagccaggcgctgcgcaagatgaccggcgcgttgaacaactcgggcaccaccgcgatcttcatcaaccagctccgcgagaagatcggtgtgatgttcggctcgcccgagaccaccacgggcggtaaggcactgaagttctacgcctcggtccgcctcgacgtgcgccgtatcgagacgctcaaggacggcaccgacgcggtcggtaaccgcacccgcgtcaaggtcgtcaagaacaaggtctccccgccgttcaagcaggccgagttcgacatcctctacggccagggcatcagccgcgagggttcgctcatcgacatgggcgtcgagcacggcttcatccgcaagtccgggtcctggttcacctacgagggtgagcagctgggccagggcaaggagaacgcccgcaagttcctgctggagaacaccgacgtcgccaacgagatcgagaagaagatcaaagagaagctcggtatcggcgccgtcgtgaccgctgaagccgatgacgtcctcccggccccggttgacttctga

SEQ ID NO: 819 - protein, 349 aa, Mycobacterium smegmatis
MAQQAPDREKALELAMAQIDKNFGKGSVMRLGEEVRQPISVIPTGSISLDVALGIGGLPRGRVIEIYGPESSGKTTVALHAVANAQAAGGIAAFIDAEHALDPEYAKKLGVDTDSLLVSQPDTGEQALEIADMLVRSGALDIIVIDSVAALVPRAEIEGEMGDSHVGLQARLMSQALRKMTGALNNSGTTAIFINQLREKIGVMFGSPETTTGGKALKFYASVRLDVRRIETLKDGTDAVGNRTRVKVVKNKVSPPFKQAEFDILYGQGISREGSLIDMGVEHGFIRKSGSWFTYEGEQLGQGKENARKFLLENTDVANEIEKKIKEKLGIGAVVTAEADDVLPAPVDF

SEQ ID NO: 820 - DNA, 1047 bp, Neisseria gonorrhoeae
  CDS (1)..(1047): transl_table=11
atgtcagacgacaaaagcaaagcccttgccgccgcactggcgcaaatcgaaaaaagtttcggcaaaggcgccatcatgaaaatggacggcagccagcaggaagaaaacctcgaagtcatttccaccggatcgctcggattagacctcgccctcggagtcggcggcctgccgcgcgggcgcatcgtcgaaatcttcggccccgaatcctccggcaaaaccacactctgcctcgaagccgtcgcccaatgccagaaaaacggcggcgtgtgcgcctttgtcgatgccgaacacgccttcgatcccgtttacgcccgcaaactcggcgtaaaagtcgaagagctttacctgtcccagcccgataccggcgaacaggctttggaaatctgcgacacgctcgtccgttcgggcggcatagatatggtagtcgtcgattccgtagccgcactcgtccccaaagccgaaatcgaaggcgatatgggggacagccacgtcggactgcaggcgcgcctgatgagtcaggctttgcgcaaactgaccggacacatcaaaaaaaccaatacgctggttgtgttcatcaaccaaatccgaatgaagatcggcgtaatgttcggcagccccgagaccacgaccggcggcaacgcgctgaaattctattcttccgtccgcctcgacatccgccgcaccggatccatcaaaaaaggcgaagaagtattgggcaacgaaacccgcgtcaaagtcatcaaaaacaaagtcgcccccccgttccgtcaggcagagtttgacatcctctacggagaaggcatcagttgggaaggcgaattgatcgacatcggcgtgaaaaacgacatcatcaacaaatccggcgcgtggtacagctacaacggcgcgaaaatcggtcagggcaaagacaacgtccgcgtctggctgaaagaaaaccccgaaatttccgacgaaatcgacgcaaaaatccgcgccctcaacggcgtagaaatgcacatcaccgaagggacgcaggacgaaaccgacggcgaacgacccgaagaataa

SEQ ID NO: 821 - protein, 348 aa, Neisseria gonorrhoeae
MSDDKSKALAAALAQIEKSFGKGAIMKMDGSQQEENLEVISTGSLGLDLALGVGGLPRGRIVEIFGPESSGKTTLCLEAVAQCQKNGGVCAFVDAEHAFDPVYARKLGVKVEELYLSQPDTGEQALEICDTLVRSGGIDMVVVDSVAALVPKAEIEGDMGDSHVGLQARLMSQALRKLTGHIKKTNTLVVFINQIRMKIGVMFGSPETTTGGNALKFYSSVRLDIRRTGSIKKGEEVLGNETRVKVIKNKVAPPFRQAEFDILYGEGISWEGELIDIGVKNDIINKSGAWYSYNGAKIGQGKDNVRVWLKENPEISDEIDAKIRALNGVEMHITEGTQDETDGERPEE

SEQ ID NO: 822 - DNA, 1047 bp, Neisseria meningitidis serogroup A
  CDS (1)..(1047): transl_table=11
atgtcagacgacaaaagcaaagcccttgccgccgcactggcgcaaatcgaaaaaagtttcggcaaaggcgccatcatgaaaatggacggcagccagcaggaagaaaacctcgaagtcatttccaccggatcgctcggattagacctcgccctcggagtcggcggtctgccgcgcgggcgcatcgtcgaaatcttcggccccgaatcctccggcaaaaccaccctctgcctcgaagccgtcgcccaatgccagaaaaacggcggcgtgtgcgcctttgtcgatgccgaacacgccttcgatcccgtttacgcccgcaaactcggcgtaaaagtcgaagagctttacctgtcccagcccgataccggcgaacaggctttggaaatctgcgacacactcgtccgttcgggcggcatagatatggtagtcgtcgattccgtagccgcactcgtccccaaagccgaaatcgaaggcgatatgggggacagccatgtcggactgcaggcgcgcctgatgagtcaggctttgcgcaaactgaccggacacatcaaaaaaaccaacacgctggttgtgttcatcaaccaaatccggatgaagatcggcgtaatgttcggcagccccgaaaccaccaccggcggcaacgcgctgaaattctattcttccgtccgcctcgacatccgccgcaccggatccatcaaaaaaggcgaagaagtattgggcaacgaaacccgcgtcaaagtcatcaaaaacaaagtcgcccccccgttccgtcaggcagagtttgacatcctctacggagaaggcatcagttgggaaggcgaattgatcgacatcggcgtgaaaaacgacatcatcaacaaatccggcgcgtggtacagctacaacggtgcgaaaatcgggcagggcaaggacaacgtccgtgtctggttgaaggagaatcctgaggttgccgatgagatcgatgcgaaaatccgcgccctcaacggcgtagaaatgcacatcaccgaagggacacaggacgaaaccgacggcgaacgccccgaagaataa

SEQ ID NO: 823 - protein, 348 aa, Neisseria meningitidis serogroup A
MSDDKSKALAAALAQIEKSFGKGAIMKMDGSQQEENLEVISTGSLGLDLALGVGGLPRGRIVEIFGPESSGKTTLCLEAVAQCQKNGGVCAFVDAEHAFDPVYARKLGVKVEELYLSQPDTGEQALEICDTLVRSGGIDMVVVDSVAALVPKAEIEGDMGDSHVGLQARLMSQALRKLTGHIKKTNTLVVFINQIRMKIGVMFGSPETTTGGNALKFYSSVRLDIRRTGSIKKGEEVLGNETRVKVIKNKVAPPFRQAEFDILYGEGISWEGELIDIGVKNDIINKSGAWYSYNGAKIGQGKDNVRVWLKENPEVADEIDAKIRALNGVEMHITEGTQDETDGERPEE

SEQ ID NO: 824 - DNA, 1047 bp, Neisseria meningitidis serogroup B
  CDS (1)..(1047): transl_table=11
atgtcagacgacaaaagcaaagcacttgccgccgcactggcgcaaatcgaaaaaagtttcggcaaaggcgccatcatgaaaatggacggcagccagcaggaagaaaacctcgaagtcatttccaccggatcgctcggattagacctcgccctcggagtcggcggtctgccgcgcgggcgcatcgtcgaaatcttcggccccgaatcctccggcaaaaccaccctctgcctcgaagccgtcgcccaatgccagaaaaacggcggcgtgtgcgcctttgtcgatgccgaacacgcctttgatcccgtttacgcccgcaaactcggcgtaaaagtcgaagagctttacctgtcccagcccgataccggcgaacaggctttggaaatctgcgacacactcgtccgttcgggcggcatagatatggtagtcgtcgattccgtagccgcactcgtccccaaagccgaaatcgaaggcgatatgggggacagccatgtcggactgcaggcgcgcctgatgagccaggctttgcgcaaactgaccggacacatcaaaaaaaccaacacgctggttgtgttcatcaaccaaatccggatgaagatcggcgtaatgttcggcagccccgaaaccaccaccggcggcaacgcgctgaaattctattcttccgtccgcctcgacatccgccgcaccggatccatcaaaaaaggcgaagaggtattgggcaacgaaacccgcgtcaaagtcatcaaaaacaaagtcgcccccccgttccgtcaggcagagtttgacatcctctacggagaaggcatcagttgggaaggcgaattgatcgacatcggcgtgaaaaacgacatcatcaacaaatccggcgcgtggtacagctacaacggcgcgaaaatcggtcagggcaaagacaacgtccgcgtctggctgaaggaaaatcccgaagtcgccaatgaaatcgacgcaaaaatccgcgccctcaacggcgtagaaatgcacatcaccgaagggacgcaggacgaaaccgacggcgaacgccccgaagaataa

SEQ ID NO: 825 - protein, 348 aa, Neisseria meningitidis serogroup B
MSDDKSKALAAALAQIEKSFGKGAIMKMDGSQQEENLEVISTGSLGLDLALGVGGLPRGRIVEIFGPESSGKTTLCLEAVAQCQKNGGVCAFVDAEHAFDPVYARKLGVKVEELYLSQPDTGEQALEICDTLVRSGGIDMVVVDSVAALVPKAEIEGDMGDSHVGLQARLMSQALRKLTGHIKKTNTLVVFINQIRMKIGVMFGSPETTTGGNALKFYSSVRLDIRRTGSIKKGEEVLGNETRVKVIKNKVAPPFRQAEFDILYGEGISWEGELIDIGVKNDIINKSGAWYSYNGAKIGQGKDNVRVWLKENPEVANEIDAKIRALNGVEMHITEGTQDETDGERPEE

SEQ ID NO: 826 - DNA, 1032 bp, Nitrosomonas europaea
  CDS (1)..(1032): transl_table=11
atggacgaaaacaaaaataaggcactttcagcagcgcttgcccagattgagaagcagtacggcaagggttcgatcatgcggcttggcgacagtgatgtggcaaaagatattcaggtggtatccacgggttcgctgggtctggatattgcactgggtgtgggcggccttccgcgcggacgcatcatcgagatttacggaccggaatcttcgggtaaaactaccctgacgctgcaagctatagccgaaatgcagaaactgggcgggacggcggcttttatcgatgcggaacatgcactggatccgcagtatgctcagaaaatcggcgtcaatgttcaggaattactgatttcccagccggataacggtgaacaggcactggaaattaccgatatgctggttcgatccggatcggtcgatgtggtggtggtcgactcagtggcagcgctgactccccgtgctgaaatagaaggggagatgggtgagccgcagatggggctgcaggcaaggctcatgtcccaggctttgcgcaagctgacggccaatatcaagcgtaccaataccatggtgattttcatcaaccagatacgtatgaagatcggggtgatatttggtaatcctgagacgaccacgggaggaaatgcgctgaaattttatgcttctgtgcgtctggatatccgccgtactggttcgatcaagcgtggtgaggaaatggtcgggaacgaaacccgggtcaagatcgttaaaaacaaggttgccccacctttcaaacaggcagatttcgatattttgtatggcgaaggtatctcgcgtgaaagcgaaatcatcgaactcggtgtattgcacaaattgatcgagaaagcgggggcctggtactcctataatggcgaaaagatagggcagggcaaggataatgtgcgtgattatctgaaagagcacaagagtattgcgcatgagatcgagcagaaaatacgcgctgccgtcgggcttgcagagacagacagtcgggttgttccaccctcctccggtgaataa

SEQ ID NO: 827 - protein, 343 aa, Nitrosomonas europaea
MDENKNKALSAALAQIEKQYGKGSIMRLGDSDVAKDIQVVSTGSLGLDIALGVGGLPRGRIIEIYGPESSGKTTLTLQAIAEMQKLGGTAAFIDAEHALDPQYAQKIGVNVQELLISQPDNGEQALEITDMLVRSGSVDVVVVDSVAALTPRAEIEGEMGEPQMGLQARLMSQALRKLTANIKRTNTMVIFINQIRMKIGVIFGNPETTTGGNALKFYASVRLDIRRTGSIKRGEEMVGNETRVKIVKNKVAPPFKQADFDILYGEGISRESEIIELGVLHKLIEKAGAWYSYNGEKIGQGKDNVRDYLKEHKSIAHEIEQKIRAAVGLAETDSRVVPPSSGE

SEQ ID NO: 828 - DNA, 1044 bp, Nocardia farcinica
  CDS (1)..(1044): transl_table=11
atggcaccacaggcctacgaccgcgacaaggccctcgagctcgcgctcgcccaggtcgagaagagcttcggcaagggcgcggtgatgcggctcggcgaggaggcccgccagcccatctcggtgatcccgacgggctccatcgcgctggacgtggcgctgggcatcggcggcctgccccgcggccgcatcgtcgagatctacggtccggaatcctccggtaagaccaccgtcgccctgcacgcggtcgccaacgcgcaggccgcgggcggtgtggccgccttcatcgacgccgagcacgcgctcgaccccgactatgcgcgcaagctcggcgtcgacaccgacgccctgctggtctcccagcccgacaccggtgagcaggcgctcgagatcgccgacatgctggtccgctccggcgccatcgacatcatcgtcatcgactcggtggccgcgctggtgccccgcgccgagatcgagggcgagatgggcgacagccacgtcggcctgcaggcccggctgatgagccaggcgctgcgcaagatgaccagcgcgctcaacaactccggtaccaccgccatcttcatcaaccagctgcgcgagaagatcggtgtcatgttcggctcgcccgagaccaccaccggcggcaaggcgctgaagttctacgcctcggtgcgcctggacgtgcgccgcatcgagaccctcaaggacggcagcgacgcggtcggcaaccgcacccgcgtcaaggtcgtcaagaacaaggtctccccgccgttcaagcaggccgagttcgacatcctctacggccagggcatctccaaggagggttcgctgatcgacatgggtgtggagcagggcttcatccgcaagtccggctcctggtacacctacgagggcgaccagctgggccagggcaaggagaacgcccgcaagttcctgctggagaacaccgacgtccgcgacgagatcgagaagaagatcaaggaaaagctcggcatcggcgccgatctgaccgccgaggacgcggccgaggtgcccgccgatttctga

SEQ ID NO: 829 - protein, 347 aa, Nocardia farcinica
MAPQAYDRDKALELALAQVEKSFGKGAVMRLGEEARQPISVIPTGSIALDVALGIGGLPRGRIVEIYGPESSGKTTVALHAVANAQAAGGVAAFIDAEHALDPDYARKLGVDTDALLVSQPDTGEQALEIADMLVRSGAIDIIVIDSVAALVPRAEIEGEMGDSHVGLQARLMSQALRKMTSALNNSGTTAIFINQLREKIGVMFGSPETTTGGKALKFYASVRLDVRRIETLKDGSDAVGNRTRVKVVKNKVSPPFKQAEFDILYGQGISKEGSLIDMGVEQGFIRKSGSWYTYEGDQLGQGKENARKFLLENTDVRDEIEKKIKEKLGIGADLTAEDAAEVPADF

SEQ ID NO: 830 - DNA, 1071 bp, Paracoccus denitrificans
  CDS (1)..(1071): transl_table=11
atggcaggggcaacacttttcgacatgaacgacaagcgatccgcagacaagcagaaggcgctagacagcgcattggcccagatcgaacggcagttcggcaaaggctcgatcatgaagctgggcgccgacaatccggtggccgagatcgaggccacctcgaccggctcgctggggctcgacatcgcgctggggatcggcggtctgcccaagggccggatcatcgagatattcgggccggaaagctcgggcaagaccacgctgacgctgcatgtcgtggcggaagagcagaagaaaggcggcgtttgcgcctttgtcgatgccgaacatgcgctggacccgcaatatgccaagaagctgggcgtcaatctggacgagttgctgatcagccagcccgatacgggcgagcaggcgcttgagattgtcgatacgctggtggcttccggtgcggtcagcctggtggtggtcgattcggtcgcggcgctgacccccaagtccgagatcgaaggtgacatgggcgacatgcagatgggcagccaggcccggctgatgagccaggcgatgcgcaagctgaccgccagcatcggccggtcgaactgtatggtgatcttcatcaaccagatccgcatgaagatcggcgtgatgttcggaagcccagagacgacgaccggcggcaatgccctgaagttttatgcctcggtgcgcctggatatccgccgcgccggctcgatcaaggaccgtgacgaggtgaccggcaacgccactcgcgtcaaggtggtcaagaacaaggtcgcgccacctttccgtcaggtcgagttcgacatcatgtatggcgagggcatctcgaaggtcggcgaactgatcgacttgggcatcaaggccggcgtggtcgaaaaatcggggtcgtggtactcctatggcgacgagcgcatcggccagggccgtgagaatgccaagcaattcctgcgcgatcatcccgatatggcccatgcgatcgaggacaagatccgcgccagccacggcctggatttcggcgtcgcggacgatggcgatgaggtgatggccgaggattga

SEQ ID NO: 831 - protein, 356 aa, Paracoccus denitrificans
MAGATLFDMNDKRSADKQKALDSALAQIERQFGKGSIMKLGADNPVAEIEATSTGSLGLDIALGIGGLPKGRIIEIFGPESSGKTTLTLHVVAEEQKKGGVCAFVDAEHALDPQYAKKLGVNLDELLISQPDTGEQALEIVDTLVASGAVSLVVVDSVAALTPKSEIEGDMGDMQMGSQARLMSQAMRKLTASIGRSNCMVIFINQIRMKIGVMFGSPETTTGGNALKFYASVRLDIRRAGSIKDRDEVTGNATRVKVVKNKVAPPFRQVEFDIMYGEGISKVGELIDLGIKAGVVEKSGSWYSYGDERIGQGRENAKQFLRDHPDMAHAIEDKIRASHGLDFGVADDGDEVMAED

SEQ ID NO: 832 - DNA, 1320 bp, Pasteurella haemolytica
  CDS (157)..(1263): transl_table=11
caagggcattgccttgctcgcaaatttatttttgtgatcttgatcgaaaatcctaaaaaaatgcttgcaactggataagtaaatactataataatatacagttattttgcagcaacaagcggttgcttttagataaaagtttacaaaggatagaatatggcagagaaaaaaagtcaaaagaacactccggttaaacagattgatccggaacaaaaagaaaaagcgttggcagccgcattagctcaaattgaaaagcaatttggcaaaggctcaattatgaagttaggcgatactcaagcccttgatattgaagcagtttcaaccggttctcttggtttagactcagcattaggcattggtggtttaccaatgggtcgtattgtggaaatttatggaccggagtcttcaggtaaaactacattaactttatctgtggtggctcaagcccaaaaaaatggtaaaacttgtgcctttattgatgccgaacacgcacttgatcctatttacgcccgtaagttaggggtagatacagatggattattaatttcacaaccggataatggcgaacaagcattagaaatttgtgatgcgttagttcgttccggtgcggttgatgtaattattgtggactctgttgcggcacttacaccaaaagcagagattgaaggcgatatgggtgattcccatatgggcttacaagctcgtttaatgtcacaagcattgcgtaaattaaccgcaaatatcaaagcgaccaactgcttggtgattttcattaaccaaattcgtatgaaaattggagtaatgttcggtaaccctgaaaccacaactggtggtaatgcccttaaattctatgcttcagtacgtttagatattcgtcgttcaggcgtagtaaaagacggtgatgaggttatcggtagcgaaacaaaagtgaaaattgtgaaaaacaaggttgctccaccgttccgtgaagtccaatttgatattatgtacggtgagggcattgcccgtatgaatgaattactcattttagcggaatctcacggcttcattaataaagcaggggcttggttctcttatgaaggggagaaaatcggtcagggtaaaaataatgccatcaaatggttaaaagaacaccctgaagtggcgagtaaaattgagcaagatattcgaaatctactcatttcaaacccaacttttacggctactccagattctgaaaatgcagacaatgcagatgatgaatttagtgaagaagaactctaattaaatttatgcggttttcgctcaacgtgaaaatcgcatttttatttataaccgata

SEQ ID NO: 833 - protein, 368 aa, Pasteurella haemolytica
MAEKKSQKNTPVKQIDPEQKEKALAAALAQIEKQFGKGSIMKLGDTQALDIEAVSTGSLGLDSALGIGGLPMGRIVEIYGPESSGKTTLTLSVVAQAQKNGKTCAFIDAEHALDPIYARKLGVDTDGLLISQPDNGEQALEICDALVRSGAVDVIIVDSVAALTPKAEIEGDMGDSHMGLQARLMSQALRKLTANIKATNCLVIFINQIRMKIGVMFGNPETTTGGNALKFYASVRLDIRRSGVVKDGDEVIGSETKVKIVKNKVAPPFREVQFDIMYGEGIARMNELLILAESHGFINKAGAWFSYEGEKIGQGKNNAIKWLKEHPEVASKIEQDIRNLLISNPTFTATPDSENADNADDEFSEEEL

SEQ ID NO: 834 - DNA, 1500 bp, Pasteurella multocida
  CDS (175)..(1239): transl_table=11
gatatcaaggatataaaaaacaaaaattgcactttcaaactgacaacttgacggatagcgcaattttattttgcgagaaatcccacaaatttgataaaaagcacttgatactgtttattcatacagttaatatacacgacaaattctgatgatgattttattgaggattcaaacatggcaacaaaagaagaaaaaaataaagcactggcagcagcacttgggcagattgaaaaacaatttgggaaaggctctattatgaaattgggcgatacccaagccttggatgttgaagccgtgtcaacaggctccttaagcctcgacgtcgcacttggcattggcgggttaccaatgggtcgtattgttgaaattttcggacctgaatcttccggtaaaaccaccttaaccctttctgtcattgcgcaagcacaaaaagaaggcaaaacctgtgcctttattgacgcagaacacgcattagatccaatttatgctgccaaactgggcgtcaatgtgaatgaactgttagtttcccaacctgataacggtgaacaagcactcgaaatttgcgatgcgttagtgcgttcaggtgcagtagatgtgatcattgtggactcagtcgcagcattaaccccgaaagcggaaattgaaggagaaatgggtgactcacacatgggcttacaagcacgtttgatgtcacaagcgttacgtaaactcactggacaaatcaaaaactcaaattgcttagtggtctttattaaccaaatccgtatgaaaattggtgttatgttcggtaacccagaaaccacaacagggggtaatgcactgaaattctatgcctctgtacgtttagatattcgccgtacgggtgcgattaaagagggtgaagaagtgatcggtaacgaaacccgtgtcaaagtggtgaaaaacaaagtggcggcaccattccgtcaagtagatttccaaattctttacggtcaaggtatttctaaaacaggcgagctcatcgagttaggcgtaaaacacaaattagtggataaagcaggtgcatggtacgcttacaatggtgaaaaaatcggtcaaggtaaagctaacgcgatgaaatggttagaagagcatcctgaagaagcattggctttagaaacgaaattacgcaatgagttgctcgcgaatccagaaaaagtactcgcggcagacattgcggaaaaaaatgaaagctctacgggcttagaagcggattattaatctgtttttagcggtttaatcgaaaaaagtgcggtgagttttaacaaaatttcaccgcactttttgctgagtatatctaaacattgtaaagaagcaggtaaccatcgtatgtcttctcccgcgttaaattatgtcgttggcttattagcacgccgtgaatacagtgagtttgaactcgctgtaaaatgcaagaaaaaggcttttctgaacaagaaattgatgacacacttgccttttgccaacaaaaaaactggcaaaatg

SEQ ID NO: 835 - protein, 354 aa, Pasteurella multocida
MATKEEKNKALAAALGQIEKQFGKGSIMKLGDTQALDVEAVSTGSLSLDVALGIGGLPMGRIVEIFGPESSGKTTLTLSVIAQAQKEGKTCAFIDAEHALDPIYAAKLGVNVNELLVSQPDNGEQALEICDALVRSGAVDVIIVDSVAALTPKAEIEGEMGDSHMGLQARLMSQALRKLTGQIKNSNCLVVFINQIRMKIGVMFGNPETTTGGNALKFYASVRLDIRRTGAIKEGEEVIGNETRVKVVKNKVAAPFRQVDFQILYGQGISKTGELIELGVKHKLVDKAGAWYAYNGEKIGQGKANAMKWLEEHPEEALALETKLRNELLANPEKVLAADIAEKNESSTGLEADY

SEQ ID NO: 836 - DNA, 1059 bp, Photobacterium profundum
  CDS (1)..(1059): transl_table=11
atggacgataataagcagaaggctcttgccgcagcattaggccagattgaaaagcagtttggtaaaggctcaatcatgagattgggcgataataagacaatggatatcgaaacggtatcgacaggttctttagctctggatattgctctaggtgctggcggtttgccaatggggcgtattgtcgagatttacggtcctgaatcatcaggtaaaacaaccctaactcttgaagttattgcctccgctcagaaagccggtaagacatgtgcttttattgatgctgaacatgctcttgatcctatctatgcacagaagctgggtgtcgatattgaccaactactgtgttctcagcctgatacgggtgagcaagcgctagaaatcgtcgatgcactcgcacgttctggtgccgttgatctgattgttgtcgattctgtagcggcattgaccccgaaagccgaaattgaaggtgaaatgggcgacagccatatgggattgcaagctaggatgttgtcgcaggccatgcgaaaactgactggtaatttaaaaaatgcaaattgcatgtgtatcttcattaaccaaattcgaatgaagattggtgtaatgtttggcaatccagaaacgactactggtggtaatgcccttaaattctacgcctctgttcgtcttgatattcgccgtactggtgcaattaaagatggtgatgaagttgttggtaacgaaacacgcatcaaggttgttaaaaataaaattgccgcgccgtttaagcaagctgaaacacaaattctttatggtcaaggcttcaaccgtaacggtgagctaattgatctaggtgttaagcataagctggtagaaaaagcgggtgcttggtacagctataaaggtaataagattggtcaaggtaaggctaattcttgtaagcacctagttgaaaacccagcaatagctgaagagattgaaaaactactgcgtgacatgttgttatcaccagttggtgaagaagtagaaaaagcagatgtaaaaaaagatgcaaaaaaagatgcagctgaagcactaaaataa

SEQ ID NO: 837 - protein, 352 aa, Photobacterium profundum
MDDNKQKALAAALGQIEKQFGKGSIMRLGDNKTMDIETVSTGSLALDIALGAGGLPMGRIVEIYGPESSGKTTLTLEVIASAQKAGKTCAFIDAEHALDPIYAQKLGVDIDQLLCSQPDTGEQALEIVDALARSGAVDLIVVDSVAALTPKAEIEGEMGDSHMGLQARMLSQAMRKLTGNLKNANCMCIFINQIRMKIGVMFGNPETTTGGNALKFYASVRLDIRRTGAIKDGDEVVGNETRIKVVKNKIAAPFKQAETQILYGQGFNRNGELIDLGVKHKLVEKAGAWYSYKGNKIGQGKANSCKHLVENPAIAEEIEKLLRDMLLSPVGEEVEKADVKKDAKKDAAEALK

SEQ ID NO: 838 - DNA, 1348 bp, Proteus mirabilis
  CDS (151)..(1218): transl_table=11
tttctctttaaaatcaattcttaaagaaattattaataattaacttgatactgtatgattatacagtataatgagtttcaacaagcaaaatcatatacgttttaatggtagtgacccatctttatgcttcactgcccagagggagataacatggctattgatgaaaacaaacaaaaagcattggccgcagcacttggtcaaattgaaaagcaatttggtaaaggttctatcatgcgtctgggcgaagaccgttccatgaacgtagaaactatctctacaggatctttatcattagacgttgctttaggtgcaggtggattgccacgtggccgtattgttgaaatctatggccctgaatcttctggtaaaacaaccttgactctacaagttattgcctctgctcagcgtgaaggaaaaatttgtgcatttattgatgctgaacatgcattagacccaatttatgctcaaaagctaggtgtcgatatcgataatctactctgctctcaacctgacacaggtgaacaagctctggaaatttgtgatgcattatctcgctctggtgcggtcgatgttattgtcgtggactccgtggcagcattaacaccaaaagctgaaattgaaggtgaaattggtgattcacacgttggtttagccgcacgtatgatgagccaagctatgcgtaaactagcgggtaaccttaaaaactctaatacactgctgattttcattaaccaaattcgtatgaaaatcggtgttatgtttggtaacccagaaaccacgaccggtggtaatgcgcttaaattctatgcttctgttcgtttagacattcgtcgcattggctctgtcaaaaatggtgatgaagtcattggtagtgagactcgcgttaaagttgttaaaaataaagtggctgcaccgtttaaacaagctgaattccaaattatgtacggtgaaggtattaatacctatggcgaactgattgatttaggtgttaaacataagttagtagagaaagcaggtgcttggtatagctacaatggcgaaaaaattggtcaaggtaaagctaacgcaaccaattacttaaaagaacatcctgaaatgtacaatgagttaaacactaaattgcgtgaaatgttgttaaatcatgctggtgaattcacaagtgctgcggattttgcaggtgaagagtcagacagtgatgctgacgacacaaaagagtaattagctggttgtcatgctgtttgtgtgaaaatagaccttaaatcattggctattatcacgacagcatcccatagaataacttgtttgtataaattttattcagatggcaaaggaagccttaaaaaagctt

SEQ ID NO: 839 - protein, 355 aa, Proteus mirabilis
MAIDENKQKALAAALGQIEKQFGKGSIMRLGEDRSMNVETISTGSLSLDVALGAGGLPRGRIVEIYGPESSGKTTLTLQVIASAQREGKICAFIDAEHALDPIYAQKLGVDIDNLLCSQPDTGEQALEICDALSRSGAVDVIVVDSVAALTPKAEIEGEIGDSHVGLAARMMSQAMRKLAGNLKNSNTLLIFINQIRMKIGVMFGNPETTTGGNALKFYASVRLDIRRIGSVKNGDEVIGSETRVKVVKNKVAAPFKQAEFQIMYGEGINTYGELIDLGVKHKLVEKAGAWYSYNGEKIGQGKANATNYLKEHPEMYNELNTKLREMLLNHAGEFTSAADFAGEESDSDADDTKE

SEQ ID NO: 840 - DNA, 978 bp, Proteus vulgaris
  CDS (1)..(978): transl_table=11
atggctattgatgagaacaaacaaaaggcacttgcggcagcactgggtcaaatcgaaaagcaatttggtaaaggttctatcatgcggttgggcgaggatcgctcgatggatgttgaaaccatttctacgggctctttgtcccttgatattgctctgggggccggcggtttacctatggggcgcatcgttgagatttatggcccagaatcttctggtaaaaccacgctgaccttacaggtgattgccgctgctcaacgcgaaggaaaaacctgtgcgttcatcgatgctgaacatgcgttggacccgatttatgcgaaaaaacttggcgtagatattgataacctgctgtgttctcagccggataccggtgagcaagcactggagatctgtgatgcactcacgcgctctggcgctgttgacgttatcattgtcgactctgttgcagccttgacaccaaaagctgaaattgaaggcgaaatcggtgactctcacatgggccttgcggcacgtatgatgagccaggctatgcgtaaactggcaggtaacctgaaacaagccaatacgctgctaatcttcattaaccagatccgtatgaaaattggtgtgatgtttggtaaccctgaaaccactaccggtggtaacgcactgaaattttatgcctctgttcgtctggatattcgtcgtactggcgctatcaaggacggtgaagaagttgtcggtagcgaaactcgcgttaaagtcgtgaagaataaagtggcagcaccgttcaaacaggctgaattccaaattttgtatggtgaaggtatcaatatccatggtgagttagttgatctgggtgtgaaacacaaactgatcgaaaaagcgggtgcatggtatagctataacggcgacaaaatcggccagggtaaagcaaacgcctgcaatttcctgaaagagaattcgctggtgaaggaaacgaagaattttaatggctgctga

SEQ ID NO: 841 - protein, 325 aa, Proteus vulgaris
MAIDENKQKALAAALGQIEKQFGKGSIMRLGEDRSMDVETISTGSLSLDIALGAGGLPMGRIVEIYGPESSGKTTLTLQVIAAAQREGKTCAFIDAEHALDPIYAKKLGVDIDNLLCSQPDTGEQALEICDALTRSGAVDVIIVDSVAALTPKAEIEGEIGDSHMGLAARMMSQAMRKLAGNLKQANTLLIFINQIRMKIGVMFGNPETTTGGNALKFYASVRLDIRRTGAIKDGEEVVGSETRVKVVKNKVAAPFKQAEFQILYGEGINIHGELVDLGVKHKLIEKAGAWYSYNGDKIGQGKANACNFLKENSLVKETKNFNGC

SEQ ID NO: 842 - DNA, 1206 bp, Pseudomonas aeruginosa
  CDS (144)..(1184): transl_table=11
cccgggctagccgcgcctgcgggcaaccgttcggaacattcttcccgtcgggggtaggcgagcgacttgccctgtggaataatactgtctacttatacagttgttcgtggccgtccggccgccctgacttcgcgaggacttcaatggacgagaacaagaagcgcgccctggccgcggccctgggacagatcgaacgccaattcggcaaaggcgcggtcatgcgcatgggcgaccatgagcgccaggcgatcccggccatctccaccggctccctgggcctggacatcgccctcggcatcggcggcctgcccaagggccggatcgtcgagatctacggtccggaatcctcgggcaagaccaccctgaccctctcggtgatcgccgaggcccagaaacagggcgccacctgtgccttcgtcgacgccgagcacgcgctcgatcccgactatgccggcaagctgggcgtcaacgtcgacgacctgctggtctcccagccggacaccggcgagcaggccctggaaatcaccgacatgctggtgcgctccaacgcggtcgacgtgatcatcgtcgactccgtggcagcgctggtacccaaggccgagatcgaaggcgagatgggcgacgcccacgtcggcctgcaggctcgcctgatgtcccaggcgctgcgcaagatcaccggcaatatcaagaacgccaactgcctggtcatcttcatcaaccagatccgcatgaagatcggcgtcatgttcggcaacccggaaaccaccaccggcggtaacgcactgaagttctacgcctcggtccgcctggacatccgtcgtaccggcgcggtgaaggaaggcgacgaggtggtgggtagcgaaacccgcgtcaaggtggtgaagaacaaggtttccccgccgttccgccaggccgagttccagatcctctacggcaagggcatctaccgtaccggcgagatcatcgacctgggcgtgcaattgggcctggtcgagaagtccggcgcctggtacagctaccagggcagcaagatcggccagggcaaggcgaacgccgccaagtacctggaagacaatccggagatcggttcggtgctggagaagaccatccgcgaccagctgctggccaagagcggtccggtgaaggccgacgccgaagaagtggctgacgccgaagccgattgaggccaatggcgatcgtgctcga

SEQ ID NO: 843 - protein, 346 aa, Pseudomonas aeruginosa
MDENKKRALAAALGQIERQFGKGAVMRMGDHERQAIPAISTGSLGLDIALGIGGLPKGRIVEIYGPESSGKTTLTLSVIAEAQKQGATCAFVDAEHALDPDYAGKLGVNVDDLLVSQPDTGEQALEITDMLVRSNAVDVIIVDSVAALVPKAEIEGEMGDAHVGLQARLMSQALRKITGNIKNANCLVIFINQIRMKIGVMFGNPETTTGGNALKFYASVRLDIRRTGAVKEGDEVVGSETRVKVVKNKVSPPFRQAEFQILYGKGIYRTGEIIDLGVQLGLVEKSGAWYSYQGSKIGQGKANAAKYLEDNPEIGSVLEKTIRDQLLAKSGPVKADAEEVADAEAD

SEQ ID NO: 844 - DNA, 1053 bp, Pseudomonas fluorescens
  CDS (1)..(1053): transl_table=11
atggacgacaacaagaagaaagccttggctgcggccctgggtcagatcgaacgtcaattcggcaagggtgccgtaatgcgtatgggcgatcacgaccgtcaggcgatcccggccatttccaccggctctctgggtctggacattgctctgggcattggcggtctgccaaaaggccgtatcgttgaaatctacggccctgagtcgtccggtaaaactaccctgactctgtcggttattgcccaggcgcagaaagccggtgccacttgtgcgttcgtcgatgccgagcacgcactggatccggaatacgccggcaagctgggtgtgaatgttgacgacctgctggtttcccagccggacaccggcgaacaggccctggaaatcaccgacatgctggtgcgttccaacgcggttgacgtgatcatcgtcgactccgtggcggccctggtgcccaaggctgaaatcgaaggtgaaatgggcgacatgcacgtgggcctgcaagcccgcctgatgtcccaggcgctgcgcaaaatcaccggtaacatcaagaacgccaactgcctggtgatcttcatcaaccagatccgcatgaagatcggcgtgatgttcggtagcccggaaaccaccaccggtggtaacgcgctgaagttctacgcttcggtccgtctggacatccgccgtaccggcgcggtgaaggaaggcgacgaagtggtgggcagtgaaacccgggtcaagatcgtcaagaacaaggtggctccgccgttccgtcaggccgagttccagattctttacggcaagggcatctacctcaacggtgaaatcatcgatctgggcgtgctgcacggcttcctggagaaatccggtgcctggtacagctaccagggcaacaagatcggtcagggcaaggccaactcggccaagttcctgcaggacaacccggaaatcggcaacgcgctggagaagcagatccgtgaaaaactgctgactgcatcgccagacgtcaaagccaacccggtcaaagagaccgaagacgatatggccgacgctgatatctga

SEQ ID NO: 845 - protein, 350 aa, Pseudomonas fluorescens
MDDNKKKALAAALGQIERQFGKGAVMRMGDHDRQAIPAISTGSLGLDIALGIGGLPKGRIVEIYGPESSGKTTLTLSVIAQAQKAGATCAFVDAEHALDPEYAGKLGVNVDDLLVSQPDTGEQALEITDMLVRSNAVDVIIVDSVAALVPKAEIEGEMGDMHVGLQARLMSQALRKITGNIKNANCLVIFINQIRMKIGVMFGSPETTTGGNALKFYASVRLDIRRTGAVKEGDEVVGSETRVKIVKNKVAPPFRQAEFQILYGKGIYLNGEIIDLGVLHGFLEKSGAWYSYQGNKIGQGKANSAKFLQDNPEIGNALEKQIREKLLTASPDVKANPVKETEDDMADADI

SEQ ID NO: 846 - DNA, 1068 bp, Pseudomonas putida
  CDS (1)..(1068): transl_table=11
atggacgacaacaagaagcgcgccttggctgcggccctgggtcagatcgaacgccaattcggtaaaggcgcggtcatgcgcatgggtgaccatgagcgtcaaggcattccggccatctccaccggctcgctggggctggatatcgccctgggcatcggcggtctgccaaaaggccgtatcgtcgagatctacggcccggaatcgtcgggtaagaccacgctgaccctgtctgtcatcgctgaagcgcaaaagaacggtgctacctgcgccttcgtcgacgccgaacatgcccttgaccctgagtacgccggcaagctgggcgtcaacgtcgatgacctgctggtttcgcagccggacaccggtgagcaggcccttgaaatcaccgacatgctggtgcgttccaacgcggtcgacgtgatcattgtcgactccgttgccgcgctggtaccgaaggccgagatcgaaggcgagatgggtgacatgcatgtgggcctgcaggcccgcctgatgtcccaggcactgcgtaagatcaccggtaacatcaagaacgcgaactgcctggtcatcttcatcaaccagatccgtatgaagatcggtgtgatgttcggcagcccggaaaccactaccggtggtaacgccctgaagttctatgcttcggtccgtctggacatccgccgtaccggcgcggtcaaggaaggcgacgaagtggtcggcagcgaaacccgcgtcaagatcgtcaagaacaaggtctcgcctccgttccgtcaggctgagttccagattctttacgggaaaggtatctaccgtaacggcgagatcattgatctgggggtatctcagggcctggtcgaaaagtccggcgcctggtacgcctaccaaggcaacaagatcggtcaaggcaaagccaacgctgccaagtacctggctgagaacccggctattggtgccgagatcgagaagcagattcgtgagaagttgctgaaagcgggtgctgctgctgaagccggcaaagctgctgctgctgaagctgatgccgatgacatggccgacgctgacgccggttattga

SEQ ID NO: 847 - protein, 355 aa, Pseudomonas putida
MDDNKKRALAAALGQIERQFGKGAVMRMGDHERQGIPAISTGSLGLDIALGIGGLPKGRIVEIYGPESSGKTTLTLSVIAEAQKNGATCAFVDAEHALDPEYAGKLGVNVDDLLVSQPDTGEQALEITDMLVRSNAVDVIIVDSVAALVPKAEIEGEMGDMHVGLQARLMSQALRKITGNIKNANCLVIFINQIRMKIGVMFGSPETTTGGNALKFYASVRLDIRRTGAVKEGDEVVGSETRVKIVKNKVSPPFRQAEFQILYGKGIYRNGEIIDLGVSQGLVEKSGAWYAYQGNKIGQGKANAAKYLAENPAIGAEIEKQIREKLLKAGAAAEAGKAAAAEADADDMADADAGY

SEQ ID NO: 848 - DNA, 1068 bp, Pseudomonas putida
  CDS (1)..(1068): transl_table=11
atggacgacaacaagaagcgcgccttggctgcggccctgggtcagatcgaacgccaattcggtaaaggcgcagtcatgcgcatgggcgaccacgagcgccaggcgatcccggccatctccaccggttcgctgggcctggacatcgcactgggcattggcggcctgccaaaaggccgtatcgtcgagatctacggcccggaatcgtcgggtaaaaccacgctgaccctgtcggtcatcgccgaagcccagaaaaacggcgccacctgcgccttcgtcgacgccgagcacgccctcgaccctgaatacgcgggcaagctgggcgtcaacgtagacgacctgctggtttcgcagccggacaccggcgaacaggccctggaaatcaccgacatgctggtgcgttccaacgcggttgacgtgatcatcgtcgactccgtggccgccctggtgccgaaggccgagatcgaaggcgaaatgggtgacatgcacgtgggcctgcaggctcgcctgatgtcccaggcgctgcgcaaaatcaccggtaacatcaagaacgccaactgcctggtcatcttcatcaaccagatccgtatgaagatcggcgtaatgttcggcagcccggaaaccaccaccggtggtaacgccctgaaattctacgcctcggtgcgcctggacatccgtcgaacgggtgcggtcaaggaaggcgacgaggtggtcggcagcgaaacccgcgtcaagatcgtcaagaacaaggtttcgccaccgttccgtcaggccgagttccagatcctctacggcaagggtatctaccgcaatggcgaaatcatcgacctgggtgtttcccaaggtctggtcgagaagtccggtgcctggtatgcctatcaaggcaacaagattggacaaggtaaagccaacgccgccaagtacctggctgagaacccggcgattggtgccgagatcgagaagcagattcgcgacaagttgctgacttctggcgctgtcgctgcggctggcaaagctgcggctgtcgaagcagatgccgatgacatggccgacgctgacgccggttattga

SEQ ID NO: 849 - protein, 355 aa, Pseudomonas putida
MDDNKKRALAAALGQIERQFGKGAVMRMGDHERQAIPAISTGSLGLDIALGIGGLPKGRIVEIYGPESSGKTTLTLSVIAEAQKNGATCAFVDAEHALDPEYAGKLGVNVDDLLVSQPDTGEQALEITDMLVRSNAVDVIIVDSVAALVPKAEIEGEMGDMHVGLQARLMSQALRKITGNIKNANCLVIFINQIRMKIGVMFGSPETTTGGNALKFYASVRLDIRRTGAVKEGDEVVGSETRVKIVKNKVSPPFRQAEFQILYGKGIYRNGEIIDLGVSQGLVEKSGAWYAYQGNKIGQGKANAAKYLAENPAIGAEIEKQIRDKLLTSGAVAAAGKAAAVEADADDMADADAGY

SEQ ID NO: 850 - DNA, 1439 bp, Pseudomonas stutzeri
  CDS (45)..(1088): transl_table=11
cggccgctctagaactagtggatcccccgggctgcaggaattcgatggacgagaacaagaagcgtgccttggccgctgccctgggccagatcgaaaagcagttcggcaaaggcgcggtcatgcgcatgggcgatcatgatcgccaggcgatcccttctatttccaccggctccctggggctggatatcgccctcggcataggcggtctgccgaaaggccggatcgtcgaaatctacggcccggaatcttcgggtaaaaccaccctgaccctctcggtcatcgccgccgcccagagaatgggctccacctgcgccttcgtcgatgccgagcatgcgctggaccccgattacgccggcaagctgggcgtcaacgtcgacgacctgctggtctcgcagcccgacacgggcgagcaggcgctggaaatcaccgacatgctggtgcgctccaatgcagtggacgtgatcatcgtcgactccgtggcagcgctggtgcccaaggcggaaatcgaaggcgagatgggcgatgcccacgtcggtctgcaggcccgcctgatgtcccaggcgctgcgcaagatcaccggcaacatcaagaacgccaactgcctggtgatcttcatcaaccagatccgcatgaagatcggcgtgatgttcggtagcccggaaaccaccaccggcggtaacgcgctgaagttctacgcttcggtccgcctggacatccgccgtactggcgcggtgaaggaaggcgacgaagtggtgggcagcgaaacccgcgtcaaggtcgtcaagaacaaggtggccccgccgttccgccaggccgagttccagatcctctacgatcaagctttctaccgcaacggcgagatcatcgatctcggcgtgcagcagggcctggtggagaaatccggtgcctggtacgcctacaagggcagcaagatcggccagggcaaggccaatgcggccaagtatctggaagagaacccggagatcggccaggagatcgaacagcagattcgcgccaagctgctggtgacttcggccaataccaaggccaccccggtagccgaagatctggcggacgccgacatctgatcccatggtcgccgtgctggataaccccactgccgtacgccgggctgcaatggacttgctggcccggcgcgagcatgggcgtatcgagttgtcccgcaaattgcgccagcgcggtgcgccggccgaattgattgagccggcgctggatcgactcgccgaggaagggttgctcagcgaggcccgttatctggaaagtttcgtcaggatgcgcgccaatgccggttatggcccgctacgcattcgtgaggaactgactcagcggggcctgtcccgtagcgacgtcgagcaggccttgcgggacagtggtttcgactggagcgaacagctgcgtgccgtctggcagcgcaagtt

SEQ ID NO: 851 - protein, 347 aa, Pseudomonas stutzeri
MDENKKRALAAALGQIEKQFGKGAVMRMGDHDRQAIPSISTGSLGLDIALGIGGLPKGRIVEIYGPESSGKTTLTLSVIAAAQRMGSTCAFVDAEHALDPDYAGKLGVNVDDLLVSQPDTGEQALEITDMLVRSNAVDVIIVDSVAALVPKAEIEGEMGDAHVGLQARLMSQALRKITGNIKNANCLVIFINQIRMKIGVMFGSPETTTGGNALKFYASVRLDIRRTGAVKEGDEVVGSETRVKVVKNKVAPPFRQAEFQILYDQAFYRNGEIIDLGVQQGLVEKSGAWYAYKGSKIGQGKANAAKYLEENPEIGQEIEQQIRAKLLVTSANTKATPVAEDLADADI

SEQ ID NO: 852 - DNA, 1059 bp, Pseudomonas tolaasii
  CDS (1)..(1059): transl_table=11
atggacgacaacaagaagaaagccttggctgcggccctgggtcagatcgaacgtcaattcggcaagggtgccgtaatgcgtatgggcgatcacgaccgtcaggcgatcccggctatttccacgggctctctgggtctggacatcgcgctcggcattggcggcctgccaaaaggccgtatcgttgaaatctatggtcctgaatcttccggtaaaacgaccctgaccctgtcggtgattgcccaggcacaaaaaatgggcgccacttgcgcgttcgtcgatgccgagcacgccctggacccagagtacgccggcaagctgggcgtcaacgttgacgacctgctggtttcccagccggacaccggtgagcaagccctggaaatcaccgacatgctggtgcgctccaacgccatcgacgtgatcgtggtcgactccgtggcagccctggtaccgaaggctgaaatcgaaggcgaaatgggtgacatgcacgttggcctgcaagcccgtctgatgtcccaggcgctgcgtaaaatcaccggtaacatcaagaatgccaactgcctggtgatcttcatcaaccagatccgcatgaagatcggcgtgatgttcggcagcccggaaaccaccacgggtggtaacgcgttgaagttctacgcttcggtccgtctggatatccgccgtactggcgcggtgaaggaaggtgacgaggtggtgggcagcgaaacccgcgttaaagtcgtgaagaacaaggtggccccgccattccgtcaggccgaattccagattctctacggcaagggtatctacctgaacggtgagatgatcgacctgggcgtgctgcacggttttgtcgagaaatccggtgcctggtatgcctacaacggcagcaagatcggtcagggcaaggccaactcggccaagttcctggcggacaacccggacatcgcagccacgcttgagaagcagattcgcgacaagctgctgactgcagcgccagacgtgaaagcggccgccaaccgtgagccggttgacgagatggaagaagtcgacactgacatctga

SEQ ID NO: 853 - protein, 352 aa, Pseudomonas tolaasii
MDDNKKKALAAALGQIERQFGKGAVMRMGDHDRQAIPAISTGSLGLDIALGIGGLPKGRIVEIYGPESSGKTTLTLSVIAQAQKMGATCAFVDAEHALDPEYAGKLGVNVDDLLVSQPDTGEQALEITDMLVRSNAIDVIVVDSVAALVPKAEIEGEMGDMHVGLQARLMSQALRKITGNIKNANCLVIFINQIRMKIGVMFGSPETTTGGNALKFYASVRLDIRRTGAVKEGDEVVGSETRVKVVKNKVAPPFRQAEFQILYGKGIYLNGEMIDLGVLHGFVEKSGAWYAYNGSKIGQGKANSAKFLADNPDIAATLEKQIRDKLLTAAPDVKAAANREPVDEMEEVDTDI

SEQ ID NO: 854 - DNA, 1065 bp, Pseudomonas syringae pv
  CDS (1)..(1065): transl_table=11
atggacgacaacaagaagaaagccttggctgcggccttgggtcagatcgagcgtcagttcggtaaaggcgccgtgatgcgcatgggcgatcacgatcgccaggcgatccctgccatctccaccggttcgctgggtctggatatcgctctcggtattggcggactgccaaaaggccggatcgtggaaatctacggtcctgagtcttccggtaaaaccacactgacgctgtcggtcatcgcccaggcccagaaaatgggcgctacctgtgcctttgtcgacgccgaacacgcgctggatccggagtacgcaggcaaactgggcgtcaatgtcgacgacctgctggtttcgcagccggacactggtgagcaggcgctggaaatcaccgacatgctggtgcgctccaatgccatcgacgtgatcgtggtcgactccgttgctgcgctggtgccgaaggcagagatcgaaggcgaaatgggtgacatgcacgtgggtctgcaggcgcgtctgatgtcgcaggcgctgcgcaagatcaccggcaacatcaagaacgccaactgcctggtgatcttcatcaaccagatccgcatgaagatcggcgtgatgttcggcagcccggaaaccaccaccggtggtaacgcgctgaagttttacgcttcggtacgcctggacatccgtcgtacgggcgcggtcaaggaaggcgatgaggttgtcggcagcgaaacccgcgtcaaggttgtgaagaacaaggtggctccgccgttccgtcaggccgagttccagattctttacggcaagggtatctacctgaacggtgaaatcgtcgatctggccgttctgcatggttttgtcgagaagtccggtgcctggtacagctaccagggcagcaagattggtcagggcaaggccaactcggccaagttcctggcagataacccggaaatctgcaaagcgctcgagaagcagatccgcgacaaattgctgacccctggcgtcgacaccaaggctgtcggctcccgtgaagcagtggctgccgatgatatgtctgaagcagatgtcgatatctga

SEQ ID NO: 855 - protein, 354 aa, Pseudomonas syringae pv
MDDNKKKALAAALGQIERQFGKGAVMRMGDHDRQAIPAISTGSLGLDIALGIGGLPKGRIVEIYGPESSGKTTLTLSVIAQAQKMGATCAFVDAEHALDPEYAGKLGVNVDDLLVSQPDTGEQALEITDMLVRSNAIDVIVVDSVAALVPKAEIEGEMGDMHVGLQARLMSQALRKITGNIKNANCLVIFINQIRMKIGVMFGSPETTTGGNALKFYASVRLDIRRTGAVKEGDEVVGSETRVKVVKNKVAPPFRQAEFQILYGKGIYLNGEIVDLAVLHGFVEKSGAWYSYQGSKIGQGKANSAKFLADNPEICKALEKQIRDKLLTPGVDTKAVGSREAVAADDMSEADVDI

SEQ ID NO: 856 - DNA, 1062 bp, Ralstonia eutropha
  CDS (1)..(1062): transl_table=11
atggacgacaagaaggccggcgccggcgtgagcgctgagaagcagaaggcgcttgccgccgcgctctcccagattgagaagcagtttggcaagggctcgatcatgcgcctgggcgatggcgaaatcgaacaggacatccaggtagtgtccaccggctcgctggggctggacatcgcgctgggcgtgggtggcctgccgcgcggccgcgtggtcgagatctacggtccggaatcgtccggcaagaccacgctgacgttgcaggtggtggccgaaatgcagaagctgggcggcacctgcgcgttcatcgacgccgagcacgccctggatgtccaatatgctggcaagctcggcgtggacgtcggcaatctgctgatctcccagcccgataccggcgagcaggccctggaaatcaccgacgcgctggtgcgctcgggttcgatcgacctgatcgtgatcgactcggtggccgctctggtgccaaaggcagaaatcgagggcgaaatgggcgattcgctgcccggcctgcaggcccgcctgatgagccaggggctgcgcaagctgaccggcacgatcaagcgcacgaactgcctggtgatcttcatcaaccagatccgtatgaagatcggtgtgatgtttggttctcccgaaaccaccaccggcggtaacgcgctgaagttctacgcctcggtgcgcctggacatccgccgtatcggctcgatcaagaagggcgacgaagtcgtcggcaacgagaccaaggtcaaggtggtcaagaacaaggtgtcacctccgttccgcgaggcgttcttcgacatcctctatggccagggcatctcgcgccagggtgaaatcatcgacctgggcgtggacgccaagatcgttgagaaggccggcgcctggtacagctacaacggcgagaagatcggccagggcaaggacaacgcacgcgagtatctgcgcgagaacccggacatcgccgacgagatcgagaacaaggtgcgtctggcgctgggcgtggcgccgctgaacaccgtggcgggcgcgccagcagaggtcgaaggctga

SEQ ID NO: 857 - protein, 353 aa, Ralstonia eutropha
MDDKKAGAGVSAEKQKALAAALSQIEKQFGKGSIMRLGDGEIEQDIQVVSTGSLGLDIALGVGGLPRGRVVEIYGPESSGKTTLTLQVVAEMQKLGGTCAFIDAEHALDVQYAGKLGVDVGNLLISQPDTGEQALEITDALVRSGSIDLIVIDSVAALVPKAEIEGEMGDSLPGLQARLMSQGLRKLTGTIKRTNCLVIFINQIRMKIGVMFGSPETTTGGNALKFYASVRLDIRRIGSIKKGDEVVGNETKVKVVKNKVSPPFREAFFDILYGQGISRQGEIIDLGVDAKIVEKAGAWYSYNGEKIGQGKDNAREYLRENPDIADEIENKVRLALGVAPLNTVAGAPAEVEG

SEQ ID NO: 858 - DNA, 1059 bp, Ralstonia solanacearum
  CDS (1)..(1059): transl_table=11
atggaagacggcaagaaggcagcctcgatgagcgcagaaaagcagaaggcgctggctgccgcgctcgcgcagatcgaaaagcagttcggcaagggctcgatcatgaagatgggcgacgccgaggtggagccggtccaggttgtgtccaccggctcgctgggtctggacgtcgcgctgggcgtcggcggcctgccgcgcggtcgcgtggtcgagatctacggccccgaatcgtccggcaagaccacgctgacgctgcaggtggtcgccgagatgcagaagctgggcggcacctgcgccttcatcgacgccgagcatgcgctggacgtcacctatgccgacaagctcggcgtgaaggtgccggacctgctgatctcccaaccggacaccggtgagcaggcgctggaaatcgctgacgcgctggtgcgctcgggctcggtcgacctgatcgtcatcgactcggtggccgcgctggtgcccaaggccgaaatcgaaggcgagatgggcgacgcgctgcccggtctgcaggcccgcctgatgagccaggcgctgcgcaagctgaccggcaccatcaagcgcaccaactgcctggtgatcttcatcaaccagatccgcatgaagatcggcgtgatgttcggctcgccggaaaccaccacgggcggcaatgcgctcaagttttacgcttcggtgcgtctggacatccgccgcatcggctcgatcaagaagggcgatgaggtggtcggcaacgagaccaaggtcaaggtcgtcaagaacaaggtggcgccgccgttccgcgaggcgatcttcgacatcctctacggtgcgggcgtgtcgcgcgaaggcgagatcatcgatctgggcgtggaagccaaggtggtcgagaaatccggcgcctggtacagctacaacggcgagcgcatcggtcagggccgtgacaactgccgcgaattcctgcgcgaaaacgccgaactggcccgcgagatcgaaaacaaggtccgcgaacacctgggcgtgacgccgatgggcgccgtcacgctggccgaggaagtcgaggaagattga

SEQ ID NO: 859 - protein, 352 aa, Ralstonia solanacearum
MEDGKKAASMSAEKQKALAAALAQIEKQFGKGSIMKMGDAEVEPVQVVSTGSLGLDVALGVGGLPRGRVVEIYGPESSGKTTLTLQVVAEMQKLGGTCAFIDAEHALDVTYADKLGVKVPDLLISQPDTGEQALEIADALVRSGSVDLIVIDSVAALVPKAEIEGEMGDALPGLQARLMSQALRKLTGTIKRTNCLVIFINQIRMKIGVMFGSPETTTGGNALKFYASVRLDIRRIGSIKKGDEVVGNETKVKVVKNKVAPPFREAIFDILYGAGVSREGEIIDLGVEAKVVEKSGAWYSYNGERIGQGRDNCREFLRENAELAREIENKVREHLGVTPMGAVTLAEEVEED

SEQ ID NO: 860 - DNA, 1098 bp, Rhizobium loti
  CDS (1)..(1098): transl_table=11
atggctcagaattctttgcggcttgtagaggataaggcagtggacaaatcaaaggctctggatgcggcgctgtcgcaaatcgagcgggctttcggcaagggctcgatcatgcggctcggcgcgaacgagcaggtcgtcgagatcgaaaccgtgccgaccggctcgctcggcctcgacatcgcgctcggcgtcggtggcctgccgcgcggccgcatcatcgagatctacggaccggaaagctcgggcaagacgacgctggccctccacacggtggccgaagcccagaagaagggcggcatctgcgccttcgtcgacgccgaacacgcgctcgatccggtctatgcccgcaagctcggcgtcgaccttgaaaacctgctgatctcgcagcccgataccggcgagcaggcgctggagatctgcgacacgctggtgcgttccggcgccatcgacgtgctggtggtcgattcggtcgcggcactgacgccgcgcgccgaaatcgagggcgagatgggcgattcgctgcccggcctgcaggctcgactgatgagccaggcgctgcgcaagctgaccgcctcgatctcgcgctccaacaccatggtcatcttcatcaaccagatccgcatgaagatcggcgtcatgttcggttcgcccgagaccacgaccggcggcaatgcgctgaaattctatgcgtcggtgcgcctcgatatccgccgcatcggctcggtcaaggaccgcgacgaggtcgttggcaaccagacccgcgtcaaggtggtcaagaacaagctggcgccgcccttcaaggtggtcgagttcgacatcatgtatggcgagggcgtgtccaagaccggcgaactggtcgacctcggcgtcaaggccggcgtggttgagaaatcgggcgcctggttctcctacaattcgcaacgtctcggccaggggcgcgaaaatgcaaagctgttcctgcgcgacaatcccgataccgcacgcgagatcgaactggcgctcaggcagaatgccgggctgatcgccgaaaaattcctcgagaatggcggctctgaaggcggcgacgacggttttgaggacgaagccggcgcaatgtag

SEQ ID NO: 861 - protein, 365 aa, Rhizobium loti
MAQNSLRLVEDKAVDKSKALDAALSQIERAFGKGSIMRLGANEQVVEIETVPTGSLGLDIALGVGGLPRGRIIEIYGPESSGKTTLALHTVAEAQKKGGICAFVDAEHALDPVYARKLGVDLENLLISQPDTGEQALEICDTLVRSGAIDVLVVDSVAALTPRAEIEGEMGDSLPGLQARLMSQALRKLTASISRSNTMVIFINQIRMKIGVMFGSPETTTGGNALKFYASVRLDIRRIGSVKDRDEVVGNQTRVKVVKNKLAPPFKVVEFDIMYGEGVSKTGELVDLGVKAGVVEKSGAWFSYNSQRLGQGRENAKLFLRDNPDTAREIELALRQNAGLIAEKFLENGGSEGGDDGFEDEAGAM

SEQ ID NO: 862 - DNA, 1056 bp, Rhizobium leguminosarum bv
  CDS (1)..(1056): transl_table=11
gtggacaaaagcaaggcgcttgaagcggcactctcacagatagagcggtcgttcggcaagggctcgatcatgaaactcggctccaacgagaatgttgtcgagatcgagacgatctcgaccggctcgcttggtctcgatattgcactcggcgttggtggcctgccgaggggccgcatcatcgaaatctacgggccggaaagctccggtaagacgacgcttgcactgcagacgattgccgaagcgcagaagaagggcggcatctgcgccttcgtcgatgccgaacatgcgctcgatcccgtctatgcccgcaagcttggcgtcgacctgcagaaccttctgatctcgcagcccgataccggcgagcaggcgcttgaaatcaccgatacgctggtgcgctccggccgcgtcgacgttctcgtcgtcgactcggttgcggcattgacgccgcgcgccgaaatcgaaggcgaaatgggcgacaccgttcccggcctgcaggcacgattgatgagccaggcgctgcgcaagctcaccgcttcgatctcgaagtcgaacactatggtgatcttcatcaaccagatccgcatgaagatcggcgtcatgttcggctcgccggaaacgacgacaggcggcaatgcgctgaaattctatgcttccgtgcgccttgacatccgccgcatcggcgctgtcaaggagcgcgaagaggtgatcggcaaccagacccgcgtcaaggtcgtcaagaacaagatggcgccacccttcaagcaggtcgagttcgacatcatgtatggcgagggtgtttccaagaccggcgaactggtcgatctcggcgtcaaggccggcatcgtcgaaaagtcgggcgcctggttctcctataacagccagcgtctcggccagggccgtgaaaacgccaagactttcctgcgcgacaatccggacctcgcccgcgagatcgaactgtcgctgcgccagaatgccggcctgatcgccgaccgtttcctgcagaacggtggaccggaccccgatgacggcgatggcgatgccactgcggaaatgtaa

SEQ ID NO: 863 - protein, 351 aa, Rhizobium leguminosarum bv
MDKSKALEAALSQIERSFGKGSIMKLGSNENVVEIETISTGSLGLDIALGVGGLPRGRIIEIYGPESSGKTTLALQTIAEAQKKGGICAFVDAEHALDPVYARKLGVDLQNLLISQPDTGEQALEITDTLVRSGRVDVLVVDSVAALTPRAEIEGEMGDTVPGLQARLMSQALRKLTASISKSNTMVIFINQIRMKIGVMFGSPETTTGGNALKFYASVRLDIRRIGAVKEREEVIGNQTRVKVVKNKMAPPFKQVEFDIMYGEGVSKTGELVDLGVKAGIVEKSGAWFSYNSQRLGQGRENAKTFLRDNPDLAREIELSLRQNAGLIADRFLQNGGPDPDDGDGDATAEM

SEQ ID NO: 864 - DNA, 1047 bp, Rhizobium meliloti
  CDS (1)..(1047): transl_table=11
gtggacaaaagcaaggcacttgaagcggctctttcccagatcgaacgttcgttcggcaagggatcgatcatgaagctcggagcgaaggacagcgtagttgagatcgaaaccgtctccaccggttcgctcggcctcgatatcgcgctcggcatcggcggcctgccgaagggccgtatcatcgagatctatggtccggaaagctcgggcaagacgacgctggcgctgcagaccattgccgaggcacagaagaagggcggcatctgcggcttcgtcgatgccgagcatgcactcgatccggtctatgcacgaaagctcggggtcgatctcgaaaatctcctgatttcgcagcctgatacgggcgagcaggcgctggaaatcaccgatacgctggtccgttcgggtgcgatcgacattctcgtcatcgattcggtggccgcactcgtgccgcgcgccgaaatcgagggcgagatgggcgacagtctgccgggcatgcaggcgcgcctcatgagccaggcgctgcgcaagcttacggcatcgatctccaagtcgaactgcatggtgatcttcatcaaccagatccgcatgaagatcggcgtgatgttcggctcgccggaaacgacgacgggcggcaatgcgctcaagttctacgcttcggtgcgcctcgacattcgccgcatcggttcggtcaaggagcgcgaggaagtggtcggcaaccagacccgcgtcaaggtcgtcaagaacaagatggcaccgcccttcaagcaggtcgagttcgacatcatgtatggcgaaggcgtttcgaagacgggcgaattgatcgatctcggcgtcaaggcgggcatcgtcgagaaatcgggcgcctggttctcctataacagccagcggctcggccagggacgggaaaacgccaagctcttcctgcgggagaatcccgaactgttgcgcgaaatcgaaacggctctgcggcagaatgcgggtctcatcgccgaccggttcctggagaatggcgggccggaaagcgacggcgacgaagccgccgatatgtaa

SEQ ID NO: 865 - protein, 348 aa, Rhizobium meliloti
MDKSKALEAALSQIERSFGKGSIMKLGAKDSVVEIETVSTGSLGLDIALGIGGLPKGRIIEIYGPESSGKTTLALQTIAEAQKKGGICGFVDAEHALDPVYARKLGVDLENLLISQPDTGEQALEITDTLVRSGAIDILVIDSVAALVPRAEIEGEMGDSLPGMQARLMSQALRKLTASISKSNCMVIFINQIRMKIGVMFGSPETTTGGNALKFYASVRLDIRRIGSVKEREEVVGNQTRVKVVKNKMAPPFKQVEFDIMYGEGVSKTGELIDLGVKAGIVEKSGAWFSYNSQRLGQGRENAKLFLRENPELLREIETALRQNAGLIADRFLENGGPESDGDEAADM

SEQ ID NO: 866 - DNA, 1068 bp, Rhodobacter capsulatus
  CDS (1)..(1068): transl_table=11
atggcaacgacgggcttgttcgagatgaacgacaaaggcaaggcagacaagcaaaaggcgctggaatgcgcccttgcgcagatcgaacggcagttcggcaagggctcgatcatgaagcttggcggcgacaccccgccgccggagatcgaggccacctcgaccggctcgcttggcctggacattgcgcttggcatcggcggtctgccgaaggggcggatcgtcgagatctacgggccggaaagctcggggaagaccacgctgacgctgcattgcattgcggaagaacagaaaaagggcggagtctgcgcctttgtcgacgccgaacatgcgcttgacccctattatgcgaagaagctaggcgtcagtctggaagatctgctgatctcgcagcccgacaccggggaacaggcgctggaaatcgtcgacacgctggtgcgctcgggcgcggtgagcctggtcgtcgtcgactcggtggcggcgctgacgccgaaggccgagatcgagggcgacatgggcgatgcgaccgtgggcgcgcaggcccggctgatgagccaggcgatgcggaaactgaccgcctcgatcggtcggtcgaactgcatggtgatcttcatcaaccagatccggatgaagatcggcgtgatgttcggctcgcccgagacgacctcgggcggcaatgcgctgaaattctacgcttcggtgcgtctggacatccgccgcaccggcgcgatcaaggaccgcgacgaggtgatcggcaaccagacccgggtcaaggtggtgaagaacaaggtggcgccgcccttccgcgaggtcgaattcgacatcctttacggcgagggcatttccaaggtcggcgagctggtcgatctgggcgtcaaggcgggcgtggtggcgaaatcgggcgcctggtattcctatggcgacgagcgcatcggccagggccgcgagaatgccaagcaattcctgcgcgacaatcccgacatcgcctatgagatcgaggacaagatccgggccagccacgggctggaattcggtgtcgatccgaccgcggaagatctgaccgaagagtaa

SEQ ID NO: 867 - protein, 355 aa, Rhodobacter capsulatus
MATTGLFEMNDKGKADKQKALECALAQIERQFGKGSIMKLGGDTPPPEIEATSTGSLGLDIALGIGGLPKGRIVEIYGPESSGKTTLTLHCIAEEQKKGGVCAFVDAEHALDPYYAKKLGVSLEDLLISQPDTGEQALEIVDTLVRSGAVSLVVVDSVAALTPKAEIEGDMGDATVGAQARLMSQAMRKLTASIGRSNCMVIFINQIRMKIGVMFGSPETTSGGNALKFYASVRLDIRRTGAIKDRDEVIGNQTRVKVVKNKVAPPFREVEFDILYGEGISKVGELVDLGVKAGVVAKSGAWYSYGDERIGQGRENAKQFLRDNPDIAYEIEDKIRASHGLEFGVDPTAEDLTEE

SEQ ID NO: 868 - DNA, 1092 bp, Rhodopseudomonas palustris
  CDS (43)..(1092): transl_table=11
atggctgcccccaccgcattgcgtatcgtcgaaggttcctcaatggacaaatccaaggcgctctccgccgcgctgtctcagatcgagcgtcagttcggcaagggctcggtgatgaggctcggcaagaacgaccgctcgatggacatcgagacgatctcctccggctcgctcgggctcgacatcgcgctcggcgtcggcggtctgccgaaggggcggatcgttgagatctacgggccggaatcctccggcaagaccacgctggcgctgcactgcgtcgcggaagcccagaagaagggcggcatttgtgccttcgtcgacgccgaacacgcgctcgatccggtctatgcccgcaagctcggcgtcaatgtcgacgacctgctgatctcgcagcccgatcacggcgagcaggcgcttgagatcgccgacacgctggtgcgctccggcgcgatcgacgtgctgatcgtcgactcggtggcggcgctggtgccgcgcgccgaactcgaaggcgaaatgggtgacgcgctgcccggcctgcaggcgcggttgatgagccaggcgctgcgcaagctcaccgcctcgatcaacaagtccaataccatggtgatcttcatcaaccagatccggatgaagatcggcgtgatgtacggctcgccggaaaccaccaccggcggcaacgcgctgaaattctacgcctcggtccggctcgacatccgccgcatcggccagatcaaggaacgcgacgaggtggtcggcaaccagacccgcgtcaaggtggtgaagaacaagctggcgccgccgttcaagcaggtcgaattcgacatcatgtacggcgaaggcgtctccaagatgggcgagatcctcgatctcggcgtcaaggccggcatcgtcgaaaagtcgggcgcctggttctcgcatgacagccagcggctcggccagggacgcgagaacgccaaggcgttcctcaaggccaaccccgacatgaccgccaagatcgaggcggcgatccgccagaattccggactgatcgccgaacagattctcgcaggctcgcccgagagcgatgccgacggcgaggagccgatggaagagtaa

SEQ ID NO: 869 - protein, 349 aa, Rhodopseudomonas palustris
MDKSKALSAALSQIERQFGKGSVMRLGKNDRSMDIETISSGSLGLDIALGVGGLPKGRIVEIYGPESSGKTTLALHCVAEAQKKGGICAFVDAEHALDPVYARKLGVNVDDLLISQPDHGEQALEIADTLVRSGAIDVLIVDSVAALVPRAELEGEMGDALPGLQARLMSQALRKLTASINKSNTMVIFINQIRMKIGVMYGSPETTTGGNALKFYASVRLDIRRIGQIKERDEVVGNQTRVKVVKNKLAPPFKQVEFDIMYGEGVSKMGEILDLGVKAGIVEKSGAWFSHDSQRLGQGRENAKAFLKANPDMTAKIEAAIRQNSGLIAEQILAGSPESDADGEEPMEE

SEQ ID NO: 870 - DNA, 1047 bp, Rhodopseudomonas viridis
  CDS (1)..(1047): transl_table=11
atggacaaaaccaaggcgctcgacgccgcgctcactcagatcgagcgggcattcggcaagggctcgatcatgcggctcggcaaatccggcgcggcgctggaggtcgagacgatttcgaccggctcgctcgggctcgacatcgcgctcggcatcggcgggctgccgcgcggccgagtggtcgagattttcggcccggaatcgtcgggcaagaccacgctggcgctgcacaccgtcgccgaggcgcagaagaagggcggggtttgtgccttcatcgacgccgagcacgccctcgacccgctctatgcccgcaagcttggggtcaatctcgacgacctgttgatctcgcagccggatgctggtgagcaggcgctggagatcgccgacacgctggttcgctcgggcgccatcgacgtgctggtggtcgactcggtcgccgccctggtgccgcgcgccgagctggaaggcgaaatgggcgacagtcagccgggcatgcaggcgcggttgatgagccaggcgcttcgcaagctcactgcctcgatctcgcgctccaactgcatggtgatcttcatcaaccagatccgcatgaagatcggcgtgatgtacggctcgccggagaccaccaccgggggtaacgccctgaaattctacgcctcggtccgcctcgacatccgccgcatcggtgcaatcaaggaacgcgacgaggttgtgggcaaccagacccgggtgaaagtggtcaagaacaagctcgccccgccgttcaagcaggtcgagttcgacatcatgtacggcgagggcatctccaaggccggtgagttgatcgacctcggtgtcaaagccggcgtggttgataagtcgggctcatggttctcccacgatagccagcgcatcggtcagggccgcgagaacgtcaagggcttcctcaagggccaccccgacgtcgccggccgcatcgaggcggcgattcgccagaatgccggcttgatcgccgagcggattctcggttcctcggaggacagcgaggacggcgaggacgctgccgaggcgtga

SEQ ID NO: 871 - protein, 348 aa, Rhodopseudomonas viridis
MDKTKALDAALTQIERAFGKGSIMRLGKSGAALEVETISTGSLGLDIALGIGGLPRGRVVEIFGPESSGKTTLALHTVAEAQKKGGVCAFIDAEHALDPLYARKLGVNLDDLLISQPDAGEQALEIADTLVRSGAIDVLVVDSVAALVPRAELEGEMGDSQPGMQARLMSQALRKLTASISRSNCMVIFINQIRMKIGVMYGSPETTTGGNALKFYASVRLDIRRIGAIKERDEVVGNQTRVKVVKNKLAPPFKQVEFDIMYGEGISKAGELIDLGVKAGVVDKSGSWFSHDSQRIGQGRENVKGFLKGHPDVAGRIEAAIRQNAGLIAERILGSSEDSEDGEDAAEA

SEQ ID NO: 872 - DNA, 1089 bp, Rickettsia conorii
  CDS (58)..(1089): transl_table=11
ttgatttttctttctcaagcttatattttaattggtaagtttataatatggaaatttatgtcaaatacagataaggaaagagccattgccgcagcactcgcacaaattgaaaaaagctacggtaaaggttcggtaatgaaactagggcagcgtccgcatgttgatatagaggccgtatcaaccggctcacttgggctagatatagctcttggaatcggcggtgttcccaaaggtagaatcatcgaaatttttggtcctgaaagctcaggtaaaaccactctaacattgcatttaattgcagaagctcaaaaaaagggtggtacatgtgcttttattgatgccgagcatgcattagaccctgcttatgctaaaaaattaggcgtaaatattgatgagcttattatttcacagcccgatacaggtgaacaagccctagaaattgccgatacgttaattcgctccagcggtattgatatgataataatagatagtgttgcggctttagtaccgaaatcagagattgagggcgaaatgggtgatgctcaaatggcttctcaagcaaggttaatgagccaggctttgcgtaaacttactgcatcaattaatcgcaccaattgtattactgttttcatcaatcaaatcagaatgaaaataggtgtgatgttcggtagtcctgaaactacgacaggcggtaatgccttaaaattctatgcttctgttaggatcgatataagaagaatcggctccattaaagataaagaagaagtaataggcagccaaaccaaagtaaaagtagtcaaaaacaaagtatctcctccatttaaaactgcagattttgatataatgtacggttcaggtatttcaaaagaaggcgagataatcgaccttggagttaagcttgatattgttgagaaatccggctcttggttttcctacaagaacgtacgcataggtcaagggcgtgaaaacgtcaaacaatatttaaaagaacatccacaaatttccaacgaaattgagaaaataatacgtgaaaaatcgtcaaaaattactaatataaatcttgatcaaacggaggaagaaaatgattga

SEQ ID NO: 873 - protein, 343 aa, Rickettsia conorii
MSNTDKERAIAAALAQIEKSYGKGSVMKLGQRPHVDIEAVSTGSLGLDIALGIGGVPKGRIIEIFGPESSGKTTLTLHLIAEAQKKGGTCAFIDAEHALDPAYAKKLGVNIDELIISQPDTGEQALEIADTLIRSSGIDMIIIDSVAALVPKSEIEGEMGDAQMASQARLMSQALRKLTASINRTNCITVFINQIRMKIGVMFGSPETTTGGNALKFYASVRIDIRRIGSIKDKEEVIGSQTKVKVVKNKVSPPFKTADFDIMYGSGISKEGEIIDLGVKLDIVEKSGSWFSYKNVRIGQGRENVKQYLKEHPQISNEIEKIIREKSSKITNINLDQTEEEND

SEQ ID NO: 874 - DNA, 1032 bp, Rickettsia felis
  CDS (1)..(1032): transl_table=11
atgtcaaatacagataaggaaagagccattgccgcagcactcgcacaaatcgaaaaaagctacggtaaaggttcggtaatgaaactagggcagcgtccgaacattgatatagaagccgtatcaaccggttcacttgggcttgatatagctcttggaatcggcggtgttcctaaaggtagaatcattgaaatttttggtcctgaaagctcaggtaaaaccactttaacgctacatttaattgccgaagcacagaaaaagggcggtacatgtgcctttattgatgccgagcatgcccttgaccctgcttatgctaaaaaattaggcgtaaatattgatgagcttattatttcacaaccagatacaggtgaacaagctctagaaattgccgatacgttaattcgttccggcggtattgatatgataataatagatagtgttgcggctttagtaccgaaatcagagattgagggcgagatgggtgatgcccaaatggcttctcaagcaagattaatgagccaggctttacgtaaacttaccgcatcaattaatcgtaccaattgtattactgttttcatcaaccaaatcagaatgaaaataggcgtaatgttcggtaatcccgaaactacgacaggcggtaatgctttgaaattctatgcttctgttaggatcgatataagaagaataggctccattaaagataaagaagaagtaataggcagccaaactaaagtaaaagtagtcaagaacaaagtatctcctccgtttaaaactgcagattttgatataatgtacggttcaggtatttcaaaagaaggcgagataatcgaccttggagttaagcttgatattgttgagaaatccggctcttggttttcctataataacgtacgaatcggtcaagggcgtgaaaacgtcaaacaatatttaaaagaacatccacaaatttccaatgaaattgagaaaatcatacgcgaaaaatcgtcaaaaattactaatataaatcttgatcaaacggaggaagaaaatgattga

SEQ ID NO: 875 - protein, 343 aa, Rickettsia felis
MSNTDKERAIAAALAQIEKSYGKGSVMKLGQRPNIDIEAVSTGSLGLDIALGIGGVPKGRIIEIFGPESSGKTTLTLHLIAEAQKKGGTCAFIDAEHALDPAYAKKLGVNIDELIISQPDTGEQALEIADTLIRSGGIDMIIIDSVAALVPKSEIEGEMGDAQMASQARLMSQALRKLTASINRTNCITVFINQIRMKIGVMFGNPETTTGGNALKFYASVRIDIRRIGSIKDKEEVIGSQTKVKVVKNKVSPPFKTADFDIMYGSGISKEGEIIDLGVKLDIVEKSGSWFSYNNVRIGQGRENVKQYLKEHPQISNEIEKIIREKSSKITNINLDQTEEEND

SEQ ID NO: 876 - DNA, 1023 bp, Rickettsia typhi
  CDS (1)..(1023): transl_table=11
atgtcaaatacagacaaggaacgagccattgctgcagcactcgcacaaatagaaaaaagctacggtaaaggttccgtaatgaaactagggcaacgtccaaatattgatatagaagcaatatcaacaggctcacttggactagatatagcacttggaataggaggtgtccctaaaggcagaataattgagatttttggacctgaaagctcaggtaaaactactttgacactacatttaattgcggaatctcaaaaaaatggtggtacatgtgcgtttattgatgcagagcatgccttagacccagcttatgcaaagaaattaggcgtaaatattgatgagcttatcatttcacaaccagatacaggtgaacaagcgctagaaattgctgatacgttaattcgctcaggtggtattgatatgataataatagatagtgttgctgctttagtaccaaaatcagaaattgaaggtgaaatgggtgatgcccaaatggcttctcaagcaagattaatgagccaggcactccgtaaacttactgcatcaattaatcgtacaaattgtattactgtttttatcaaccaaatcagaatgaaaataggtgttatgttcggtagtcctgaaactacaacaggcggtaatgctttaaaattctatgcttctgttagaattgatataagaagaattggctccattaaagataaagaagaagtaataggtagccaaactaaagtaaaagtagtcaaaaacaaagtatctccaccatttaaaactgcagattttgatataatgtatggttcaggtatttccaaagaaggtgagataattgatcttggtgttaagcttgagattattgagaaatcaggctcgtggtttgcttacaataaagtacgcataggtcaaggacgtgaaaacgtcaaacaatatttaaaagaacatccacaaattgccaacgaaattgagaaaataatacgagaaaaatcgtcagcaattactaatataaatcttgatcaaacggaggaataa

SEQ ID NO: 877 - protein, 340 aa, Rickettsia typhi
MSNTDKERAIAAALAQIEKSYGKGSVMKLGQRPNIDIEAISTGSLGLDIALGIGGVPKGRIIEIFGPESSGKTTLTLHLIAESQKNGGTCAFIDAEHALDPAYAKKLGVNIDELIISQPDTGEQALEIADTLIRSGGIDMIIIDSVAALVPKSEIEGEMGDAQMASQARLMSQALRKLTASINRTNCITVFINQIRMKIGVMFGSPETTTGGNALKFYASVRIDIRRIGSIKDKEEVIGSQTKVKVVKNKVSPPFKTADFDIMYGSGISKEGEIIDLGVKLEIIEKSGSWFAYNKVRIGQGRENVKQYLKEHPQIANEIEKIIREKSSAITNINLDQTEE

SEQ ID NO: 878 - DNA, 1062 bp, Salmonella paratyphi
  CDS (1)..(1062): transl_table=11
atggctatcgacgaaaacaaacagaaagcgttggcggcagcaatgggccaaattgaaaagcaatttggtaaaggctccatcatgcgtctgggtgaagaccgttctatggatgtggaaactatctccaccggttcgctttcactggacatcgcactcggtgcgggcggtctgccgatggggcgtatcgtcgaaatttacgggccggaatcttccggtaaaacgaccctgacgctgcaggtgattgccgctgcgcagcgtgaaggtaaaacctgtgcgtttatcgatgcggaacacgcgcttgaccctgtttacgcacgcaagctgggcgtcgatatcgataacctgctttgttctcagccggataccggcgagcaggcgctggaaatctgtgacgcgctggcgcgttcaggcgcggtggacgtcattgtggtcgactccgtagcggcgctaacgccgaaagcggaaatcgaaggcgaaattggcgactctcacatgggcctcgcggcgcgtatgatgagccaggcgatgcgtaagctggcggggaacctaaaacagtccaacacgctgttgattttcatcaaccagatccgtatgaagattggcgtgatgttcggtaacccggaaaccaccaccggcggtaacgcgctgaaattctacgcctctgttcgtcttgatatccgtcgtattggcgcggtgaaagagggcgataatgtcgtgggtagcgaaacacgtgtgaaagtggtgaaaaacaaaatcgccgcgccgtttaagcaggccgagttccagatcctctacggcgaaggcatcaacttctatggcgaactggttgacctgggcgtgaaagagaagctgatcgagaaagcgggcgcatggtacagctacaacggcgagaagattggccagggtaaagcgaacgcgactacctggctgaaagagaacccggcgacagcgaaagagatcgagaaaagggttcgtgaattactgttgagtaatcagaatgccacgcccgatttcgccgttgacgatagcgaaggcgttgcagaaaccaacgaagatttttaa

SEQ ID NO: 879 - protein, 353 aa, Salmonella paratyphi
MAIDENKQKALAAAMGQIEKQFGKGSIMRLGEDRSMDVETISTGSLSLDIALGAGGLPMGRIVEIYGPESSGKTTLTLQVIAAAQREGKTCAFIDAEHALDPVYARKLGVDIDNLLCSQPDTGEQALEICDALARSGAVDVIVVDSVAALTPKAEIEGEIGDSHMGLAARMMSQAMRKLAGNLKQSNTLLIFINQIRMKIGVMFGNPETTTGGNALKFYASVRLDIRRIGAVKEGDNVVGSETRVKVVKNKIAAPFKQAEFQILYGEGINFYGELVDLGVKEKLIEKAGAWYSYNGEKIGQGKANATTWLKENPATAKEIEKRVRELLLSNQNATPDFAVDDSEGVAETNEDF

SEQ ID NO: 880 - DNA, 1734 bp, Serratia marcescens
  CDS (621)..(1685): transl_table=11
gaattcgcgagggaggggttatgagtgaaaaccaactgcgccggctcagcgtgctggcgggggaaaaactgaaggctcagggccgctggatcacctgcgcggaatcctgcaccggcggcggcatcgccaaggccattaccgatattgccggcagctccgcctatttcgatcgcggtttcgtcacctacagtaatgcggcgaaacatgatctgctgggggtgagcgaagcgacgttgatggcgcacggcgcggtcagcgaagaggtggtgcgcgagatggcgataggggcgctgcgggcggcgcaggccgatctggcgctgtcggtgagcggcatcgccggcccggacggcggcagcgtggaaaagccggtcggcaccgtgtggttcggctttgccagcagcgatggccgggggctttcgcgcaagatgcaattcgagggcgaccgcgatgcggtgcggctgcaggcgacgattttcgcgctgcaaaccgccatcgacgaatttttgtaaattaggcttgatactgtatgaccatacagtataattagtgacatttcctgcacaacatacattcagtggcagtgtggggtaacaccggcattgcgaaacgaaggagcaaaaatggctattgatgagaacaagcaaaaggcgttagctgcggcactgggccagattgagaaacagttcggcaaaggctccatcatgcgtctgggtgaagaccgctccatggacgtggaaacgatctccaccggctcactgtcactcgatatcgccctgggcgccggcggcctgccgatgggccgcatcgtagaaatctacggcccggaatcgtccggtaaaaccactttgacgctgcaggtgatcgccgccgcgcagcgcgaaggcaaaacctgtgcgttcatcgacgccgaacacgcgctggatcctatctatgcgaaaaagctgggcgtcgatatcgacaacctgctgtgctcccagccggataccggcgagcaggcgctggaaatctgtgatgcgctgacccgctccggcgcggttgatgtcatcatcgtcgactccgtggcggcgctgacgccgaaagcggaaatcgaaggtgaaatcggcgattcgcacatgggcctggcggcgcgcatgatgagccaggcgatgcgtaagctggccggcaacctgaaaaacgccaataccctgctgatcttcatcaaccagatccgtatgaaaattggtgtgatgttcggcaacccggaaaccacgaccggcggtaacgccctgaagttctatgcttcggtgcgtttggatatccgtcgtatcggcgccatcaaagaaggcgacgaagtggtgggcagcgaaacccgcgtgaaagtggtgaagaacaaaatcgctgcgccgttcaaacaggctgagttccaaatcatgtacggcgaaggcatcaacagccgcggcgaactggtcgatctgggcgtgaagcacaagatgatcgaaaaagccggcgcctggtacagctataacggcgagaagatcggtcagggcaaggcgaatgcctgtaacttcctgaaagaaaacccggctattgccgccgagctggataagaagctgcgtgacctgctgctgcacagcggcggtgagctggtggctgcctccggtgacgacttcgaagacgacgaagcggaaaccagcgagcagttctaatcgctgaagatatgcgccgccgtttatgtggcgcctatcctctgaattc

SEQ ID NO: 881 - protein, 354 aa, Serratia marcescens
MAIDENKQKALAAALGQIEKQFGKGSIMRLGEDRSMDVETISTGSLSLDIALGAGGLPMGRIVEIYGPESSGKTTLTLQVIAAAQREGKTCAFIDAEHALDPIYAKKLGVDIDNLLCSQPDTGEQALEICDALTRSGAVDVIIVDSVAALTPKAEIEGEIGDSHMGLAARMMSQAMRKLAGNLKNANTLLIFINQIRMKIGVMFGNPETTTGGNALKFYASVRLDIRRIGAIKEGDEVVGSETRVKVVKNKIAAPFKQAEFQIMYGEGINSRGELVDLGVKHKMIEKAGAWYSYNGEKIGQGKANACNFLKENPAIAAELDKKLRDLLLHSGGELVAASGDDFEDDEAETSEQF

SEQ ID NO: 882 - DNA, 1074 bp, Shewanella oneidensis
  CDS (1)..(1074): transl_table=11
atgaaggtcgatccaaacaaagagaaagcacttgctgcggtattgagccaaattgagaagcaatttggtaaaggctccatcatgaagctgggcgaagaccgctctatggatgttgagaccatttctacaggttctctttcccttgacgtcgctcttggggcaggtggtttgcctatgggccgtatcgttgagatctatggtccagagtcatcaggtaaaacaactctgacattagaagtgattgccgccgctcagcgcgaaggtaaaacctgtgcctttatcgatgcagaacacgctcttgatcctatctacgcgaaaaaattaggcgttgatattgataacttattgtgttcacagcccgataccggtgagcaagcccttgagatttgtgatgcattaacccgttctggtgcggttgatgtgattatcgttgactcggtagcggcattaacaccaaaggcggagattgaaggtgaaattggtgactcacacatgggcttagcggctcgtatgatgagccaagcaatgcgtaagttagcgggtaacctcaagcaatcgaacactctgttaatcttcatcaaccaaattcgtatgaagattggggtgatgtttggtaacccagaaaccacaacgggtggtaatgctctgaaattctatgcctctgttcgtttggatatccgccgtacaggcgctatcaaagaaggtgatgaggtggttggtaacgagacacgcgtaaaagtcgttaaaaacaaagttgcagcgccatttaaacaagcagagttccaaattctatacggtcaaggtatcaaccgtactggcgagttagttgatttaggtgtagcccataaactgattgagaaagcaggcgcttggtatagctacaagggcgataaaattggtcaaggccgtgcaaatgcgggtaaatatttgactgaaaacccagctatagccgctgaaatcgataagacattgcgtgagctattgttgagtaacccgagtgccctggcatcatcggcatccgatgatgacaatgtcgaggggaatattgatttagaaacaggcgaagtgttctga

SEQ ID NO: 883 - protein, 357 aa, Shewanella oneidensis
MKVDPNKEKALAAVLSQIEKQFGKGSIMKLGEDRSMDVETISTGSLSLDVALGAGGLPMGRIVEIYGPESSGKTTLTLEVIAAAQREGKTCAFIDAEHALDPIYAKKLGVDIDNLLCSQPDTGEQALEICDALTRSGAVDVIIVDSVAALTPKAEIEGEIGDSHMGLAARMMSQAMRKLAGNLKQSNTLLIFINQIRMKIGVMFGNPETTTGGNALKFYASVRLDIRRTGAIKEGDEVVGNETRVKVVKNKVAAPFKQAEFQILYGQGINRTGELVDLGVAHKLIEKAGAWYSYKGDKIGQGRANAGKYLTENPAIAAEIDKTLRELLLSNPSALASSASDDDNVEGNIDLETGEVF

SEQ ID NO: 884 - DNA, 1336 bp, Shigella sonnei
  CDS (160)..(1221): transl_table=11
cgaccgtgatgcggtgcgtcgtcaggctactgcgtatgcattgcagaccttgtggcaacaatttctacaaaacacttgatactgtatgagtatacagtataattgcttcaacagaacatattgactatccggtattaccccggcatgacaggagtaaaaatggctatcgacgaaaacaaacagaaagcgttggcggcagcactgggccagattgagaaacaatttggtaaaggctccatcatgcgcctgggtgaagaccgttccatggatgtggaaaccatctctaccggttcgctttcactggatatcgcgcttggggcaggtggtctgccgatgggccgtatcgtcgaaatctacggaccggaatcttccggtaaaaccacgctgacgctgcaggtgatcgccgcagcgcagcttgaaggtaaaacctgtgcgtttatcgatgctgaacacgcgctggacccaatctacgcacgtaaactgggcgtcgatatcgataacctgctgtgctcccagccggacaccggcgagcaggcactggaaatctgtgacgccctggcgcgttctggcgcagtagacgttatcgtcgttgactccgtggcggcactgacgccgaaagcggaaatcgaaggcgaaatcggcgactctcacatgggccttgcggcacgtatgatgagccaggcgatgcgtaagctggcgggtaacctgaagcagtccaacacgctgctgatcttcatcaaccagatccgtatgaaaattggtgtgatgttcggtaacccggaaaccactaccggtggtaacgcgctgaaattctacgcctctgttcgtctcgacatccgtcgtatcggcgcggtgaaagagggcgaaaacgtggtgggtagcgaaacccgcgtgaaagtggtgaagaacaaaatcgctgcaccgtttaaacaggctgaatttcagatcctctacggcgaaggtatcaacttctacggcgaactggttgacctgggcgtaaaagagaagctgatcgagaaagcaggcgcgtggtacagctacaaaggtgagaagatcggtcagggtaaagcgaatgcaactgcctggctgaaagataacccggaaaccgcgaaagagatcgagaagaaagtacgtgagttgctgctgagcaacccgaactcaacgccggatttctctgtagatgacagcgaaggcgtagcagaaactaacgaagatttttaatcgttcgttattgatgataatagataatgtgtgcacggacggtccctcgcccctttggggagagggttagggtgaggggaacaggccaacactggcgtgaaaaattactctcacc

SEQ ID NO: 885 - protein, 353 aa, Shigella sonnei
MAIDENKQKALAAALGQIEKQFGKGSIMRLGEDRSMDVETISTGSLSLDIALGAGGLPMGRIVEIYGPESSGKTTLTLQVIAAAQLEGKTCAFIDAEHALDPIYARKLGVDIDNLLCSQPDTGEQALEICDALARSGAVDVIVVDSVAALTPKAEIEGEIGDSHMGLAARMMSQAMRKLAGNLKQSNTLLIFINQIRMKIGVMFGNPETTTGGNALKFYASVRLDIRRIGAVKEGENVVGSETRVKVVKNKIAAPFKQAEFQILYGEGINFYGELVDLGVKEKLIEKAGAWYSYKGEKIGQGKANATAWLKDNPETAKEIEKKVRELLLSNPNSTPDFSVDDSEGVAETNEDF

SEQ ID NO: 886 - DNA, 1044 bp, Silicibacter pomeroyi
  CDS (1)..(1044): transl_table=11
atgagcagcaaacagagcgcggacaagcagaaggcgctggacagcgccctggcccagatcgaacgacagttcggcaaggggtcgatcatgaggctgggcggcgagaacgccattcaggagatcgaggcaagctcgaccggttcgctggggctggacatcgcgttggggatcggtggcttgccgatgggccggatcgtcgagatctatgggccggaaagctcgggcaagaccacgctgaccctgcattgcatcgccgagcagcaaaaacgcggtggcgtctgtgcctttgtcgatgccgaacatgcgcttgacccgcaatatgcgcgcaagctgggcgtcgatctggacgagcttctgatcagccagcccgataccggagaacaggcgctggagatcaccgacacgctggtgcgctcgggcgcggtcaacatggtggtggtcgattcggtcgccgcgctgaccccgaaatccgagcttgaaggcgacatgggcgattccagcgtcggcgtgcatgcccgcctgatgagccaggccatgcgcaagctgaccggctcgatcagccgctcgaaatgcatggtgatcttcatcaaccagatccgcatgaagatcggcgtgatgttcggcagcccggaaaccaccaccggcggcaacgcattgaaattctacagttcggtgcgtctggatatccgtcgcatcggcgccatcaaggaccgcgatgaggtggtgggcaacgccacccgcgtcaaggtggtcaagaacaaggtggcaccgcccttcaagcaggtggaattcgacatcatgtatggcgaaggcatctccaagaccggcgaactgctggacctgggcgtcaaggccggtgtggtcgataaatccggcagctggttctcttatggggacgagcgcatcggccagggccgcgaaaacgccaagaccttcctgagggaaaaccagtccatcgcgctggcgatcgaagacaagatccgcgccgcgcacgggttggaattcgacatgagcgacgatggcgaggacatcctcgaagcgtga

SEQ ID NO: 887 - protein, 347 aa, Silicibacter pomeroyi
MSSKQSADKQKALDSALAQIERQFGKGSIMRLGGENAIQEIEASSTGSLGLDIALGIGGLPMGRIVEIYGPESSGKTTLTLHCIAEQQKRGGVCAFVDAEHALDPQYARKLGVDLDELLISQPDTGEQALEITDTLVRSGAVNMVVVDSVAALTPKSELEGDMGDSSVGVHARLMSQAMRKLTGSISRSKCMVIFINQIRMKIGVMFGSPETTTGGNALKFYSSVRLDIRRIGAIKDRDEVVGNATRVKVVKNKVAPPFKQVEFDIMYGEGISKTGELLDLGVKAGVVDKSGSWFSYGDERIGQGRENAKTFLRENQSIALAIEDKIRAAHGLEFDMSDDGEDILEA

SEQ ID NO: 888 - DNA, 1773 bp, Sodalis glossinidius
  CDS (12)..(1079): transl_table=11
taggagtaaaaatggctattgatgagaataaacaaaaggcgttagcggcagcactgggccagattgaaaagcaattcggcaagggctcgatcatgcgtctgggtgaagatcgctccatggatgttgaaacgatctccacaggttctctgtctctggatatagcgttgggcgccggtgggcttcccatgggccgcatcgtcgaaatctacggcccggaatcatcgggtaaaacgaccctgaccctgcaggtcatcgccgcggcgcagcgtgaagtcaaaacctgcgcctttatcgatgctgaacacgccctggatcccatctatgccaaaaagctgggcgtcgatatcgacaatctgctgtgctcccagccggataccggcgaacaggcgctggaaatctgtgacgccttgacccgctccggcgcggtagacgtcatcatcgtcgactccgtggcagcgctgacgccgaaagcagaaatcgagggcgaaatcggcgattcccatatggggctggccgcccgtatgatgagccaggcgatgcggaaactggcgggcaacctgaaaaacgccaacacactcctgattttcatcaaccagatccgtatgaagatcggcgtcatgttcggcaatccggaaaccaccaccggcggtaatgcgcttaagttttacgcgtcggttcgcctggatatccgtcgtatcggctcggtaaaagaaggcgatgtggtggtgggcagtgaaacccgcgtcaaagtcgtgaagaacaaagttgccgcgccgtttaaacaggccgaattccagatcatgtacggcgaaggtatcaatattcgcggtgaattggttgatttgggcgtcaagcacaagctaattgagaaagccggcgcctggtacagctacaacggcgagaagatcggccagggcaaagccaatgcctgcagcttcttgaaggatcatcccgaggtggcggctgagctggacaaaaagctgcgcgacatgttgctgcacagcgctgaaggcaacagcctggtcagcgacgtggaaagtgaggatgaaggcgctagcgagagcaatgaagagttttaacctaccggcagtgaaaacggcggttccggccgcgacgcgaggtcgctgacgcggtggccttccttcttgaccgggcttggggctattgtcccgccgcgatcacagcgaagccgggctgcagcgtaagctggcgataccgccggttgcgcgccgccgctttcgtgagcgtccggacgcgcaacccgtgcaggcggtaagccaggaagagattaaccaggctcacctactgtcacgagcatgactggcttgacgacgggcgttttgcccggcgatatgtcagccggcgtagtaaacaaggctatggcgaacagcgtatccgcatggagctgttgcaaaaaggcatcgacagggatgatatcgatgcggccttcgccgtagcggtaaaaaagttcggtcagccgctgccggacgcgccgcagatcaaaatcaaactacagcgttatcttctctcccgtggcttttccttcgacgaaatctgctctatttatacaaatttataaatagatggtgtgcgggattttacttcgcaccaaagaaaatttatcttattcccactttttacgatcctgaacgctactagagcgccttacaactgcgctattctgttcgagattcgatctttttgcatgattccgggacaactatgagcaagagcaccgctgagatccgtcaggcgtttctcgactttttccat

SEQ ID NO: 889 - protein, 355 aa, Sodalis glossinidius
MAIDENKQKALAAALGQIEKQFGKGSIMRLGEDRSMDVETISTGSLSLDIALGAGGLPMGRIVEIYGPESSGKTTLTLQVIAAAQREVKTCAFIDAEHALDPIYAKKLGVDIDNLLCSQPDTGEQALEICDALTRSGAVDVIIVDSVAALTPKAEIEGEIGDSHMGLAARMMSQAMRKLAGNLKNANTLLIFINQIRMKIGVMFGNPETTTGGNALKFYASVRLDIRRIGSVKEGDVVVGSETRVKVVKNKVAAPFKQAEFQIMYGEGINIRGELVDLGVKHKLIEKAGAWYSYNGEKIGQGKANACSFLKDHPEVAAELDKKLRDMLLHSAEGNSLVSDVESEDEGASESNEEF

SEQ ID NO: 890 - DNA, 1044 bp, Staphylococcus aureus
  CDS (1)..(1044): transl_table=11
ttggataacgatcgtcaaaaagctttagatacagtaattaaaaatatggagaaatctttcggtaaaggtgccgtaatgaagttgggtgacaatataggtcgccgagtttcaactacatcaactggttcagttacattagataatgcgctaggtgtaggtggctatcctaaaggacgaattattgaaatttatggtcctgaaagttctggtaagacaacagtagcgcttcacgctattgctgaagtacaaagtaatggcggggtggcagcatttatcgatgctgaacatgctttagatccagaatatgctcaagcattaggcgtagatatcgataatttatatttatcgcaaccggatcatggtgaacaaggtcttgaaatcgccgaagcatttgttagaagtggtgcagttgatattgtagttgtagactcagttgctgctttaacacctaaagctgaaattgaaggagaaatgggagacactcacgttggtttacaagctcgtttaatgtcacaagcgttacgtaaactttcaggtgctatttctaaatcaaatacaactgctattttcatcaaccaaattcgtgaaaaagttggtgttatgttcggtaatccagagactacaccaggtggacgtgcattaaaattctatagttcagtaagactagaagtacgtcgtgcagaacagcttaaacaaggacaagaaattgtaggtaatagaactaaaattaaagtcgttaaaaataaagtggcaccaccatttagagtagctgaagttgatattatgtatggacaaggtatttctaaagagggtgaacttattgatttaggtgttgaaaacgacatcgttgataaatcaggagcatggtattcttacaatggcgaacgaatgggtcaaggtaaggaaaatgttaaaatgtacttgaaagaaaatccacaaattaaagaagaaattgatcgtaaattgagagaaaaattaggtatatctgatggtgatgttgaagaaacagaagatgcaccaaagtcattatttgacgaagaatag

SEQ ID NO: 891 - protein, 347 aa, Staphylococcus aureus
MDNDRQKALDTVIKNMEKSFGKGAVMKLGDNIGRRVSTTSTGSVTLDNALGVGGYPKGRIIEIYGPESSGKTTVALHAIAEVQSNGGVAAFIDAEHALDPEYAQALGVDIDNLYLSQPDHGEQGLEIAEAFVRSGAVDIVVVDSVAALTPKAEIEGEMGDTHVGLQARLMSQALRKLSGAISKSNTTAIFINQIREKVGVMFGNPETTPGGRALKFYSSVRLEVRRAEQLKQGQEIVGNRTKIKVVKNKVAPPFRVAEVDIMYGQGISKEGELIDLGVENDIVDKSGAWYSYNGERMGQGKENVKMYLKENPQIKEEIDRKLREKLGISDGDVEETEDAPKSLFDEE

SEQ ID NO: 892 - DNA, 1119 bp, Streptomyces ambofaciens
  CDS (1)..(1119): transl_table=11
atggcaggaaccgaccgcgagaaggctcttgacgccgcactcgcacagattgaacggcagttcggcaagggcgcggtcatgcgcatgggcgaccggtcgaaggagcccatcgaggtcatcccgaccgggtcgaccgcgctcgacgtggccctcggcgtcggcggcctgccgcgcggccgcgtcatcgaggtctacggtccggagtcctccggtaagacgaccctgaccctgcacgccgtggcgaacgcgcagaaggccggcggccaggtggcgttcgtggacgcggagcacgccctcgaccccgagtacgcccagaagctcggcgtcgacatcgacaacctgatcctgtcccagccggacaacggtgagcaggccctggagatcgtggacatgctggtccgctccggcgccctcgacctcatcgtcatcgactccgtcgccgcgctcgtcccgcgcgcggagatcgagggcgagatgggtgacagccacgtcggtctccaggcccggctgatgagccaggcgctccggaagatcaccagcgcgctcaaccagtccaagaccaccgcgatcttcatcaaccagctccgcgagaagatcggcgtcatgttcggctccccggagaccacgaccggtggccgggcgctcaagttctacgcctcggtgcgactcgacatccgacgcatcgagacgctcaaggacggcaccgacgcggtcggcaaccgcacgcgcgtcaaggtcgtcaagaacaaggtcgcgccgcccttcaagcaggccgagttcgacatcctctacggccagggcatcagccgcgagggcggcctgatcgacatgggcgtggagcacggcttcgtccgcaaggccggcgcctggtacacgtacgagggcgaccagctcggccagggcaaggagaacgcgcgcaacttcctgaaggacaaccccgacctcgccaacgagatcgagaagaagatcaaggagaagctgggcgtcggagtccgtcccgaggagccgacggccaccgagtccggaccggacgccgcgacggccgaatccgcaccggcggtgcccgcgcccgcgaccgccaaggtcaccaaggccaaggccgcggcagccaagagctga

SEQ ID NO: 893 - protein, 372 aa, Streptomyces ambofaciens
MAGTDREKALDAALAQIERQFGKGAVMRMGDRSKEPIEVIPTGSTALDVALGVGGLPRGRVIEVYGPESSGKTTLTLHAVANAQKAGGQVAFVDAEHALDPEYAQKLGVDIDNLILSQPDNGEQALEIVDMLVRSGALDLIVIDSVAALVPRAEIEGEMGDSHVGLQARLMSQALRKITSALNQSKTTAIFINQLREKIGVMFGSPETTTGGRALKFYASVRLDIRRIETLKDGTDAVGNRTRVKVVKNKVAPPFKQAEFDILYGQGISREGGLIDMGVEHGFVRKAGAWYTYEGDQLGQGKENARNFLKDNPDLANEIEKKIKEKLGVGVRPEEPTATESGPDAATAESAPAVPAPATAKVTKAKAAAAKS

SEQ ID NO: 894 - DNA, 1134 bp, Streptomyces avermitilis
  CDS (1)..(1134): transl_table=11
atggcaggaaccgaccgcgagaaggcgctcgacgccgcgctcgcacagattgaacggcaattcggcaagggcgcggtgatgcgcctgggcgagcggccgaatgagcccatcgaggtcatccccaccgggtcgaccgcgctcgacgtcgccctcggcgtcggcggcctgccgcgcggccgagtggtggaggtgtacggcccggagtcctccggtaagacgaccctgacgctgcacgcggtggcgaacgcgcagaaggccggcggccaggtggccttcgtggacgccgagcacgccctcgaccccgagtacgcgaagaagctcggcgtcgacatcgacaacctgatcctgtcgcagccggacaacggtgagcaggctctggagatcgtggacatgctggtccgctccggcgcgctcgacctgatcgtcatcgactccgtcgccgccctggtgccgcgcgcggagatcgagggcgagatgggcgactcgcacgtgggtctgcaggcccgcctgatgagccaggccttgcggaagatcaccagcgcgctcaaccagtcgaagaccaccgcgatcttcatcaaccagctccgcgagaagatcggcgtgatgttcggctctccggagaccacgacgggtggccgggcgctgaagttctacgcctcggtgcggctcgacatccgtcgcatcgagacgctgaaggacggcaccgacgcggtcggcaaccgcacccgcgtcaaggtcgtcaagaacaaggtcgcgccgcccttcaagcaggccgagttcgacatcctctacgggcagggcatcagccgcgaaggcggcctgatcgacatgggcgtggagaacggcttcgtccgcaaggctggcgcctggtacacgtacgagggcgaccagctcggccagggcaaggagaacgcgcgcaacttcctgaaggacaaccccgacctcgccaacgagatcgagaagaagatcaaggagaagctgggcgtcggcgtacggccggaggagcccacggcggagccgggcgcggacgcggcggtcacgtcggccgcggctgccacggacgacaccgcgaagacggtgtccgctcccgcggccaagaccaccaagtccaaggccgcggcggccaagagctag

SEQ ID NO: 895 - protein, 377 aa, Streptomyces avermitilis
MAGTDREKALDAALAQIERQFGKGAVMRLGERPNEPIEVIPTGSTALDVALGVGGLPRGRVVEVYGPESSGKTTLTLHAVANAQKAGGQVAFVDAEHALDPEYAKKLGVDIDNLILSQPDNGEQALEIVDMLVRSGALDLIVIDSVAALVPRAEIEGEMGDSHVGLQARLMSQALRKITSALNQSKTTAIFINQLREKIGVMFGSPETTTGGRALKFYASVRLDIRRIETLKDGTDAVGNRTRVKVVKNKVAPPFKQAEFDILYGQGISREGGLIDMGVENGFVRKAGAWYTYEGDQLGQGKENARNFLKDNPDLANEIEKKIKEKLGVGVRPEEPTAEPGADAAVTSAAAATDDTAKTVSAPAAKTTKSKAAAAKS

SEQ ID NO: 896 - DNA, 1125 bp, Streptomyces coelicolor
  CDS (1)..(1125): transl_table=11
atggcaggaaccgaccgcgagaaggccctggacgccgcgctcgcacagattgaacggcaattcggcaagggcgcggtcatgcgcatgggtgaccggaccaacgagcccatcgaggtcatcccgaccgggtctaccgcgctcgacgtggccctcggcgtcggaggcatcccgcgtggccgtgtcgtggaggtctacggccccgagtcctcgggcaagacgaccctgaccctgcacgcggtggcgaacgcgcagaaggccggcggccaggtcgcgttcgtggacgccgagcacgccctcgaccccgagtacgcgaagaagctcggtgtcgacatcgacaacctgatcctgtcccagccggacaacggtgagcaggccctggagatcgtggacatgctggtccgctccggcgccctcgacctcatcgtcatcgactccgtcgccgcgctcgtcccgcgcgcggagatcgagggcgagatgggcgacagccacgtcggtctgcaggcccggctgatgagccaggccctgcggaagatcaccagcgcgctcaaccagtccaagaccaccgcgatcttcatcaaccagctccgcgagaagatcggcgtgatgttcggctccccggagaccacgaccggtggccgggcactgaagttctacgcctcggtgcgactcgacatccggcggatcgagacgctgaaggacggcaccgacgcggtcggcaaccgcacccgcgtcaaggtggtcaagaacaaggtcgcgccgcccttcaagcaggccgagttcgacatcctctacggccagggcatcagccgcgagggcggtctgatcgacatgggcgtggagaacggcttcgtccgcaaggccggcgcctggtacacgtacgagggcgaccagctcggtcagggcaaggagaacgcgcgcaacttcctgaaggacaaccccgacctggccaacgagatcgagaagaagatcaagcagaagctgggcgtcggcgtgcaccccgaggagtcggccaccgagcccggcgcggacgccgcctccgccgccccggccgacgccgcaccggcggtgcccgcacccacgaccgccaaggccaccaagtccaaggccacggcagccaagagctga

SEQ ID NO: 897 - protein, 374 aa, Streptomyces coelicolor
MAGTDREKALDAALAQIERQFGKGAVMRMGDRTNEPIEVIPTGSTALDVALGVGGIPRGRVVEVYGPESSGKTTLTLHAVANAQKAGGQVAFVDAEHALDPEYAKKLGVDIDNLILSQPDNGEQALEIVDMLVRSGALDLIVIDSVAALVPRAEIEGEMGDSHVGLQARLMSQALRKITSALNQSKTTAIFINQLREKIGVMFGSPETTTGGRALKFYASVRLDIRRIETLKDGTDAVGNRTRVKVVKNKVAPPFKQAEFDILYGQGISREGGLIDMGVENGFVRKAGAWYTYEGDQLGQGKENARNFLKDNPDLANEIEKKIKQKLGVGVHPEESATEPGADAASAAPADAAPAVPAPTTAKATKSKATAAKS

SEQ ID NO: 898 - DNA, 1125 bp, Streptomyces lividans
  CDS (1)..(1125): transl_table=11
atggcaggaaccgaccgcgagaaggccctggacgccgcgctcgcacagattgaacggcaattcggcaagggcgcggtcatgcgcatgggtgaccggaccaacgagcccatcgaggtcatcccgaccgggtctaccgcgctcgacgtggccctcggcgtcggaggcatcccgcgtggccgtgtcgtggaggtctacggccccgagtcctcgggcaagacgaccctgaccctgcacgcggtggcgaacgcgcagaaggccggcggccaggtcgcgttcgtggacgccgagcacgccctcgaccccgagtacgcgaagaagctcggtgtcgacatcgacaacctgatcctgtcccagccggacaacggtgagcaggccctggagatcgtggacatgctggtccgctccggcgccctcgacctcatcgtcatcgactccgtcgccgcgctcgtcccgcgcgcggagatcgagggcgagatgggcgacagccacgtcggtctgcaggcccggctgatgagccaggccctgcggaagatcaccagcgcgctcaaccagtccaagaccaccgcgatcttcatcaaccagctccgcgagaagatcggcgtgatgttcggctccccggagaccacgaccggtggccgggcactgaagttctacgcctcggtgcgactcgacatccggcgtatcgagacgctgaaggacggcaccgacgcggtcggcaaccgcacccgcgtcaaggtggtcaagaacaaggtcgcgccgcccttcaagcaggccgagttcgacatcctctacggccagggcatcagccgcgagggcggtctgatcgacatgggcgtggagaacggcttcgtccgcaaggccggcgcctggtacacgtacgagggcgaccagctcggtcagggcaaggagaacgcgcgcaacttcctgaaggacaaccccgacctggccaacgagatcgagaagaagatcaagcagaagctgggcgtcggcgtgcaccccgaggagtcggccaccgagcccggcgcggacgccgcctccgccgccccggccgacgccgcaccggcggtgcccgcacccacgaccgccaaggccaccaagtccaaggccgcggcagccaagagctga

SEQ ID NO: 899 - protein, 374 aa, Streptomyces lividans
MAGTDREKALDAALAQIERQFGKGAVMRMGDRTNEPIEVIPTGSTALDVALGVGGIPRGRVVEVYGPESSGKTTLTLHAVANAQKAGGQVAFVDAEHALDPEYAKKLGVDIDNLILSQPDNGEQALEIVDMLVRSGALDLIVIDSVAALVPRAEIEGEMGDSHVGLQARLMSQALRKITSALNQSKTTAIFINQLREKIGVMFGSPETTTGGRALKFYASVRLDIRRIETLKDGTDAVGNRTRVKVVKNKVAPPFKQAEFDILYGQGISREGGLIDMGVENGFVRKAGAWYTYEGDQLGQGKENARNFLKDNPDLANEIEKKIKQKLGVGVHPEESATEPGADAASAAPADAAPAVPAPTTAKATKSKAAAAKS

SEQ ID NO: 900 - DNA, 1131 bp, Streptomyces rimosus
  CDS (1)..(1131): transl_table=11
atggcaggcactgaccgcgagaaggcgctggacgccgcgctcgcacagattgaacggcaattcggcaagggtgccgtgatgaggatgggagagcgctcgaaggagcccatcgaggtcatccccaccgcgtcgaccgcactggacgtcgcgctcggcgtcggcggtatcccccgcggccgcgtggtggagatctacggcccggagtcctccggcaagacgaccctgaccctgcacgcggtggcgaacgcgcagaaggccggcggctccgtcgccttcatcgacgccgagcacgcgctcgaccccgagtacgccaagaagctgggcgtggacacggacgcgctgatcctgtcccagccggacaacggcgagcaggccctggagatcgtggacatgctggtccgctccggcgcgctcgacctcatcgtgatcgactcggtcgccgcgctggtgccccgggcggagatcgagggtgagatgggcgactcccacgtgggtctccaggcccgtctgatgagccaggcgctgcggaagatcaccagcgcgctcaaccagtccaagaccaccgcgatcttcatcaaccagctccgcgagaagatcggcgtgatgttcggctcgccggagaccacgaccggtggccgcgccctgaagttctacgcctcggtgcgcatcgacatccgccgtatcgagaccctcaaggacggcaccgaagcggtcggcaaccgcacccgctgcaaggtcgtcaagaacaaggtcgccccgcccttcaagcaggccgagttcgacatcctgtacggccagggcatcagccgtgagggcggcctgatcgacatgggcgtcgagcacggcttcatccgcaagtcgggcgcctggtacacctacgagggcgaccagctcggccagggcaaggagaacgcccgcaacttcctcaaggacaaccccgacctcgccaacgaggtggagaagaagatcaaggagaagctgggcgtcggcgtgaagccggaagacctgacggcggagcccggcgcggacgcggcgggtgcggcggccgacgcggaggccccggccaagtccgtaccggcaccggccgccaagagtgccaagggctccaaggccgcagcggccaagagctag

SEQ ID NO: 901 - protein, 376 aa, Streptomyces rimosus
MAGTDREKALDAALAQIERQFGKGAVMRMGERSKEPIEVIPTASTALDVALGVGGIPRGRVVEIYGPESSGKTTLTLHAVANAQKAGGSVAFIDAEHALDPEYAKKLGVDTDALILSQPDNGEQALEIVDMLVRSGALDLIVIDSVAALVPRAEIEGEMGDSHVGLQARLMSQALRKITSALNQSKTTAIFINQLREKIGVMFGSPETTTGGRALKFYASVRIDIRRIETLKDGTEAVGNRTRCKVVKNKVAPPFKQAEFDILYGQGISREGGLIDMGVEHGFIRKSGAWYTYEGDQLGQGKENARNFLKDNPDLANEVEKKIKEKLGVGVKPEDLTAEPGADAAGAAADAEAPAKSVPAPAAKSAKGSKAAAAKS

SEQ ID NO: 902 - DNA, 1134 bp, Streptomyces violaceus
  CDS (1)..(1134): transl_table=11
atggcaggaaccgaccgcgagaaggcgctcgacgccgcgctcgcacagattgaacgccaattcggcaagggcgccgtgatgcgcatgggcgaccgcacccaggagccgatcgaggtgatctccaccggatcgaccgccctcgacatcgccctcggcgtcggtggcctgccgcgcggccgtgtcgtggagatctacggaccggagtcctccggtaagacgaccctgacgctgcacgccgtggccaacgcacagaaggccggcggccaggtggcgttcgtggacgccgagcacgccctcgaccccgagtacgccaagaagctcggcgtcgacatcgacaacctcatcctgtcccagccggacaacggcgagcaggccctcgagatcgtcgacatgctggtccgctccggcgccctcgacctcatcgtcatcgactccgtcgccgcgctcgtcccgcgcgcggagatcgagggcgagatgggtgactcccacgtcggtctccaggcccgactgatgagccaggcgctccggaagatcaccagcgcgctcaaccagtccaagaccaccgcgatcttcatcaaccagctccgcgagaagatcggcgtgatgttcggctcgccggagaccacgaccggtggccgcgccctcaagttctacgcctcggtgcgcctcgacatccgtcgcatcgagaccctcaaggacggcaccgacgcggtcggcaaccgcacccgcgtcaaggtcgtcaagaacaaggtcgcgcccccgttcaagcaggccgagttcgacatcctctacggccagggcatcagccgcgagggcggtctgatcgacatgggcgtggagcacggcttcgtgcgcaaggccggtgcctggtacacgtacgagggcgaccagctcggccagggcaaggagaacgcccgcaacttcctcaaggacaaccccgacctcgccgacgagatcgagcggaagatcaaggagaagctgggcgtcggcgtccggcccgacgcggccaaggccgaggcggcgacggacgcggcggccgcggacaccgccggcacggacgacgcggccaagagcgtcccggcacccgcgagcaagaccgcgaaggcgaccaaggccaccgcggtcaagagctga

SEQ ID NO: 903 - protein, 377 aa, Streptomyces violaceus
MAGTDREKALDAALAQIERQFGKGAVMRMGDRTQEPIEVISTGSTALDIALGVGGLPRGRVVEIYGPESSGKTTLTLHAVANAQKAGGQVAFVDAEHALDPEYAKKLGVDIDNLILSQPDNGEQALEIVDMLVRSGALDLIVIDSVAALVPRAEIEGEMGDSHVGLQARLMSQALRKITSALNQSKTTAIFINQLREKIGVMFGSPETTTGGRALKFYASVRLDIRRIETLKDGTDAVGNRTRVKVVKNKVAPPFKQAEFDILYGQGISREGGLIDMGVEHGFVRKAGAWYTYEGDQLGQGKENARNFLKDNPDLADEIERKIKEKLGVGVRPDAAKAEAATDAAAADTAGTDDAAKSVPAPASKTAKATKATAVKS

SEQ ID NO: 904 - DNA, 1053 bp, Symbiobacterium thermophilum
  CDS (1)..(1053): transl_table=11
atggcattggatccggcgaagcagaaggccatcgacatggccctggcgcagattgagaagcagttcggcaagggttccatcatgcggctcggcgagcagatgtccaggctgaacgtcgaggtgatccccaccggttcggtcgccctggacgtggcgctgggggtcggggggctgccgcgcggccgcatcaccgagatctacgggccggagtcctcgggcaagacgacggtcgcgctgcacgtcatcgccgaggcccagaagatgggcggcgtggcggcgttcgtggacgcggagcacgcgctggacccggtgtacgcccaggcgctcggcgtggacatcgacaacctgctcgtctcccagcccgacaccggcgagcaggccctggagatcaccgagacgctggtgcggtccggcgccgtggacgtggtggtggtcgactccgtcgcggccctggtgccgaaggcggagatcgagggcgagatgggcgactcgtttgtggggctgcaggcccggctcatgtcccaggccctgcgcaagctgaccggcgccatctccaagtccaaggctgtggtcatcttcatcaaccagatccgcgagaaggtcggggtcatgttcggcaatcccgagaccacgccgggcgggcgcgccctgaagttctactcctcggtccggctggaggtgcggaagaccgagaccctgaagagcggccaggaggtggtgggctcccgcacccgggtcaaggtggtcaagaacaaggtcgcgccgcctttcaagcaggccgagttcgatatcctgtacggacagggcatctccaaggagggaagcctgatcgacatcggcaccgagctgaacccgccggtgatcgtcaagagcggcgcctggtactcttacggcgacctgcgcatcggccagggcaaggacaacgcccgggactggctgaggcagcaccccgaggttgcggccgagatcgagcagaagatcaaggagcggctgaacgtggcgtcgctaccggtgaagtacgccgacgaggaggccggcgacgccgatgtctga

SEQ ID NO: 905 - protein, 350 aa, Symbiobacterium thermophilum
MALDPAKQKAIDMALAQIEKQFGKGSIMRLGEQMSRLNVEVIPTGSVALDVALGVGGLPRGRITEIYGPESSGKTTVALHVIAEAQKMGGVAAFVDAEHALDPVYAQALGVDIDNLLVSQPDTGEQALEITETLVRSGAVDVVVVDSVAALVPKAEIEGEMGDSFVGLQARLMSQALRKLTGAISKSKAVVIFINQIREKVGVMFGNPETTPGGRALKFYSSVRLEVRKTETLKSGQEVVGSRTRVKVVKNKVAPPFKQAEFDILYGQGISKEGSLIDIGTELNPPVIVKSGAWYSYGDLRIGQGKDNARDWLRQHPEVAAEIEQKIKERLNVASLPVKYADEEAGDADV

SEQ ID NO: 906 - DNA, 1041 bp, Thiobacillus ferrooxidans
  CDS (1)..(1041): transl_table=11
atggatgaacagcgcagcaagggcctttcggcggccctgtcacagattgacaaacagtttggtaaaggcgccgtcatgcgtctcggtgatcataacgccatcaaggacatcgaggtctactccaccggctcgctgggtctggatctggcgctgggtgttggcggactgccccggggccgggtggtagagatctacgggccggaatcttccggtaaaacgactctcaccctgcatgccatagccagttgtcaggctgcaggcggcaccgccgcctttatcgatgccgagcacgcgctcgacccaggctatgcccacaagctcggcgtcgatctggaaaacctcctgatctcccagcctgataccggcgagcaggccctggaaatcgccgacatgctggtgcgctccggtgccgtggacctcatcgtcatcgactccgtggccgctctgacccccaaagcggaaatcgaaggcgagatgggcgattcccacgtcggtctgcaggcgcgtctgatgagtcaggctttgcgcaacttaaccgccaatatctcccggagcaacaccctggtcatttttatcaaccagattcgcatgaaaatcggggtgatgtatggcagtccggaaaccaccaccggtggtaatgcccttaaattctacgcttccgtgcgccttgatatccgccgcatcggcgcgatcaaaaagagcgacgaagtggtaggtaacgatacccgcgtcaaggtggtcaagaataaggtcgcaccacctttccgcgaagccgaatttgccatctattacggtgaaggcatctcccgactgtccgaactggtggacctcggtgtgaagttcgacatcgtcgaaaaaagcggcgcctggtacagttaccagggccaccgtattggtcagggcaaggacaatgcccgccagtacctcaaggtgcatccggaactggcggccaatatcgagcagcggatacgggcagcggcagcaggacaccccctggcctttgccgaagaggtggagagcccgcagcggtcggctagttga

SEQ ID NO: 907 - protein, 346 aa, Thiobacillus ferrooxidans
MDEQRSKGLSAALSQIDKQFGKGAVMRLGDHNAIKDIEVYSTGSLGLDLALGVGGLPRGRVVEIYGPESSGKTTLTLHAIASCQAAGGTAAFIDAEHALDPGYAHKLGVDLENLLISQPDTGEQALEIADMLVRSGAVDLIVIDSVAALTPKAEIEGEMGDSHVGLQARLMSQALRNLTANISRSNTLVIFINQIRMKIGVMYGSPETTTGGNALKFYASVRLDIRRIGAIKKSDEVVGNDTRVKVVKNKVAPPFREAEFAIYYGEGISRLSELVDLGVKFDIVEKSGAWYSYQGHRIGQGKDNARQYLKVHPELAANIEQRIRAAAAGHPLAFAEEVESPQRSAS

SEQ ID NO: 908 - DNA, 1320 bp, Vibrio anguillarum
  CDS (166)..(1212): transl_table=11
tggtgagtcactttttatcgcagccaaattgaacctagtcgaaattttttcgacacagctatagacactgtatgaatcaacagtataattaaccccaattggcgactaaagagtcgataaaaaatttaacgagccgctacccacagcgacagtttggagaaagtaatggacgaaaataagcagaaggcgctagccgcagcactgggtcaaattgaaaagcaatttggtaaaggttcgatcatgcgccttggtgacaaccgtacaatggatgttgaaaccatttctaccggttcactttctttggatattgcattgggtgctggcggtttaccaatgggacgtatcgttgaagtctacggccctgaatcatcaggaaaaacaacgttaacgctggaattgatcgcagcagcacaacgagtgggtaaaacctgtgcttttatcgatgcagaacatgcccttgacccaatttatgctaaaaaactgggtgtaaacatcgatgagctgttggtttcacaacctgatacgggcgaacaagcgcttgaaatttgtgatgccttggcccgttctggtgccattgatgttatcgtcattgactctgtggctgcactgacaccaaaagctgaaattgaaggtgaaatgggcgatagccacatgggtctacaagcccgtatgctttctcaagcgatgcgtaagttaacgggtaacctaaaacagtccaactgcatgtgtatcttcatcaaccagatccgtatgaaaattggtgtgatgtttggtaaccctgaaaccacaacaggtggtaatgcccttaaattctacgcttcagttcgtttagatattcgtcgtacaggctctattaaagagggtgacgaagctgtgggtaatgaaacgcgtattaaagtggttaagaacaaaatcgcggctccctttaaacaagcggatactcaaattctttacggacaaggttttaaccgtgaaggtgaattggttgatcttggcgtgaaacataaattggttgagaaagcgggcgcttggtatagctataacggtgataaaattggtcaaggtaaagcaaacgcctgtaaattcttgagagagaatccagccgccgccatggctcttgatactaagttacgtgaaatgctgctcaatccagccgagttaattgttgaagaacctattttgagcgaaatgcctcaagaagaagagttgtaatcttctccacgtttatatttccaacaaagcccctgcaatgcagggctttgttttatccatgaccaatagggacagtatgtattcctctaaattcaaatcgacgttacg

SEQ ID NO: 909 - protein, 348 aa, Vibrio anguillarum
MDENKQKALAAALGQIEKQFGKGSIMRLGDNRTMDVETISTGSLSLDIALGAGGLPMGRIVEVYGPESSGKTTLTLELIAAAQRVGKTCAFIDAEHALDPIYAKKLGVNIDELLVSQPDTGEQALEICDALARSGAIDVIVIDSVAALTPKAEIEGEMGDSHMGLQARMLSQAMRKLTGNLKQSNCMCIFINQIRMKIGVMFGNPETTTGGNALKFYASVRLDIRRTGSIKEGDEAVGNETRIKVVKNKIAAPFKQADTQILYGQGFNREGELVDLGVKHKLVEKAGAWYSYNGDKIGQGKANACKFLRENPAAAMALDTKLREMLLNPAELIVEEPILSEMPQEEEL

SEQ ID NO: 910 - DNA, 1632 bp, Vibrio cholerae
  CDS (121)..(1185): transl_table=11
ctatacaggggtggacactgtacaaatcaacagtataataaaccccaacatgacaaatcagcgtcgacccgatttcgacacaattacctatcacctgagagtgactatccggagagagtaatggacgagaataaacagaaggcacttgcggccgccctcggtcaaattgaaaagcaatttggtaaaggctccatcatgcgcttaggcgacaaccgcgcgatggatgtagaaaccatttcgaccggttctctgtctctggatatcgcgttgggtgctggtggtctaccaatgggacgtatcgttgagatcttcggccctgaatcttcgggtaaaacgacactgactctggaactgattgctgctgcacaacgtgaaggtaaaacctgtgcgtttatcgatgccgagcacgcactggatccggtttatgccaaaaaattgggcgtgaatatcgatgagctactggtttctcagccagataccggcgagcaagcactggaaatttgtgatgcactggctcgctctggtgctgtggatgtcatcgttgttgactcagtagcggctttgacaccaaaagcggaaattgaaggcgaaatgggcgatagccacatgggtctgcaagcgcgtatgttgtcgcaagcaatgcgtaaactgacgggtaacctcaagcaatccaactgtatgtgtatcttcatcaaccaaattcgtatgaagattggtgtgatgtttggtaacccagaaactaccactggcggtaacgcactgaaattctacgcttctgttcgtttggatattcgccgtactggcgcaatcaaagaaggcgaagaagtggtgggtaacgaaacccgtatcaaggttgtgaagaacaagattgctgcgccgtttaaagaagcgaacactcagatcatgtatggccaaggtttcaatcgtgaaggtgaattgatcgatcttggtgtgaaacacaaaatggttgagaagtcaggcgcttggtacagctataacggcgataaaatcggccaaggtaaagcgaatgcctgcaagtatctgaaagaaaacccagaaattgcgaaaactctagataaaaaactgcgtgaaatgctgttaaacccagaaaacatgcagctgatcgctgaaacatcttctgcggcggatgacgtcgaatttggcgcggtgccagaagagttttaatcggcaggctgaatgcaaagaggttcagcctctcaatctcgatgttgatgaagccctgcaatgcagggcttctttttggctgccaattgagtgagtgactcaaaactcaccgttagcctaatagggagttccatgagtttcgacttagccacttgccgacaaagtgccttacaacttctgagccgtcgcatcatagcgaatatgagctataccaaaaattagccctcaaaggtcatcctgctgaagtgattgatgaggttgtgaagtacgttttagagctagggtatttgagtgatgcccgttacgcagcgagtcaaggctcgacaaatcgttcataaaggttacggtgagcagcgtttgcgccacaactcaaagaaaagcgggttgcggaagaggtgattgagcaagccctcgccgagcaaacgatagattggtttgaactagcgc

SEQ ID NO: 911 - protein, 354 aa, Vibrio cholerae
MDENKQKALAAALGQIEKQFGKGSIMRLGDNRAMDVETISTGSLSLDIALGAGGLPMGRIVEIFGPESSGKTTLTLELIAAAQREGKTCAFIDAEHALDPVYAKKLGVNIDELLVSQPDTGEQALEICDALARSGAVDVIVVDSVAALTPKAEIEGEMGDSHMGLQARMLSQAMRKLTGNLKQSNCMCIFINQIRMKIGVMFGNPETTTGGNALKFYASVRLDIRRTGAIKEGEEVVGNETRIKVVKNKIAAPFKEANTQIMYGQGFNREGELIDLGVKHKMVEKSGAWYSYNGDKIGQGKANACKYLKENPEIAKTLDKKLREMLLNPENMQLIAETSSAADDVEFGAVPEEF

SEQ ID NO: 912 - DNA, 1220 bp, Vibrio natriegens
  CDS (174)..(1220): transl_table=11
cgtgataagctctgcggcaaagttatacgtagatcagctaaagttttttctatacaggtatagacactgtatgaatcaacagtataataactttcattgctgagcgattaactgctcaagaaaagtttaatgactattcgtcgcccaaaaagatgaataaatcggagaaagtaatggacgagaacaaacagaaagcgctcgccgctgcgctaggtcaaattgaaaaacaattcggtaaaggctcaatcatgcgccttggcgataaccgcgcaatggacgtagaaaccatctcaacgggttctctttctcttgatatcgctttgggtgctggtggcttaccgatgggccgtattgttgaagtatacggtccggaatcttcgggtaaaacgacactaactctggaacttattgcagcagcacagcgtgaaggcaaaacttgtgcgtttatcgatgcggagcacgctctggatcctgtatacgcgaagaagcttggcgtagatatcgatgcacttttggtttctcagcctgatacgggtgagcaagcgctagaaatctgtgacgcattagcgcgctctggtgctatcgacgtaatggttgtcgactctgtggcagcactgactccaaaagcagaaatcgaaggcgaaatgggcgacagccacatgggtctccaagctcgtatgctttctcaagcgatgcgtaagctaacaggtaacctgaagcagtctaactgtatgtgtatcttcatcaagcaaatccgtatgaagattggtgtgatgttcggtaacccagaaacaacaactggcggtaacgcacttaaattctacgcatcggttcgtcttgatatccgtcgtactggcgcaatcaaagaaggcgacgaagttgtaggtaacgaaactcgcatcaaagtcgttaagaacaagattgcagcaccatttaaagaagcaaacacgcagatcatgtatggtcaaggctttaaccgcgaaggtgagctggtagacttaggcgtgaagcacaaactggttgaaaaagcaggtgcttggtacagctacaatggcgacaagatcggtcagggcaaagcaaatgcttgtaattacctgcgtgaacatacagaagttgctcagactatcgacaagaaacttcgtgagatgcttttgtctccagctgtagctgagggacctgaagccggtgaaatgccagagaagaaagaagaagagttttaa

SEQ ID NO: 913 - protein, 348 aa, Vibrio natriegens
MDENKQKALAAALGQIEKQFGKGSIMRLGDNRAMDVETISTGSLSLDIALGAGGLPMGRIVEVYGPESSGKTTLTLELIAAAQREGKTCAFIDAEHALDPVYAKKLGVDIDALLVSQPDTGEQALEICDALARSGAIDVMVVDSVAALTPKAEIEGEMGDSHMGLQARMLSQAMRKLTGNLKQSNCMCIFIKQIRMKIGVMFGNPETTTGGNALKFYASVRLDIRRTGAIKEGDEVVGNETRIKVVKNKIAAPFKEANTQIMYGQGFNREGELVDLGVKHKLVEKAGAWYSYNGDKIGQGKANACNYLREHTEVAQTIDKKLREMLLSPAVAEGPEAGEMPEKKEEEF

SEQ ID NO: 914 - DNA, 1044 bp, Vibrio parahaemolyticus
  CDS (1)..(1044): transl_table=11
atggacgagaacaaacagaaagcgctcgccgctgcgctaggtcaaattgaaaagcaattcggtaaaggctctatcatgcgccttggtgataaccgcgcaatggatgtagaaaccatttcaacgggttcgctttctcttgatatcgctttgggtgctggtggtctaccaatgggtcgtatcgtagaaatctacggtccagaatcttcaggtaaaacaacgctaactctcgagcttatcgctgctgcacaacgtgaaggtaaaacttgtgcgtttatcgatgctgagcacgcgttggatcctgtgtacgctaaaaagcttggtgttgatatcgatgcgctattggtatctcagccagacactggtgagcaagctctagagatttgtgatgcattagctcgctctggcgccatcgacgtaatggttgttgactctgttgctgctctaacacctaaagctgagatcgaaggcgaaatgggcgacagccacatgggtctccaagctcgtatgctttctcaagcaatgcgtaagcttacaggtaacctgaaacagtctaactgtatgtgtatcttcatcaaccaaatccgtatgaagattggtgtgatgttcggtaaccctgaaacgactactggcggtaacgcgcttaagttttacgcttctgttcgtttagatatccgtcgtactggcgcaatcaaagaaggcgatgaagttgtaggtaacgaaacgcgtatcaaagtggttaagaacaagattgcagcaccatttaaagaagcaaacacgcaaatcatgtatggccaaggctttaaccgtgaaggtgagttgattgacttaggcgtgaagcacaagctagtagaaaaagcgggtgcttggtacagctacaatggcgataagattggtcaaggtaaagcaaacgcttgtaactacctgcgtgagcatccagaaatcgcgaaaacaatcgataccaaactgcgtgaaatgctactttctccagctcaaccagaagcacctgctgccggtgagaagcctgagcaagaagaagagttttaa

SEQ ID NO: 915 - protein, 347 aa, Vibrio parahaemolyticus
MDENKQKALAAALGQIEKQFGKGSIMRLGDNRAMDVETISTGSLSLDIALGAGGLPMGRIVEIYGPESSGKTTLTLELIAAAQREGKTCAFIDAEHALDPVYAKKLGVDIDALLVSQPDTGEQALEICDALARSGAIDVMVVDSVAALTPKAEIEGEMGDSHMGLQARMLSQAMRKLTGNLKQSNCMCIFINQIRMKIGVMFGNPETTTGGNALKFYASVRLDIRRTGAIKEGDEVVGNETRIKVVKNKIAAPFKEANTQIMYGQGFNREGELIDLGVKHKLVEKAGAWYSYNGDKIGQGKANACNYLREHPEIAKTIDTKLREMLLSPAQPEAPAAGEKPEQEEEF

SEQ ID NO: 916 - DNA, 996 bp, Wigglesworthia glossinidia brevipalpis
  CDS (1)..(996): transl_table=11
atgataattgaaaacaataaaaaaaaagctttagaaaaagctttagataaaattgaaaaacaattcggaaaaggatctataatgactcttggagaaaatagatctatggatatagaaactatttctacagggtctttgtctttagatattgctttaggcacaggaggtcttccaatgggaagaattgttgaaatttacggtcctgaatcttctggaaaaacaacattaacattagaagttatttatgaagcacaaaaaaagggtaaaatatgtgcatttatagatgctgaacatgctttagatccaatatatgctaaaaatctaggagtagatattaataatttattatgctctcaacctgataatggagagcaagctttagaaatttgtgattcattaactagatcaggagcagtagatcttattatagtagattctgtggcagcgttgactccaaaagctgaaatagatggagaaataggcgatttacatttaggattagcggctagaatgatgagccaggcaatgaggaagctggcaggaaatcttaaaaatgccaatactcttttgatttttatcaaccaaattcgagttaaaataggaactatatttggtagccctgaagttactactggagggaacgctttaaaattttatgcttcagtaagattggatattagaaaaattggaactattaaagatggagatattattataggaaacgaaactagagtaaaagtagtaaaaaataaaatatctgctccttttaggcaagcagaatttcaaattttatatggaaatggaataaacactgaaggagaattaatcactttaggagttaatcataatataattgaaaaatcaggttcatggtatagttataataaaaataaaataggacaaggaaaaaataatgcatgcaattttttaaaaaacaatccaaatatttctaaagaaatttctagaaaaatcagagaaattaatttgattaaataa

SEQ ID NO: 917 - protein, 331 aa, Wigglesworthia glossinidia brevipalpis
MIIENNKKKALEKALDKIEKQFGKGSIMTLGENRSMDIETISTGSLSLDIALGTGGLPMGRIVEIYGPESSGKTTLTLEVIYEAQKKGKICAFIDAEHALDPIYAKNLGVDINNLLCSQPDNGEQALEICDSLTRSGAVDLIIVDSVAALTPKAEIDGEIGDLHLGLAARMMSQAMRKLAGNLKNANTLLIFINQIRVKIGTIFGSPEVTTGGNALKFYASVRLDIRKIGTIKDGDIIIGNETRVKVVKNKISAPFRQAEFQILYGNGINTEGELITLGVNHNIIEKSGSWYSYNKNKIGQGKNNACNFLKNNPNISKEISRKIREINLIK

SEQ ID NO: 918 - DNA, 1068 bp, Wolbachia pipientis wMel
  CDS (1)..(1068): transl_table=11
atggcaagtaacccagaagaaagaaatagtgataaacaaaaagcgctagataacgcaataagccagattgaaaaagcattcggtaaaggtgcaataatgaagttgaagcaaaaccctgtagaaaaaatagacacaatatccacaggatcaattgcgcttgattcggctctaggtgttggaggtctgccaaaagggcgtataattgaaatatttggccccgagagttctggtaaaaccactcttgccttgcacgtgattgctgaagcacaaaaaaaaggaggatcatgcgcatttatcgatgcagaacatgcattggatgtcttatatgctcgtaaacttggggtaagcactgatgatttagtgatttcacaaccagacactggagagcaggcgttgcatattgttgagtatttagtgtgttctggtgcggttgatgtgatagttattgactctgtcgcagcattaactccaagagctgaaattgaaggtgatatgggtgatcaacatatggggctgcaagcaaggcttctaagtcatgggctacggaaactaacctctgccgtttcaaaagcgaactgtatattgatatttattaatcaaattcgtatgaaaataggagtagtgtatggaaatcctgaaactaccacgggtggaaatgcattaaaattctatacttctgtaaggcttgatataagaaaagttggtgtaataaaagacaaagaaaatattacaggtaatgaaacaagagttaaagttgtaaaaaataaagttgctcctccatttagagaagcgaaatttgatataatgtacaatgaaggtatatcaaaactcggagaaataatagatatgggagcaaagcttggtgtgcttgaaaaagcaggcgcttactattcatataacaacacacgtcttgggcaaggaagagagaatgtaaaaacttacctaaaaacaaacaaagaagtcgcaaatgaaatagaaacgaaaatcagagatttactcagaaatcatgataattctatcataatagacgaggatagtgagcaacttttagaagaatcagttttctga

SEQ ID NO: 919 - protein, 355 aa, Wolbachia pipientis wMel
MASNPEERNSDKQKALDNAISQIEKAFGKGAIMKLKQNPVEKIDTISTGSIALDSALGVGGLPKGRIIEIFGPESSGKTTLALHVIAEAQKKGGSCAFIDAEHALDVLYARKLGVSTDDLVISQPDTGEQALHIVEYLVCSGAVDVIVIDSVAALTPRAEIEGDMGDQHMGLQARLLSHGLRKLTSAVSKANCILIFINQIRMKIGVVYGNPETTTGGNALKFYTSVRLDIRKVGVIKDKENITGNETRVKVVKNKVAPPFREAKFDIMYNEGISKLGEIIDMGAKLGVLEKAGAYYSYNNTRLGQGRENVKTYLKTNKEVANEIETKIRDLLRNHDNSIIIDEDSEQLLEESVF

SEQ ID NO: 920 - DNA, 1053 bp, Wolinella succinogenes
  CDS (1)..(1053): transl_table=11
atggcactagatgagaacaaacgcaaagcgatcgatctagcgatcaaacagattgacaaggcctttggcaaaggcgccctcgtgcgacttggcgaaaaacccgtggaaaagatcgattcgattagcacgggctcattagggctcgacattgccctaggaatcggaggaatcccccaaggaagaatcatcgaaatctatggacctgagagctctggaaagaccacgctcgcacttcaagtgatcgctgagtgtcaaaaaaagggcggaatctgcgcttttatcgatgccgagcacgccctagatgtctcctacgccaaacgccttggggtggatgcagagaatcttcttgtctcccagcctgattatggtgaacaggcgttagagattctagagaccctcacacgaagcggagcggtcgatctcatcgtggtcgattcggtggctgccctcacccccaaaagtgaaattgatggcgatatgggcgatcaacacgtagggctccaagcacgcctcatgagccaagccctgcgaaaagtcacgggcgtgctccacaagatgaacaccaccgtgattttcatcaaccaaatccgtatgaaaatcggaatgatgggctatggaagccctgagacgaccacaggcggaaatgcgctcaaattctatgctagcgtgagaatcgatgtaagaagaatcgcctccctcaaacagggcgaacagcacattgggaatcgcgtcaaagccaaagtggtcaaaaacaaagtcgcgcccccctttagagaagcagaatttgacattatgtttggtgagggaatcagccaagaaggcgagctcatcgactatggcgtgaaactggacattgtcgataagagcggctcatggctcagttatggtgacaaaaaattaggtcaaggcaaagagaatgccaaagcctttttgaaagaaaacaaagaaattgcaaatgaaattcaggctaaaattatcggcgccatcggctcaagtgatgaaatcactacttttggggacgatgaagacgaatcagaaaacctagaatcataa

SEQ ID NO: 921 - protein, 350 aa, Wolinella succinogenes
MALDENKRKAIDLAIKQIDKAFGKGALVRLGEKPVEKIDSISTGSLGLDIALGIGGIPQGRIIEIYGPESSGKTTLALQVIAECQKKGGICAFIDAEHALDVSYAKRLGVDAENLLVSQPDYGEQALEILETLTRSGAVDLIVVDSVAALTPKSEIDGDMGDQHVGLQARLMSQALRKVTGVLHKMNTTVIFINQIRMKIGMMGYGSPETTTGGNALKFYASVRIDVRRIASLKQGEQHIGNRVKAKVVKNKVAPPFREAEFDIMFGEGISQEGELIDYGVKLDIVDKSGSWLSYGDKKLGQGKENAKAFLKENKEIANEIQAKIIGAIGSSDEITTFGDDEDESENLES

SEQ ID NO: 922 - DNA, 1035 bp, Xanthomonas axonopodis pv
  CDS (1)..(1035): transl_table=11
atggacgagaacaagaagcgcgccctttccgccgcactgagccagatcgaaaagcaattcggcaagggctcggtcatgcgcatgggcgaccgcgtcattgaggcggtcgaagtcatcccgaccggctcgctgatgctggatatcgccctggggatcggcggcctgccgaagggtcgcgtggtcgaaatctacggcccggaatcctccggcaagaccaccttgaccctgcaagccatcgccgagtgccagaagaacggcggcaccgctgccttcatcgatgccgagcacgcactggacccgatttatgcggccaagctgggcgtcaatgtcgacgacctgctgctgtcgcagccggataccggtgagcaggcactggaaattgccgacatgctggtgcgttcgggttcggttgatatcgtggtggtcgactcggtcgctgcactgacgccgaaggcggaaatcgaaggcgagatgggcgaccagctgccaggtttgcaggctcgcttgatgagccaggcgctgcgcaagctcaccggcaatatcaagcgctccaacacgctggtggtcttcatcaatcagctgcgcatgaagatcggcgtcatgatgccgggccagagcccggaagtgaccaccggcggcaacgcgctgaagttctacgcctcggtgcgtctggatatccgccgtatcggtgcgatcaagaagggcgacgagatcatcggcaaccagaccaagatcaaggtggtcaagaacaagctggcgcctccgttcaagcaggtcgtgaccgaaatcctgtatggcgaaggcatcagtcgcgagggcgaattgatcgacatgggcgtggaagccaagctggtcgacaaggccggcgcctggtacagctatggcgatgagcgcatcgggcagggcaaggacaacgcgcgaacctacctgcgcgacaactcgcaggttgcgacccggctggaagcggagctgcgtgagaagttccaacctgccgaagcaccgcgtgaagccggcgacgacgaagacaaggagtaa

SEQ ID NO: 923 - protein, 344 aa, Xanthomonas axonopodis pv
MDENKKRALSAALSQIEKQFGKGSVMRMGDRVIEAVEVIPTGSLMLDIALGIGGLPKGRVVEIYGPESSGKTTLTLQAIAECQKNGGTAAFIDAEHALDPIYAAKLGVNVDDLLLSQPDTGEQALEIADMLVRSGSVDIVVVDSVAALTPKAEIEGEMGDQLPGLQARLMSQALRKLTGNIKRSNTLVVFINQLRMKIGVMMPGQSPEVTTGGNALKFYASVRLDIRRIGAIKKGDEIIGNQTKIKVVKNKLAPPFKQVVTEILYGEGISREGELIDMGVEAKLVDKAGAWYSYGDERIGQGKDNARTYLRDNSQVATRLEAELREKFQPAEAPREAGDDEDKE

SEQ ID NO: 924 - DNA, 2122 bp, Xenorhabdus bovienii
  CDS (589)..(1665): transl_table=11
cagcttagtattgaacttggaaagaaactccaacggaaaaaattatccttaacctgtgcagaatcctgcacagggggctggattgctaaagtgatcacagatattgcgggaagttcggcctattttaaccgcagtttcgtgacctatagcaatgattctaaaaatgaaatgctgggtgtatcacaggcatcactggtgcagtttggtgcggtgagtgaacaggtcgttaaagaaatggcagtaggggcattaaaggcggccagagcagattttgctgtttctgtcagtggcatcgcaggtccggatggtggcagtgaagaaaaaccgacgggaacggtctactttgggtttacctaccgtaatggtgaggatgtacataccgtgacatatcgccagcattttacgggtgatcgcaatgcagtacggctccaggctgtcattttttctttaaaaacactgctggaagaaatcataaaaaattagcttgatgctgtatgattatacagtataattaattccagcactttggtatcagaaacggtttatcagcagtggggcagccccttcattgcttacgaaggagtaaacatggctaacgatgaaaacaaacaaaaagcactagcagcggcgctgggtcaaattgaaaaacaatttggtaaaggttctatcatgcgtctgggcgaaaaccgctcaatggatgttgaaactatctctactggctcactgtcactggatatagcattaggtgcgggtggtttgccaatgggccgtattgttgaaatatacgggcctgaatcttcgggtaagacaacattgacactgcaagttattgcttctgcccagcgtgaaggcaaaacctgtgcttttattgatgccgaacatgcccttgatccggtttatgccaaaaagttgggcgtagatattgataacctgctgtgctcccagcctgatacaggtgaacaggcactggaaatctgtgatgccttgtcacgctctggggcggttgacgtcatcgttgttgactccgttgctgcattgaccccgaaagcggaaatcgaaggtgagatcggcgattcccatatgggcttggcagctcgtatgatgagtcaggccatgcgtaagttggcaggtaacctgaaaaactcgaatactctgctaatctttatcaaccagatccgtatgaaaattggtgtgatgtttggtaacccagaaaccacaacaggtggtaatgcactgaaattttatgcatctgtccgtttggacatccgccgcactggttccgtaaaaaatggcgatgaagttgttggcagcgagactcgtgtgaaagtagtcaagaacaaaattgcggcaccgttcaaacaagctgaattccagatcttgtatggtgaaggtattaacacctttggcgaattggtcgacttgggcgttaagcacaaaatggtcgaaaaagcaggtgcatggtacagctataacggagataaaattgggcagggtaaagctaatgccacgatttacctgaaagagcacccagaagtctctgctgagctggataaaaaactgcgtgaattgctgttgaataatacaggtggattcagtagtgcagtctctgattatgtagccgattatgaagataacggtgaagaagtgaaaaacgaagagttctaattactcgttcactctgttgtgacaaactgttttctgaagaaccacatcctgtcgggatgtggtttttgtttttataggagtaatcaacatcattgatacagggatactgaaactggcttgacaaacagactttcagaaaatgtccagacgaattacaatgctgaaaagcggatgaatttatatgggattttacttcttatggaagacattctatcttaaccctattttaatttattcgtgagttgaaatggtgatgcgctataccacctcaaccatacatgaatctgttttttcagcttgatttcgggacaattatgagcaaaagcaccgctgagatccgtcaggcgtttcttgacttttttcacactaaagggcaccagatagtaccaagcagttcactggtgccaaataatgatccaacctgttgttcactaatgcagggatgaaccagtttaaa

SEQ ID NO: 925 - protein, 358 aa, Xenorhabdus bovienii
MANDENKQKALAAALGQIEKQFGKGSIMRLGENRSMDVETISTGSLSLDIALGAGGLPMGRIVEIYGPESSGKTTLTLQVIASAQREGKTCAFIDAEHALDPVYAKKLGVDIDNLLCSQPDTGEQALEICDALSRSGAVDVIVVDSVAALTPKAEIEGEIGDSHMGLAARMMSQAMRKLAGNLKNSNTLLIFINQIRMKIGVMFGNPETTTGGNALKFYASVRLDIRRTGSVKNGDEVVGSETRVKVVKNKIAAPFKQAEFQILYGEGINTFGELVDLGVKHKMVEKAGAWYSYNGDKIGQGKANATIYLKEHPEVSAELDKKLRELLLNNTGGFSSAVSDYVADYEDNGEEVKNEEF

SEQ ID NO: 926 - DNA, 1594 bp, Xenorhabdus nematophilus
  CDS (142)..(1218): transl_table=11
tttaaaaattttgttggaagaaatcataaaaaattagcttgatgctgtatgattatacagtataatcatgcagcagctttggtatcagaaacagtttatcagcagtgaggcagccccttcattgcttgcgaaggagtaaacatggctaacgatgaaaacaaacaaaaagcactcgcagcagcgcttggacagattgagaaacaatttggtaaaggttccatcatgcgtttgggtgaaaaccgctcaatggatgttgaaactatctctactggttccctgtcattggatatcgcactaggcgcaggtggtttgccaatgggccgtattgttgagatatatgggcctgaatcttccggtaaaacaacgttaacattgcaagtgatcgctgctgcccagcgtgaaggcagaacgtgtgcttttattgatgccgaacatgcccttgatccagtttatgctaaaaaactgggcgtagatattgataacctgttgtgttcgcagcctgataccggtgaacaggcgttggaaatctgtgatgctttatcccgttccggcgcagtggatgtcattattgttgactccgttgcggcattgacaccaaaagcggaaattgaaggtgaaatcggtgattctcatatggggctggcagcgcgtatgatgagtcaggccatgcgtaagctggcaggtaacttgaaaaattcaaataccctgttgatcttcatcaaccagatccgtatgaaaattggtgtgatgtttggtaaccctgaaacaccgccgggtggtaatgcgctgaaattctatgcgtctgtccgtttggatatccgccgtacgggttccgtgaaaaatggtgatgaagttgttggtagcgaaacgcgtgtgaaagtcgttaaaaacaaagttgcagcaccattcaaacaggctgaattccaaattctttatggggaaggtattaatactctgggagagttgatcgatctgagtgttaaacacaaaatggtagaaaaagcaggtgcatggtatagctacaatggtgacaaaatcgggcagggtaaagccaacgccacgatttacctgaaagagcatccagaaactgctgctgagttgaataagaaactgcgtgatttgttgttgcacaatactggggatttcagtagcgcagcttcagattatgtgacagattacgaagacaacactgaagaagtgaataacgaagagttctaattgcttttcaatcactatctcgttttgaaaaccacatctatatcgggtgtggttttttgcttttaatgagggaataaacattcttgaaataagtatatcgaaacaggcttaatgaacagactttcagaaaatgcccagacgaattacaatgctgaaaagcgaatggatttatatgggattttacttcttacggaagacattctatcttaaccctattttaatttattcgtgagttgaaatgatgatgcgatatatcatcttaaacattcacaaatcttttttttcagcttgatttcgggacaattatgagcaaaagcaccgctgagatccgtcaagcgtttcttgacttttttcatactaaagggcaccaggtcgt

SEQ ID NO: 927 - protein, 358 aa, Xenorhabdus nematophilus
MANDENKQKALAAALGQIEKQFGKGSIMRLGENRSMDVETISTGSLSLDIALGAGGLPMGRIVEIYGPESSGKTTLTLQVIAAAQREGRTCAFIDAEHALDPVYAKKLGVDIDNLLCSQPDTGEQALEICDALSRSGAVDVIIVDSVAALTPKAEIEGEIGDSHMGLAARMMSQAMRKLAGNLKNSNTLLIFINQIRMKIGVMFGNPETPPGGNALKFYASVRLDIRRTGSVKNGDEVVGSETRVKVVKNKVAAPFKQAEFQILYGEGINTLGELIDLSVKHKMVEKAGAWYSYNGDKIGQGKANATIYLKEHPETAAELNKKLRDLLLHNTGDFSSAASDYVTDYEDNTEEVNNEEF

SEQ ID NO: 928 - DNA, 1044 bp, Xylella fastidiosa
  CDS (1)..(1044): transl_table=11
atggatgagaacaagaaacgcgccctttctgtcgctttaagccagattgaaaaacagttcggcaaggggtccgtgatgcggatgggcgatcgcgtgatcgaggccgtagaggcgatcccgacaggttcgctcatgttggatctggccctggggatcggtggtttgccaaagggacgtgtcgtggaaatctatgggccggaatcttctgggaagaccacattgactttgcaggcgatcgctcaatgccagaagaagggaggtacagcagcgttcattgatgctgagcatgccttggatccgatttatgcgggcaagttaggcgtcaatgttgatgatttgttgttgtctcagccagatactggggagcaggctctggaaatcgctgacatgctggtgcgctcggggtcgatcgatatcatggtcattgattcggttgcggcactcacgccaagggcggagattgagggtgagatgggagatcagttgcccggtcttcaggcgcgcttgatgagccaggcactgcgtaaattgaccggcaatatcaagcgctctaatacgctggtgatctttatcaaccagttgcgtatgaaaattggggtcatgatgccgggtcaaagccctgaaactacgacagggggtaatgcgctgaagttctatgcttcagtgcgtttggatattcgccgtattggcgcgatcaagaagggtgacgaaattatcgggaatcaaaccaaaatcaaggttgttaaaaacaagttggcgcctcccttcaaacaagtcgtgactgagattctctatggtgaaggcatcagtcgtgaaggggaattgattgagatgggcgtggaggccaagttggttgagaaagccggcgcttggtatagctacggtggtgagcggatcgggcaaggaaaagataatgcgcgcggctatctacgtgaaaacccgcatcttgcggccaagcttgaggctgatttgcgtgagaaatttgagccgaccgagctttctcgagaagagggcgatgaagatacgctcgaagatacaatgtaa

SEQ ID NO: 929 - protein, 347 aa, Xylella fastidiosa
MDENKKRALSVALSQIEKQFGKGSVMRMGDRVIEAVEAIPTGSLMLDLALGIGGLPKGRVVEIYGPESSGKTTLTLQAIAQCQKKGGTAAFIDAEHALDPIYAGKLGVNVDDLLLSQPDTGEQALEIADMLVRSGSIDIMVIDSVAALTPRAEIEGEMGDQLPGLQARLMSQALRKLTGNIKRSNTLVIFINQLRMKIGVMMPGQSPETTTGGNALKFYASVRLDIRRIGAIKKGDEIIGNQTKIKVVKNKLAPPFKQVVTEILYGEGISREGELIEMGVEAKLVEKAGAWYSYGGERIGQGKDNARGYLRENPHLAAKLEADLREKFEPTELSREEGDEDTLEDTM

SEQ ID NO: 930 - DNA, 1044 bp, Xylella fastidiosa
  CDS (1)..(1044): transl_table=11
atggatgagaacaagaaacgcgccctttctgtcgctttaagccagattgaaaaacagttcggcaaggggtccgtgatgcggatgggcgatcgcgtgatcgaagccgtagaggcgatcccgacaggttcgctcatgttggatctggccctggggataggtggtttgccaaagggacgtgtcgtggaaatctatgggccggaatcttctgggaagaccacattgactttgcaggcgatcgctcaatgccagaagaggggaggtacagcagcgttcattgatgctgagcatgccttggatccgatttatgcgggcaagttaggcgtcaatgttgatgatttgttgttgtctcagccagatactggggagcaggctctggaaatcgctgacatgctggtgcgctcggggtcgatcgatatcatggttattgattcggttgcggcactcacgccaagggcggagattgagggtgagatgggagatcagttgcccggtcttcaggcgcgattgatgagccaggcgctgcgtaaattgaccggcaatatcaagcgctctaatacgctggtgatttttatcaaccagttgcgtatgaaaattgggatcatgatgccgggtcaaagccctgaaactacgacagggggtaatgcgctgaagttctatgcttctgtgcgtttggatattcgccgtattggcgcgatcaagaaaggtgacgaaattatcgggaatcaaaccaaaatcaaggttgttaaaaacaagttggcgcctcccttcaaacaagtcgtgactgagattctctatggtgaaggcatcagtcgtgaaggggaattgattgaaatgggcgtggaggccaagttggttgagaaagccggcgcttggtatagctatggtggtgagcggatcgggcaaggaaaagataatgcgcgtggctatctacgcgaaaacccgcattttgcggccaagcttgaggctgatttgcgtgagaaatttgagccgaccgagctttctcgagaagagggcgatgaagatacgctcgaagatgcaatgtaa

SEQ ID NO: 931 - protein, 347 aa, Xylella fastidiosa
MDENKKRALSVALSQIEKQFGKGSVMRMGDRVIEAVEAIPTGSLMLDLALGIGGLPKGRVVEIYGPESSGKTTLTLQAIAQCQKRGGTAAFIDAEHALDPIYAGKLGVNVDDLLLSQPDTGEQALEIADMLVRSGSIDIMVIDSVAALTPRAEIEGEMGDQLPGLQARLMSQALRKLTGNIKRSNTLVIFINQLRMKIGIMMPGQSPETTTGGNALKFYASVRLDIRRIGAIKKGDEIIGNQTKIKVVKNKLAPPFKQVVTEILYGEGISREGELIEMGVEAKLVEKAGAWYSYGGERIGQGKDNARGYLRENPHFAAKLEADLREKFEPTELSREEGDEDTLEDAM

SEQ ID NO: 932 - DNA, 1071 bp, Yersinia pestis
  CDS (1)..(1071): transl_table=11
atggctattgatgagaataaacaaaaggcgttagcagcagcactgggccaaattgaaaaacaattcggtaaaggctctattatgcgccttggcgaagaccgctcaatggatgttgaaaccatctctaccggctccctttcccttgatattgcactgggggctggtggcttaccaatggggcgtatcgttgagatttatggcccagaatcatcaggtaagacgacactgacattacaggttatcgccgccgcacagcgtgaaggcaaaacgtgtgcatttatcgatgccgaacatgcccttgacccaatctatgccaagaaattgggtgtagatattgataacctattgtgttctcagccagatactggcgagcaggcactggaaatttgtgatgcgctgactcgctctggtgcggttgacgttatcatcgttgactccgtagcggcattgacaccaaaagctgaaattgaaggtgaaattggcgattctcatatgggccttgccgcgcgtatgatgagccaggctatgcgtaagctggcgggtaacctgaagaatgcgaataccttactgatttttatcaaccaaatccgcatgaaaattggcgtgatgtttggtaacccagaaaccactaccggtggcaacgctcttaaattttacgcttctgtacgtttggatatccgccgtattggtgcagtaaaagatggtgatgtggtcgtggggagtgaaacccgcgttaaagtcgttaaaaacaagattgctgcgccattcaaacaagctgaattccagatcctctacggtgaaggcattaatatcaacggtgaactggttgacttaggtgttaaacacaaactgattgagaaagctggcgcatggtatagctataacggtgataaaattggtcagggtaaagccaatgccagcaactatttaaaagaaaacccagccattgctgctgagttagataaaaaactgcgtgaaatgctacttaatggcggcaatggtgaacaacctgttgctgcggcaacagcagaattcgccgatggtgcagatgaaaccaacgaagaattttaa

SEQ ID NO: 933 - protein, 356 aa, Yersinia pestis
MAIDENKQKALAAALGQIEKQFGKGSIMRLGEDRSMDVETISTGSLSLDIALGAGGLPMGRIVEIYGPESSGKTTLTLQVIAAAQREGKTCAFIDAEHALDPIYAKKLGVDIDNLLCSQPDTGEQALEICDALTRSGAVDVIIVDSVAALTPKAEIEGEIGDSHMGLAARMMSQAMRKLAGNLKNANTLLIFINQIRMKIGVMFGNPETTTGGNALKFYASVRLDIRRIGAVKDGDVVVGSETRVKVVKNKIAAPFKQAEFQILYGEGININGELVDLGVKHKLIEKAGAWYSYNGDKIGQGKANASNYLKENPAIAAELDKKLREMLLNGGNGEQPVAAATAEFADGADETNEEF

SEQ ID NO: 934 - DNA, 1071 bp, Yersinia pseudotuberculosis
  CDS (1)..(1071): transl_table=11
atggctattgatgagaataaacaaaaggcgttagcagcagcactgggccaaattgaaaaacaattcggtaaaggctctattatgcgccttggcgaagaccgctcaatggatgttgaaaccatctctaccggttccctttcccttgatattgcactgggggctggtggcttaccaatggggcgtatcgttgagatttatggcccagaatcatcaggtaagacgacactgacattacaggttatcgccgccgcacagcgtgaaggcaaaacgtgtgcatttatcgatgccgaacatgcccttgacccaatctatgccaagaaattgggtgtagatattgataacctactgtgttctcagccagatactggcgagcaggcactggaaatttgtgatgcgctgactcgctctggtgcggttgacgttatcatcgttgactccgtagcggcattgacaccaaaagctgaaattgaaggtgaaattggcgattctcatatgggccttgccgcgcgtatgatgagccaggctatgcgtaagctggcgggtaacctgaagaatgcgaataccttactgatttttatcaaccaaatccgcatgaaaattggcgtgatgtttggtaacccagaaaccactaccggtggcaacgctcttaaattttacgcttctgtacgtttggatatccgccgtattggtgcagtaaaagatggtgatgtggtcgtggggagtgaaacccgcgttaaagtcgttaaaaacaagattgccgcgccattcaaacaagctgaattccagatcctctacggtgaaggcattaacatcaacggtgaactggttgacttaggtgttaaacacaaactgattgagaaagctggcgcatggtatagctataacggtgataaaattggtcagggtaaagccaatgccagcaactatttaaaagaaaacccagccattgctgctgagttagataaaaaactgcgtgaaatgctacttaatggcggcaatggtgaacaacctgttgctgcggcaacagcagaattcgccgatggtgtagatgaaaccaacgaagaattttaa

SEQ ID NO: 935 - protein, 356 aa, Yersinia pseudotuberculosis
MAIDENKQKALAAALGQIEKQFGKGSIMRLGEDRSMDVETISTGSLSLDIALGAGGLPMGRIVEIYGPESSGKTTLTLQVIAAAQREGKTCAFIDAEHALDPIYAKKLGVDIDNLLCSQPDTGEQALEICDALTRSGAVDVIIVDSVAALTPKAEIEGEIGDSHMGLAARMMSQAMRKLAGNLKNANTLLIFINQIRMKIGVMFGNPETTTGGNALKFYASVRLDIRRIGAVKDGDVVVGSETRVKVVKNKIAAPFKQAEFQILYGEGININGELVDLGVKHKLIEKAGAWYSYNGDKIGQGKANASNYLKENPAIAAELDKKLREMLLNGGNGEQPVAAATAEFADGVDETNEEF

SEQ ID NO: 936 - DNA, 1020 bp, Zymomonas mobilis
  CDS (1)..(1020): transl_table=11
atggacaagcaaaaagcccttgaagcggctttagctcagattgaccgcgcttttggtaaaggttcggttatgcgcttggggtctcgtgaaaaaatcgagattgatacaatttccagcggatcacttggccttgatattgcgctgggcattggcggcttgccccgtggccgtatcgtcgaaatctatggtcctgaaagctcgggtaaaacaactttagccctccatgctatcgccgaagcacaaaaagcaggtggaacagcggcctttgtcgatgctgaacatgcgcttgatccggtctatgccaaaaaactgggtgttaatacggatgatctaatcgtctctcagcctgatacgggtgagcaggctctggaaattacagataccctgatccgttctaacgctgttgatatattggttgtcgattctgttgcggccttaacgcctcgtgctgaaatcgaaggcgaaatgggcgatagtcacgttggtttgcaagcccgtttgatgagtcaggcgcttcgcaaaattaccggctcaatcaaccgctctcaaactttggttatttttattaaccaagtccggatgaaaatcggggttatgtatggcaaccctgaaacaacaacgggcggtaatgctttgaaattctatgccagcgttcggcttgatatccgtcgtgtaggacaaattaaagatcgcgatgaaatcgttggtaatgctacccgtgtcaaagtggtaaaaaacaagctggctccgcctttcaagcaggttgaattcgatatcatgtatggagaaggtgtctccaagatgggcgaaattctcgatctgggcgtaaaagccggtattatcgacaagtcaggctcatggttcagtcatgattccgttcgcatcggtcagggacgtgaaaatgccaaaacgttcttgcgtgaacatcctgaaatgactgaaaaaattgaaaaaatgattcgtcataatacggctgaaattgccgacgaaatgctggatccatctatccctgaagattag

SEQ ID NO: 937 - protein, 339 aa, Zymomonas mobilis
MDKQKALEAALAQIDRAFGKGSVMRLGSREKIEIDTISSGSLGLDIALGIGGLPRGRIVEIYGPESSGKTTLALHAIAEAQKAGGTAAFVDAEHALDPVYAKKLGVNTDDLIVSQPDTGEQALEITDTLIRSNAVDILVVDSVAALTPRAEIEGEMGDSHVGLQARLMSQALRKITGSINRSQTLVIFINQVRMKIGVMYGNPETTTGGNALKFYASVRLDIRRVGQIKDRDEIVGNATRVKVVKNKLAPPFKQVEFDIMYGEGVSKMGEILDLGVKAGIIDKSGSWFSHDSVRIGQGRENAKTFLREHPEMTEKIEKMIRHNTAEIADEMLDPSIPED

SEQ ID NO: 938 - DNA, 1293 bp, Zea mays
  CDS (1)..(1293)
atggcgatcctccttaggcgcgcgtcgctgcggcgcgtcatcgccttcgccgccgcctcctcctcctcctcttctttgcactctgagatttataagcaaggggtttgtggatccatgtttcattgccgagagttcgcatcaaaagccaaaaaaaagaagtcaagtggaacagactccgatgaggagagtatgtcaaagaaagacttggctttacaccaggctatcgatcaaataacgtctgcatttgggaagggggcaataatgtggcttgggcgttcgcaaggccttagagatgtacctgttgtgtctactgggtctttcgctttggatatggctctaggaactggtggtcttccaaaggggcgtgtcatagaggtctatggtccagaggcttcaggcaagacaacacttgctctacatgtcattgcagaagcacaaaagaatgggggttactgtgcctttgtagatgcagaacacgctttggatccagctcttgcagagtcaattggtgttgacactaacaatttgctcgtctctcagccagactgcgctgagcaagcactcagtcttgtggacacactgattcgaagtggatctgttgatgttgttgtagtagacagtgtagctgcgcttgttccaaagactgagcttgatggtgagatgggtgatgcacatgttgctcttcaggctaggttgatgagccaagctcttcgcaagcttagccactcactttcactttcgcagacagttttgttatttattaatcagatcagggccaaggtagccacatttggatttggaggaccaactgaggtcacttctggtggtaacgccttgaagttttatgcttctgttcgcttgaacatcaggcgtattggttttttaaaggaaggtgaagagacaataggtagtcaggttgctgtgaagattgtaaaaaataagcatgccccacccttcaagactgcacagtttgagcttgaatttggaaaggggatatgccgcagttctgagctttttgaacttgggttgaagcacaagcttatccaaaagactggcggtgcatattatagattcaatgatatgagtttcaaaggtaaaaataaccttaaatcttaccttactgaaaacaagagtgttgcaaatgatctggagacgaaactaaggagattgatgggaaccgaagcacctaaagagcaggaggcagaagacagttcgccgagtgatttgcctgaagaggttgtcacacctgaagcatcctcagaagaggatatgggagtcgtaatcgaggcttga

SEQ ID NO: 939 - protein, 430 aa, Zea mays
MAILLRRASLRRVIAFAAASSSSSSLHSEIYKQGVCGSMFHCREFASKAKKKKSSGTDSDEESMSKKDLALHQAIDQITSAFGKGAIMWLGRSQGLRDVPVVSTGSFALDMALGTGGLPKGRVIEVYGPEASGKTTLALHVIAEAQKNGGYCAFVDAEHALDPALAESIGVDTNNLLVSQPDCAEQALSLVDTLIRSGSVDVVVVDSVAALVPKTELDGEMGDAHVALQARLMSQALRKLSHSLSLSQTVLLFINQIRAKVATFGFGGPTEVTSGGNALKFYASVRLNIRRIGFLKEGEETIGSQVAVKIVKNKHAPPFKTAQFELEFGKGICRSSELFELGLKHKLIQKTGGAYYRFNDMSFKGKNNLKSYLTENKSVANDLETKLRRLMGTEAPKEQEAEDSSPSDLPEEVVTPEASSEEDMGVVIEA

SEQ ID NO: 940 - DNA, 1077 bp, Zea mays
  CDS (1)..(1077)
atgttactcaggaatctgtacaaatttccagttgatatgcagttagactatgagagtgatccccctcttgacgatacaaaagctattgagaaggagtcatcacttaatgttgctgtttctcaactcgcaattgacttcgatagagactctaatttatgtttggagcgattttcccgtgcaaggaaagcatctgtagtctctactggttctcttaagcttgacctcgctctcggcgttggaggattaccgaagggtagaatggtggagatatatgggaaagaagcatctgggaagacaacactcgcgcttcatgttattaaggaagctcaaaagaatggaggttattgtgcttatattgatgcagaaaatgccttcaacccttcatttgctgaatctattggcgtagacagtgaaaggctcttgatagcccaacctgattctgctgaaaattctctaagcattgtaaacactcttgttggtggttctgttgctgttgttgttgtggacagtgtggcagcacttattcccaaatgtgaaattgaaggtgaaatatacacaaattgtggagacatccaatcccatttgatgactcgggcccttagaaaaattcagtacactttatgtcgatctgaaacacttattatttttgtgaatcaggttagaacaaagcggacatcaagtaatcctgggatctacaaggaggtgccttgcggtggtaatgcactaggattctatgctgcagtcagaatgaggacttcaaggagagaactgcgctatagtgaagatgaggctaccggcgtaggtatatcagtgcagatcatcaagaacaaattggctccagcgaacctgaagaaggaagccggcatcgacatcacattcggtaaggggatctgccacgagtcggagatcctggagacggcttcctccgtcggagtgatcctgaaagacgggtgtgggtattggatcaacaacgagttcctggcaggcaaggtggaagcggagaagttcctgcgtgaaaacgctgcagtggcagatgagatctgcaataccgtgaggaacgagttcttgcaaaggtga

SEQ ID NO: 941 - protein, 358 aa, Zea mays
MLLRNLYKFPVDMQLDYESDPPLDDTKAIEKESSLNVAVSQLAIDFDRDSNLCLERFSRARKASVVSTGSLKLDLALGVGGLPKGRMVEIYGKEASGKTTLALHVIKEAQKNGGYCAYIDAENAFNPSFAESIGVDSERLLIAQPDSAENSLSIVNTLVGGSVAVVVVDSVAALIPKCEIEGEIYTNCGDIQSHLMTRALRKIQYTLCRSETLIIFVNQVRTKRTSSNPGIYKEVPCGGNALGFYAAVRMRTSRRELRYSEDEATGVGISVQIIKNKLAPANLKKEAGIDITFGKGICHESEILETASSVGVILKDGCGYWINNEFLAGKVEAEKFLRENAAVADEICNTVRNEFLQR

SEQ ID NO: 942 - DNA, 1173 bp, Brassica napus
  CDS (1)..(1173)
atgggtcgtctctcactaaccagttcgattcacagattccgcttcttctcctacttatctcagcataatgtaagaagaggtgttctcgcttgctctagctatggaagtcattatctttcgtctttagctgaagcttcagactgtgagcttgacgaatatccagaagatgataccaacataacggagaaagacactaatctccgttcagcattatcacagctctcagtgtcaggcgtcttcgatcaagactctaagctctggctgcagcgcttctccagaacaaggagagtctctgttatatccaccggctcactcaaccttgatctagctctaggcgttggaggcttgccaaagggaagaatggttgaggtttacggcaaagaagcttctggaaagacaactctagctctccacatcatcaaggaagctcagaagctcggaggctattgcgcttaccttgacgtggagaacgccatggatcctacgctagctgagtcgataggtgtgaacacggaggagcttctgatatcgagacctgattccgctgaaaacatgctgagtattgtcgatgtgttgaccaagtgtggatcggtagatgttattgtggttgatagtgttgctgctcttgtccctcaatgtgaagttggtgctcctctaggagaaagttacagagacagacaatcagtgataatgacgcaggcgcttaggaaaatacactactcggttgctaattctcggacgctcattgtttttcttaatcaggtcagatcacatgccaaagctaacatgcgtttcccacattctgaagaagtgacttgtgggggaaacgcattgcggtttcaggcagctatacgactcaaaatgataagaacagggctgattaagactgatagtgaggtaagtggtctgaatgtgtgcgtggaagtggtgaaaaacaaactgacgccagggaagaagaaatctgaattggggattcacttcggtcgtggcttctacgtggagcgtgaggtgttagaattggcttgtgagcatggagttattgcaagagaaggtaatagccatttgattgaaggcgaggttgttgatggcaaagacgcagctgaaaagtatctgacggagaataagaaggtccttgataccgtcatcaatatcctgaggaagcagctcttctag

SEQ ID NO: 943 - protein, 390 aa, Brassica napus
MGRLSLTSSIHRFRFFSYLSQHNVRRGVLACSSYGSHYLSSLAEASDCELDEYPEDDTNITEKDTNLRSALSQLSVSGVFDQDSKLWLQRFSRTRRVSVISTGSLNLDLALGVGGLPKGRMVEVYGKEASGKTTLALHIIKEAQKLGGYCAYLDVENAMDPTLAESIGVNTEELLISRPDSAENMLSIVDVLTKCGSVDVIVVDSVAALVPQCEVGAPLGESYRDRQSVIMTQALRKIHYSVANSRTLIVFLNQVRSHAKANMRFPHSEEVTCGGNALRFQAAIRLKMIRTGLIKTDSEVSGLNVCVEVVKNKLTPGKKKSELGIHFGRGFYVEREVLELACEHGVIAREGNSHLIEGEVVDGKDAAEKYLTENKKVLDTVINILRKQLF

SEQ ID NO: 944 - DNA, 1278 bp, Zea mays
  CDS (1)..(1278)
atgacgaccctcctcaggcgcgcgtcgctgcggcgcgtcattgccgccgccgccgcctcttctttgcaccctgagagctataagcaagggatctgtggatccacatttcattgccgagagttcgcatcaaaagcaaaaaagaagtcaagtggaacagactctggggaggagaacatgtcaaagaaagacttggctttacaccaggctattgatcagataacgtctgcatttgggaagggggcaataatgtggcttgggcgttcacaaggccatagagatgtaccagtcgtgtctactgggtctttcgctttggatatggctctaggaactggtggtcttccaaaggggcgtgtcatagaggtctatggtccagaggcttcaggcaagacaacacttgctctacatgtcattgcagaagcacaaaagaatgggggttactgtgcctttgtagatgcagaacacgctttggatccagctcttgcagagtcaattggtgttgacactaacaatttgctcgtctctcagccagactgcgctgagcaagcactcagtcttgtggacacactgattcgaagtggatctgttgatgttgttgtagtagacagtgtagctgcgcttgttccaaagactgagcttgatggtgagatgggtgatgcacatgttgctcttcaggctaggttgatgagccaagcccttcgcaagcttagccactcactttcactttcgcaaacaattttgttatttattaatcagatcagggccaaggtagccacatttggatttggaggaccaactgaggttacttctggtggcaacgccttgaagttttatgcgtctgttcgcttgaacatcaggcgtattggtttggtaaagaaaggcgaagagacaataggtagtcagattgctgtgaagattgtaaaaaacaagcatgccccacccttcaagactgcacagtttgagcttgaatttggaaaggggatatgccgcagttctgagctttttgaacttggattgaagcacaagcttatccgaaagagtggtggttcatattatagtttcaatggtaaggctttcaatggtaaaagtaaccttaaatcttaccttactgaaaacaagagcgttgcaaatgatctggagatggaactaaagagattgatgggaactgatgcgtctaaagagcaggaggcaggagacagttcgcagagtgatttgcctgaagagagtgtcacacctgaagcatcgtcagaagaggatctgggagccataattgaaggttag

SEQ ID NO: 945 - protein, 425 aa, Zea mays
MTTLLRRASLRRVIAAAAASSLHPESYKQGICGSTFHCREFASKAKKKSSGTDSGEENMSKKDLALHQAIDQITSAFGKGAIMWLGRSQGHRDVPVVSTGSFALDMALGTGGLPKGRVIEVYGPEASGKTTLALHVIAEAQKNGGYCAFVDAEHALDPALAESIGVDTNNLLVSQPDCAEQALSLVDTLIRSGSVDVVVVDSVAALVPKTELDGEMGDAHVALQARLMSQALRKLSHSLSLSQTILLFINQIRAKVATFGFGGPTEVTSGGNALKFYASVRLNIRRIGLVKKGEETIGSQIAVKIVKNKHAPPFKTAQFELEFGKGICRSSELFELGLKHKLIRKSGGSYYSFNGKAFNGKSNLKSYLTENKSVANDLEMELKRLMGTDASKEQEAGDSSQSDLPEESVTPEASSEEDLGAIIEG

SEQ ID NO: 946 - DNA, 1299 bp, Glycine max
  CDS (1)..(1299)
atggcgagtctgcttcggaacgctaacacatccctcctcaaacgttctctcttccactccgaccttctaacgcgcttttgctttaaaccgggagtgttgggcacgtctcaagttttaagcttttcaactcgtaaaaggaggtctaaatcagatggaagtgactcaggtgaagagaacatgtctaagaaagatatggcattacaacaagctattgatcaaatcacatctgcatatggaaagggatctatcatgtggcttggtcgttccatggcaccaaaaaatgtacctgtggtgtctactggttcttttgctctggatatagcacttggggttggaggtcttccaaaggggcgtgttgtggaaatatttggtccagaggcttctgggaaaacaactcttgctttgcatatgattgcggaagcacaaaagctaggaggctactgtgcctttgttgatgctgagcatgcacttgataagacacttgcagagtcaattggtgtagatactaagaacttgcttctctcacaacccgattgtggtgaacaagcacttagccttgtggataccttaatccggagtggttcagttgatgcaattgttgttgatagtgtagctgctcttgttcctaaaggcgagcttgatggggagatgggtgatgctcacatggcaatgcaggctaggttgatgagccaggctcttcggaaattgtgccactccttgtcactttcacagtgtatattagtttttataaaccaggtgaggtcaaaaaattctacttttgggggatatggtgggcccactgaagttacttgtggtggtaatgcactgaagttttatgcttctgtgcggctaaatatcaaaagaattgggtttgtcaagaagggtgaagagactttaggaagtcaggttcttgtcaaggttgtgaagaacaagcatgcccctccatttaaaactgcacagtttgagattgagttcggcaagggtataagtagagaagcggagatcatagagttgagcgtaaaatacaaaatcataaagaagagtggttcattttttgaatataatggccggaatttccatggcaaggatgctctaaagagattcctggcggagagtgatggagtacaagaattagcaacaatgctcagggagaagattcttgatgctgagccagaactggagccagaggagcaggagatgatgggagatgttatggaactaatggaagaaatggtatcgcttgattccactgatgaagcagcttctcgtgctcctgcccctgttgctgcagaagcttaa

SEQ ID NO: 947 - protein, 432 aa, Glycine max
MASLLRNANTSLLKRSLFHSDLLTRFCFKPGVLGTSQVLSFSTRKRRSKSDGSDSGEENMSKKDMALQQAIDQITSAYGKGSIMWLGRSMAPKNVPVVSTGSFALDIALGVGGLPKGRVVEIFGPEASGKTTLALHMIAEAQKLGGYCAFVDAEHALDKTLAESIGVDTKNLLLSQPDCGEQALSLVDTLIRSGSVDAIVVDSVAALVPKGELDGEMGDAHMAMQARLMSQALRKLCHSLSLSQCILVFINQVRSKNSTFGGYGGPTEVTCGGNALKFYASVRLNIKRIGFVKKGEETLGSQVLVKVVKNKHAPPFKTAQFEIEFGKGISREAEIIELSVKYKIIKKSGSFFEYNGRNFHGKDALKRFLAESDGVQELATMLREKILDAEPELEPEEQEMMGDVMELMEEMVSLDSTDEAASRAPAPVAAEA

SEQ ID NO: 948 - DNA, 1308 bp, Triticum aestivum
  CDS (1)..(1308)
atggcgaccctcctgaggcgcgcgtcgctgcggcgggccatcgcctccgccgcctcggccgccaccgcctccgcctcctgccccgagagctataggcaggtgatctgtggctctacctttcattgccgagatttcgcatctaaagccaaaaagaagtcaaagtcaagtggcaccgactccggtgaggagaatatgtcaaagaaagacttggctttacatcaggccatcgatcaaataacaacttcgtttgggaaaggagcaataatgtggcttggccgctctgaaggtcatagagaagtacctgttgtgtctaccggatctttctctttggatctggcactgggaattggtgggcttccaaagggacgtgttgtagaggtttacggcccagaggcttcaggaaagacaactcttgctcttcacgttattgcagaagcacaaaagcttagcggcggtggttattgtgcatttgtagatgcagagcatgctttggatccaactctggcagagtcgattggtgtcgacactagtaacttacttctctctcagccagactctgctgagcaggcactcagtcttgtagacacgctgattcgaagtggctctgttgatgttgttgttgttgacagtgtagcagctcttgtccccaagaccgagcttgatggagagatgggtgatgcacatgtggctctccaagccagactgatgagtcaagctcttcgcaagctgagccattctctttcactatcccagacagttttgctatttattaatcagatcaggtctaaggtacagacatttgggggaggattaggagggccacaagaggtcacttccggtggaaatgcccttaaattttatgcctcggtccgcctgaacatcaggcgaattggtatggtaaagaaaggtgaagagattataggaagtcaggttactgtgaagattgtgaaaaacaagcatgccccaccgttcaggactgcacagtttgagctggaatttggaaaaggaatatgccgcagctcagagcttttcgatcttggggtaaagcacaagcttgttaagaagaccgggggcgcgtactactctttcaacgaacagcagttccatggtaaagatgccgttaaagctttccttacaaaaaatgagagtgttgcgaaagaactggagatggagctaaggagattgatccaaactgaaccgcctagaaagccggaggctgaggacgatctgctggacgattcgcctgaagagattgtcagacctgaaacgtcatcggaagaggatatggccgctataatcagggcttaa

SEQ ID NO: 949 - protein, 435 aa, Triticum aestivum
MATLLRRASLRRAIASAASAATASASCPESYRQVICGSTFHCRDFASKAKKKSKSSGTDSGEENMSKKDLALHQAIDQITTSFGKGAIMWLGRSEGHREVPVVSTGSFSLDLALGIGGLPKGRVVEVYGPEASGKTTLALHVIAEAQKLSGGGYCAFVDAEHALDPTLAESIGVDTSNLLLSQPDSAEQALSLVDTLIRSGSVDVVVVDSVAALVPKTELDGEMGDAHVALQARLMSQALRKLSHSLSLSQTVLLFINQIRSKVQTFGGGLGGPQEVTSGGNALKFYASVRLNIRRIGMVKKGEEIIGSQVTVKIVKNKHAPPFRTAQFELEFGKGICRSSELFDLGVKHKLVKKTGGAYYSFNEQQFHGKDAVKAFLTKNESVAKELEMELRRLIQTEPPRKPEAEDDLLDDSPEEIVRPETSSEEDMAAIIRA

SEQ ID NO: 950 - DNA, 1293 bp, Zea mays
  CDS (1)..(1293)
atggcgatcctccttaggcgcgcgtcgctgcggcgcgtcatcgccttcgccgccgcctcctcctcctcctcttctttgcactctgagatttataagcaaggggtttgtggatccatgtttcattgccgagagttcgcatcaaaagccaaaaaaaagaagtcaagtggaacagactccgatgaggagagtatgtcaaagaaagacttggctttacaccaggctatccatcaaataacgtctgcatttgggaagggggcaataatgtggcttgggcgttcgcaaggccttagagatgtacctgttgtgtctactgggtctttcgctttggatatggctctaggaactggtggtcttccaaaggggcgtgtcatagaggtctatggtccagaggcttcaggcaagacaacacttgctctacatgtcattgcagaagcacaaaagaatgggggttactgtgcctttgtagatgcagaacacgctttggatccagctctcgcagagtcaattggtgttgacactaacaatttactcctctctcagccagactgcgctgagcaagcactcagtcttgtggacacactgattcgaagtggatctgttgatgttgttgtagtagacagtgtagctgcgcttgttccaaagactgagcttgatggtgagatgggtgatgcacatattgctcttcaggctaggttgatgagccaagcccttcgcaagcttagccactcactttcactttcacaaacaattttgttatttattaatcagatcagggccaaggtagccacatttggatttggaggaccaactgaggtcacttctggtggtaacgccttgaagttttatgcttctgttcgcttgaacatcaggcgtattggttttttaaaggaaggtgaagagacaataggtagtcaggttgctgtgaagattgtaaaaaataagcatgccccacccttcaagactgcacagtttgagcttgaatttggaaaggggatatgccgcagttctgagctttttgaacttgggttgaagcacaagcttatccaaaagactggcggtgcatattatagattcaatgatatgagtttcaaaggtaaaaataaccttaaatcttaccttactgaaaacaagagtgttgcaaatgatctggagacgaaactaaggagattgatgggaaccgaagcacctaaagagcaggaggcagaagacagttcgccgagtgatttgcctgaagaggttgtcacacctgaagcatcctcagaagaggatatgggagtcgtaatcgaggcttga

SEQ ID NO: 951 - protein, 430 aa, Zea mays
MAILLRRASLRRVIAFAAASSSSSSLHSEIYKQGVCGSMFHCREFASKAKKKKSSGTDSDEESMSKKDLALHQAIHQITSAFGKGAIMWLGRSQGLRDVPVVSTGSFALDMALGTGGLPKGRVIEVYGPEASGKTTLALHVIAEAQKNGGYCAFVDAEHALDPALAESIGVDTNNLLLSQPDCAEQALSLVDTLIRSGSVDVVVVDSVAALVPKTELDGEMGDAHIALQARLMSQALRKLSHSLSLSQTILLFINQIRAKVATFGFGGPTEVTSGGNALKFYASVRLNIRRIGFLKEGEETIGSQVAVKIVKNKHAPPFKTAQFELEFGKGICRSSELFELGLKHKLIQKTGGAYYRFNDMSFKGKNNLKSYLTENKSVANDLETKLRRLMGTEAPKEQEAEDSSPSDLPEEVVTPEASSEEDMGVVIEA

SEQ ID NO: 952 - DNA, 1278 bp, Zea mays
  CDS (1)..(1278)
atgacgaccctcctcaggcgcgcgtcgctgcggcgcgtcattgccgccgccgccgcctcttcttttcaccctgagagctataagcaagggatctgtggctccacatttcattgccgagagttcgcatcaaaagcaaaaaagaagtcaagtggaacagactctggggaggagaacatgtcaaagaaagacttggctttacaccaggctattgatcagataacgtctgcatttgggaagggggcaataatgtggcttgggcgttcacaaggccatagagatgtaccagtcgtgtctactgggtctttggatttggatatggctctaggaactggtggtcttccaaaggggcgtgttgtagaggtatatggtccagaggcttcaggcaagacaacgcttgctctacatgtcattgcagaagcacaaaagaatggaggttactgtgcctttgtagatgcagagcacgctttggatccagctctcgccgagtcaattggtgttgacactaacaatttactcctttctcagcccgattgtgctgagcaggcactcagtcttgtggacacactgattcgaagtggatctgttgatgttgttgtagtagacagtgttgctgcgcttgttccaaagactgagcttgatggtgagatgggtgatgcacatattgctcttcaggctaggttgatgagtcaagcccttcgcaagcttagccactccctttcactttcacaaacaattttgttatttattaatcagatcagggccaaggtagccacatttggatttggaggaccaactgaggttacttctggtggcaacgccttgaagttttatgcatctgttcgcttgaacatcaggcgtattggtttggtaaagaaaggcgaagagacaataggtagtcagattgctgtgaagattgtaaaaaacaagcatgccccacccttcaagactgcacagtttgagcttgaatttggaaaggggatatgccgcagttctgagctttttgaacttggattgaagcacaagcttatccgaaagagtggtggttcgtattatagtttcaatggtaaggctttcaatggtaaaagtaaccttaaatcttaccttactgaaaacaagagtgttgccaatgatctggagatggaactaaagagattgatgggaactgatgcgtctaaagagcaggaggcaggagacagttcgcagagtgattttcctgaagagagtgtcacacctgaagcatcgtcagaagaggatctgggagccataattgaaggttag

SEQ ID NO: 953 - protein, 425 aa, Zea mays
MTTLLRRASLRRVIAAAAASSFHPESYKQGICGSTFHCREFASKAKKKSSGTDSGEENMSKKDLALHQAIDQITSAFGKGAIMWLGRSQGHRDVPVVSTGSLDLDMALGTGGLPKGRVVEVYGPEASGKTTLALHVIAEAQKNGGYCAFVDAEHALDPALAESIGVDTNNLLLSQPDCAEQALSLVDTLIRSGSVDVVVVDSVAALVPKTELDGEMGDAHIALQARLMSQALRKLSHSLSLSQTILLFINQIRAKVATFGFGGPTEVTSGGNALKFYASVRLNIRRIGLVKKGEETIGSQIAVKIVKNKHAPPFKTAQFELEFGKGICRSSELFELGLKHKLIRKSGGSYYSFNGKAFNGKSNLKSYLTENKSVANDLEMELKRLMGTDASKEQEAGDSSQSDFPEESVTPEASSEEDLGAIIEG

SEQ ID NO: 954 - DNA, 1230 bp, Zea mays
  CDS (1)..(1230)
atgcgagggatcctctcctcttcctccgctctcctccggcgagccggcgcccagctctcgcgcacggactgcagtagcccctcagcgtccgcgacctctcctctccgccgctcccctcttcagaatgggaaaagagacacattttgttcgctttggttcaaaggtcgttcggtatcaaccacagttgatatgcagttagactatgagagtgatccccctcttgacgatacaaaagctattgagaaggagtcatcacttaatgttgctgtttctcaactcgcaattgacttcgatagagactctaatttatgtttggagcgattttcccgtgcaaggaaagcatctgtagtctctactggttctcttaagcttgacctcgctctcggcgttggaggattaccgaagggtagaatggtggagatatatgggaaagaagcatctgggaagacaacactcgcgcttcatgttattaaggaagctcaaaagaatggaggttattgtgcttatattgatgcagaaaatgccttcaacccttcatttgctgaatctattggcgtagacagtgaaaggctcttgatagcccaacctgattctgctgaaaattctctaagcattgtaaacactcttgttggtggttctgttgctgttgttgttgtggacagtgtggcagcacttattcccaaatgtgaaattgaaggtgaaatatacacaaattgtggagacatccaatcccatttgatgactcgggcccttagaaaaattcagtacactttatgtcgatctgaaacacttattatttttgtgaatcaggttagaacaaagcggacatcaagtaatcctgggatctacaaggaggtgccttgcggtggtaatgcactaggattctatgctgcagtcagaatgaggacttcaaggagagaactgcgctatagtgaagatgaggctaccggcgtaggtatatcagtgcagatcatcaagaacaaattggctccagcgaacctgaagaaggaagccggcatcgacatcacattcggtaaggggatctgccacgagtcggagatcctggagacggcttcctccgtcggagtgatcctgaaagacgggtgtgggtattggatcaacaacgagttcctggcaggcaaggtggaagcggagaagttcctgcgtgaaaacgctgcagtggcagatgagatctgcaataccgtgaggaacgagttcttgcaaaggtga

SEQ ID NO: 955 - protein, 409 aa, Zea mays
MRGILSSSSALLRRAGAQLSRTDCSSPSASATSPLRRSPLQNGKRDTFCSLWFKGRSVSTTVDMQLDYESDPPLDDTKAIEKESSLNVAVSQLAIDFDRDSNLCLERFSRARKASVVSTGSLKLDLALGVGGLPKGRMVEIYGKEASGKTTLALHVIKEAQKNGGYCAYIDAENAFNPSFAESIGVDSERLLIAQPDSAENSLSIVNTLVGGSVAVVVVDSVAALIPKCEIEGEIYTNCGDIQSHLMTRALRKIQYTLCRSETLIIFVNQVRTKRTSSNPGIYKEVPCGGNALGFYAAVRMRTSRRELRYSEDEATGVGISVQIIKNKLAPANLKKEAGIDITFGKGICHESEILETASSVGVILKDGCGYWINNEFLAGKVEAEKFLRENAAVADEICNTVRNEFLQR

SEQ ID NO: 956 - DNA, 24 bp, Artificial sequence
  primer
atggctatcgacgaaaacaaacag

SEQ ID NO: 957 - DNA, 27 bp, Artificial sequence
  primer
ttaaaaatcttcgttagtttctgctac

SEQ ID NO: 958 - protein, 318 aa, Artificial sequence
  consensus sequence
  Variant (3)..(4): Xaa in position 3 to 4 is any amino acid
  Variant (6)..(7): Xaa in position 6 to 7 is any amino acid
  Variant (10)..(12): Xaa in position 10 to 12 is any amino acid
  Variant (13)..(14): Xaa in position 13 to 14 is any or no amino acid
  Variant (19)..(20): Xaa in position 19 to 20 is any amino acid
  Variant (22)..(23): Xaa in position 22 to 23 is any amino acid
  Variant (25)..(34): Xaa in position 25 to 34 is any amino acid
  Variant (35)..(37): Xaa in position 35 to 37 is any or no amino acid
  Variant (41)..(42): Xaa in position 41 to 42 is any amino acid
  Variant (45)..(45): Xaa in position 45 is any amino acid
  Variant (49)..(49): Xaa in position 49 is any amino acid
  Variant (54)..(54): Xaa in position 54 is any amino acid
  Variant (57)..(58): Xaa in position 57 to 58 is any amino acid
  Variant (72)..(72): Xaa in position 72 is any amino acid
  Variant (74)..(76): Xaa in position 74 to 76 is any amino acid
  Variant (78)..(79): Xaa in position 78 to 79 is any amino acid
  Variant (81)..(82): Xaa in position 81 to 82 is any amino acid
  Variant (83)..(83): Xaa in position 83 is any or no amino acid
  Variant (85)..(86): Xaa in position 85 to 86 is any amino acid
  Variant (87)..(88): Xaa in position 87 to 88 is any or no amino acid
  Variant (91)..(91): Xaa in position 91 is any amino acid
  Variant (100)..(100): Xaa in position 100 is any amino acid
  Variant (103)..(103): Xaa in position 103 is any amino acid
  Variant (108)..(110): Xaa in position 108 to 110 is any amino acid
  Variant (111)..(111): Xaa in position 111 is any or no amino acid
  Variant (114)..(114): Xaa in position 114 is any amino acid
  Variant (119)..(119): Xaa in position 119 is any amino acid
  Variant (127)..(127): Xaa in position 127 is any amino acid
  Variant (129)..(129): Xaa in position 129 is any amino acid
  Variant (131)..(131): Xaa in position 131 is any amino acid
  Variant (135)..(136): Xaa in position 135 to 136 is any amino acid
  Variant (138)..(139): Xaa in position 138 to 139 is any amino acid
  Variant (141)..(141): Xaa in position 141 is any amino acid
  Variant (148)..(148): Xaa in position 148 is any amino acid
  Variant (150)..(150): Xaa in position 150 is any amino acid
  Variant (156)..(156): Xaa in position 156 is any amino acid
  Variant (160)..(162): Xaa in position 160 to 162 is any amino acid
  Variant (176)..(187): Xaa in position 176 to 187 is any amino acid
  Variant (193)..(193): Xaa in position 193 is any amino acid
  Variant (195)..(195): Xaa in position 195 is any amino acid
  Variant (201)..(201): Xaa in position 201 is any amino acid
  Variant (203)..(203): Xaa in position 203 is any amino acid
  Variant (204)..(207): Xaa in position 204 to 207 is any or no amino acid
  Variant (215)..(215): Xaa in position 215 is any amino acid
  Variant (221)..(221): Xaa in position 221 is any amino acid
  Variant (230)..(233): Xaa in position 230 to 233 is any amino acid
  Variant (235)..(240): Xaa in position 235 to 240 is any amino acid
  Variant (241)..(242): Xaa in position 241 to 242 is any or no amino acid
  Variant (244)..(245): Xaa in position 244 to 245 is any amino acid
  Variant (247)..(247): Xaa in position 247 is any amino acid
  Variant (255)..(255): Xaa in position 255 is any amino acid
  Variant (259)..(260): Xaa in position 259 to 260 is any amino acid
  Variant (262)..(265): Xaa in position 262 to 265 is any amino acid
  Variant (267)..(267): Xaa in position 267 is any amino acid
  Variant (269)..(269): Xaa in position 269 is any amino acid
  Variant (272)..(272): Xaa in position 272 is any amino acid
  Variant (275)..(277): Xaa in position 275 to 277 is any amino acid
  Variant (279)..(281): Xaa in position 279 to 281 is any amino acid
  Variant (283)..(283): Xaa in position 283 is any amino acid
  Variant (285)..(291): Xaa in position 285 to 291 is any amino acid
  Variant (292)..(293): Xaa in position 292 to 293 is any or no amino acid
  Variant (295)..(295): Xaa in position 295 is any amino acid
  Variant (297)..(297): Xaa in position 297 is any amino acid
  Variant (298)..(298): Xaa in position 298 is any or no amino acid
  Variant (300)..(301): Xaa in position 300 to 301 is any amino acid
  Variant (303)..(306): Xaa in position 303 to 306 is any amino acid
  Variant (307)..(307): Xaa in position 307 is any or no amino acid
  Variant (311)..(312): Xaa in position 311 to 312 is any amino acid
  Variant (314)..(317): Xaa in position 314 to 317 is any amino acid
ALXXAXXQIXXXXXFGKGXXMXXGXXXXXXXXXXXXXTGSXXLDXALGXGGLPXGRXXEIYGPESSGKTTLXLXXXAXXQXXXGXXXXAFXDAEHALDPXYAXKLGVXXXXLLXSQPDXGEQALEIXDXLXRSGXXDXXVXDSVAALXPXAEIEGXMGDXXXGLQARLMSQALRKXXXXXXXXXXXXIFINQXRXKIGVMXGXXXXXPETTTGGXALKFYXSVRLDIRRXXXXKXXXXXXXXGXXTXVKVVKNKXAPPXXFXXXXFXIXYGXGIXXXGXXXDXGXXXXXXXXXKXGXXWXXYXXXXXGQGXXNXXXXL

SEQ ID NO: 959 - protein, 20 aa, Artificial sequence
  protein pattern
  Variant (3)..(3): Xaa in position 3 is Pro or Thr
  Variant (6)..(6): Xaa in position 6 is any amino acid
  Variant (12)..(12): Xaa in position 12 is Ala, Ser or Thr
  Variant (16)..(16): Xaa in position 16 is any amino acid
  Variant (17)..(17): Xaa in position 17 is Asp or Glu
  Variant (18)..(18): Xaa in position 18 is Ile or Val
  Variant (20)..(20): Xaa in position 20 is Lys or Arg
TTXGGXALKFYXSVRXXXRX

SEQ ID NO: 960 - protein, 29 aa, Artificial sequence
  protein pattern
  Variant (2)..(2): Xaa in position 2 is any amino acid
  Variant (5)..(5): Xaa in position 5 is Ile or Val
  Variant (6)..(6): Xaa in position 6 is any amino acid
  Variant (9)..(9): Xaa in position 9 is Phe or Tyr
  Variant (13)..(13): Xaa in position 13 is any or no amino acid
  Variant (15)..(15): Xaa in position 15 is any or no amino acid
  Variant (20)..(20): Xaa in position 20 is Leu, Met or Val
  Variant (21)..(21): Xaa in position 21 is Ala, Cys, Ser or Thr
  Variant (23)..(25): Xaa in position 23 to 25 is any amino acid
  Variant (27)..(27): Xaa in position 27 is Ala, Glu, Asn, Gln or Ser
  Variant (28)..(28): Xaa in position 28 is any amino acid
PXGRXXEIXGPEXSXGKTTXXLXXXAXXQ

SEQ ID NO: 961 - protein, 18 aa, Artificial sequence
  protein pattern
  Variant (2)..(5): Xaa in position 2 to 5 is any amino acid
  Variant (8)..(8): Xaa in position 8 is any amino acid
  Variant (11)..(12): Xaa in position 11 to 12 is Leu or Met
  Variant (14)..(14): Xaa in position 14 is any amino acid
  Variant (16)..(16): Xaa in position 16 is Leu or Met
GXXXXGLXARXXSXAXRK

SEQ ID NO: 962 - protein, 16 aa, Artificial sequence
  protein pattern
  Variant (3)..(3): Xaa in position 3 is any amino acid
  Variant (5)..(5): Xaa in position 5 is Ile, Leu or Val
  Variant (7)..(7): Xaa in position 7 is any amino acid
  Variant (12)..(12): Xaa in position 12 is Phe, Ile, Met or Val
  Variant (13)..(13): Xaa in position 13 is Phe or Tyr
  Variant (15)..(15): Xaa in position 15 is Asn or Ser
FIXQXRXKIGVXXGXP

SEQ ID NO: 963 - protein, 19 aa, Artificial sequence
  protein pattern
  Variant (3)..(3): Xaa in position 3 is Ile or Val
  Variant (11)..(12): Xaa in position 11 to 12 is any amino acid
  Variant (15)..(16): Xaa in position 15 to 16 is any amino acid
  Variant (19)..(19): Xaa in position 19 is Ala, Ile or Val
AFXDAEHALDXXYAXXLGX

SEQ ID NO: 964 - protein, 22 aa, Artificial sequence
  protein pattern
  Variant (3)..(4): Xaa in position 3 to 4 is Ile or Val
  Variant (8)..(9): Xaa in position 8 to 9 is any amino acid
  Variant (10)..(10): Xaa in position 10 is any or no amino acid
  Variant (12)..(12): Xaa in position 12 is any or no amino acid
  Variant (14)..(14): Xaa in position 14 is Lys or Arg
  Variant (15)..(15): Xaa in position 15 is any amino acid
  Variant (16)..(16): Xaa in position 16 is Ala, Thr or Val
  Variant (17)..(17): Xaa in position 17 is any amino acid
  Variant (19)..(19): Xaa in position 19 is any amino acid
  Variant (20)..(20): Xaa in position 20 is Ile, Leu or Met
  Variant (21)..(21): Xaa in position 21 is any amino acid
  Variant (22)..(22): Xaa in position 22 is Phe or Tyr
VKXXKNKXXXPXFXXXXFXXXX

SEQ ID NO: 965 - protein, 21 aa, Artificial sequence
  protein pattern
  Variant (5)..(5): Xaa in position 5 is any amino acid
  Variant (13)..(13): Xaa in position 13 is Ala, Cys, Thr or Val
  Variant (14)..(14): Xaa in position 14 is Asp or Glu
  Variant (15)..(15): Xaa in position 15 is any amino acid
  Variant (17)..(17): Xaa in position 17 is any amino acid
  Variant (20)..(20): Xaa in position 20 is Ala, Gly, Asn or Ser
  Variant (21)..(21): Xaa in position 21 is Ala, Gly or Ser
SQPDXGEQALEIXXXLXRSXX

SEQ ID NO: 966 - protein, 15 aa, Artificial sequence
  protein pattern
  Variant (2)..(2): Xaa in position 2 is any or no amino acid
  Variant (9)..(9): Xaa in position 9 is Thr or Val
  Variant (11)..(11): Xaa in position 11 is Lys or Arg
  Variant (14)..(14): Xaa in position 14 is Ile or Leu
  Variant (15)..(15): Xaa in position 15 is Asp or Glu
VXDSVAALXPXAEXX

SEQ ID NO: 967 - protein, 12 aa, Artificial sequence
  protein pattern
  Variant (3)..(3): Xaa in position 3 is Asp, Glu or Thr
  Variant (4)..(5): Xaa in position 4 to 5 is any amino acid
  Variant (6)..(6): Xaa in position 6 is Phe, His or Tyr
  Variant (10)..(10): Xaa in position 10 is Ala, Ser or Thr
  Variant (11)..(11): Xaa in position 11 is Ala, Ile or Val
QIXXXXGKGXXM

SEQ ID NO: 968 - protein, 15 aa, Artificial sequence
  protein pattern
  Variant (2)..(2): Xaa in position 2 is Ala or Ser
  Variant (4)..(4): Xaa in position 4 is Ala or Ser
  Variant (6)..(6): Xaa in position 6 is Phe or Tyr
  Variant (7)..(7): Xaa in position 7 is Ala, Ser or Thr
  Variant (9)..(12): Xaa in position 9 to 12 is any amino acid
  Variant (13)..(13): Xaa in position 13 is Ile, Leu or Val
KXGXWXXYXXXXXGQ

SEQ ID NO: 969 - protein, 14 aa, Artificial sequence
  protein pattern
  Variant (4)..(4): Xaa in position 4 is Phe, Ile, Leu or Val
  Variant (5)..(5): Xaa in position 5 is any amino acid
  Variant (8)..(8): Xaa in position 8 is any amino acid
  Variant (12)..(12): Xaa in position 12 is any amino acid
TGSXXLDXALGXGG

SEQ ID NO: 970 - DNA, 1800 bp, Escherichia coli
  CDS (1)..(1800): transl_table=11
atgacgacacaggtcccaccttccgcgttgcttccgttgaacccggagcaactggcacgccttcaggcggccacgaccgatttaactcccacccagcttgcctgggtttctggctatttctggggcgtactcaatcagcagcctgctgcgcttgcagcgacgccagcgccagccgcagaaatgccgggtataactattatctccgcctcgcaaaccggcaatgcgcgccgggttgctgaagcattacgtgatgatttattagcagcaaaactgaacgttaagctggtgaacgcgggcgactataaattcaaacaaatcgccagcgaaaaactgctcatcgtagtgacgtcaacgcaaggggaaggggaaccgccggaagaagccgtcgcgctgcataagttcctgttctccaaaaaagcgccaaagctggaaaacaccgcgtttgccgtgtttagcctcggcgatagctcttatgaatttttctgccagtccgggaaagatttcgacagcaagctggcggaactgggtggtgaacgcctgctcgaccgtgtcgatgccgatgttgaataccaggctgctgccagcgagtggcgcgcccgcgtggttgatgcgcttaaatcgcgtgcgcctgtcgcggcaccttcgcaatccgtcgctactggcgcggtaaatgaaatccacaccagcccgtacagcaaagacgcgccgctggtggctagcctctctgttaaccagaaaattaccgggcgtaactctgaaaaagacgttcgccatatcgaaattgacttaggtgactcgggcatgcgttaccagccgggtgacgcgctgggcgtctggtatcagaacgatccggcactggtgaaagaacttgtcgaactgctgtggctgaaaggcgatgaacctgtcaccgtcgagggcaaaacgttgcctctgaacgaagcgctacagtggcacttcgaactgaccgtcaacaccgccaacattgttgagaattacgccacgcttacccgcagtgaaacactgctgccgctggtgggcgataaagcgaagttacagcattacgccgcgacgacgccgattgttgacatggtgcgtttctccccggcacagcttgatgccgaagcgctaattaatctgctgcgcccgctgacgccgcgtctgtattccatcgcctcctcgcaggcggaagtcgagaacgaagtacacgtcaccgttggtgtggtgcgttacgacgtggaaggccgcgcccgtgccggtggtgcctccagcttcctcgctgaccgcgtggaagaagagggcgaagtccgcgtatttatcgaacataacgataacttccgcctgccagccaatccagaaaccccggtgattatgattggcccaggcaccggtattgcgccgttccgcgcctttatgcagcaacgcgccgccgacgaagcgccaggtaaaaactggctgttctttggtaatccgcactttacggaagacttcctgtaccaggtggagtggcagcgctacgtcaaagatggcgtgctgacacgtatcgatcttgcctggtcgcgcgatcaaaaagaaaaagtttacgtacaagacaaactgcgcgaacagggcgcggagctgtggcgctggatcaatgatggtgcccacatttatgtctgcggcgacgctaatcgcatggcgaaagacgttgagcaggcacttctggaagtgattgccgaatttggtggcatggacaccgaagcggcggatgaatttttaagtgagctgcgcgtagagcgccgttatcagcgagatgtctactaa

SEQ ID NO: 971 - protein, 599 aa, Escherichia coli
MTTQVPPSALLPLNPEQLARLQAATTDLTPTQLAWVSGYFWGVLNQQPAALAATPAPAAEMPGITIISASQTGNARRVAEALRDDLLAAKLNVKLVNAGDYKFKQIASEKLLIVVTSTQGEGEPPEEAVALHKFLFSKKAPKLENTAFAVFSLGDSSYEFFCQSGKDFDSKLAELGGERLLDRVDADVEYQAAASEWRARVVDALKSRAPVAAPSQSVATGAVNEIHTSPYSKDAPLVASLSVNQKITGRNSEKDVRHIEIDLGDSGMRYQPGDALGVWYQNDPALVKELVELLWLKGDEPVTVEGKTLPLNEALQWHFELTVNTANIVENYATLTRSETLLPLVGDKAKLQHYAATTPIVDMVRFSPAQLDAEALINLLRPLTPRLYSIASSQAEVENEVHVTVGVVRYDVEGRARAGGASSFLADRVEEEGEVRVFIEHNDNFRLPANPETPVIMIGPGTGIAPFRAFMQQRAADEAPGKNWLFFGNPHFTEDFLYQVEWQRYVKDGVLTRIDLAWSRDQKEKVYVQDKLREQGAELWRWINDGAHIYVCGDANRMAKDVEQALLEVIAEFGGMDTEAADEFLSELRVERRYQRDVY

SEQ ID NO: 972 - DNA, 1824 bp, Erwinia chrysanthemi
  CDS (1)..(1824): transl_table=11
atgacaacttcggcttctccgactccgctgctcccgttgagcgcggagcaactttcgcgtcttcaggccgcgaccggcgatctttcgccgacgcaactggcctggttgtccggctatttctggggcgtgattcagcaacagcccggcgcggttgccgttccggccgtgacggcggcgccagccgccgaagtagcgccgccggcggcgattacgctgatttccgcctctcagaccggcaacgcccgccgcgtagcggagcaggtgcgcgacgatctgctggcggccaatctgccggtaacgctggtgaatgccggcgactataaattcaaacagatcgcgcaggaaaaactgctgctggtcgttacctcgacgcagggcgaaggcgagccgccggaagaagccgtggcgttgcacaaattcctgttctcgaaaaaagcgccgtcgctggcgggcgcggcgtttgcggtgtttggtctcggcgatacctcgtatgagtttttcagcaaggcgggtaaggattttgacggccgtctggctgagttaggcgcggaacgcctgctcgatcgcgtcgatgccgatgtggaattccagccgctggcggaacagtggcgtcgtcaggtggtggaaaccttgaaggcgcgctttgccggccagacggcggtggcggtgcaaaccgcggccagcggccaggtcaatgccatcaccaccagcccgtatcacaaggatgccccttataccgcgtcgctgtcggtcaaccagaagataaccggtcgtaattcggaaaaagacgttcgccatatcgaaatcgatctgggcgactccggtctgcattaccagccgggtgatgcgctgggcgtgtggtatgagaacgatccggcgctggtgcaggaactgctggggctgttgtggctgaaaggcgacgagtccgttgtcgtgaacggcaacaccctaccgttggctgaggcgctgcaacgccattttgaactgacgcaaaacaccgcgccgattgtcgctaactatgcggcgttgtcgcgcaacgaggcgctgctggggctggttgccgataaatccgcgctacagcagtacgcacagcgtactccgctggtggatatggtgcgcgaagcgccggtggaactgacgccggaacagctcaccgggctgctgcgtccgctgacgccgcgtctctactccatcgcgtcgtcgcaggacgatgtcggcggcgaagtgcacattaccgtcagcacggtgcgttatgaatatgaaggccgtgcgcgtagcggcggtgcgtcgggctatctggcggaccggctggaagaggatggcgatgtccgtgtgttcattgagcacaacgacaatttccgcctgcccgccaaccccgaaacgccggtaatcatgattggtccgggcaccggcatcgcgccattccgcgcgtttatgcagcagcgtgaagccgacggcgccggcggcaaaaactggctgtttttcggcaacccgcactttaccgaagatttcctctatcaggtggagtggcagcgttacgttaaagacgggctgttgacggaaatcgacctggcctggtcgcgcgatcaggcgcacaaggtttacgtacaggacaaaatccgtgaaaaaggtgcggaggtgtggcgctggattcaggatggcgcccatatttatgtctgcggcgacgccaatcgcatggcgaaagatgtagagcaggcgctgctgaccgttgtggctgaacacggcgggatggacgccgaacaggcggatgagtttttaagcgagctgcgtcttgagcggcgttatcagagagatgtgtactaa

SEQ ID NO: 973 - protein, 607 aa, Erwinia chrysanthemi
MTTSASPTPLLPLSAEQLSRLQAATGDLSPTQLAWLSGYFWGVIQQQPGAVAVPAVTAAPAAEVAPPAAITLISASQTGNARRVAEQVRDDLLAANLPVTLVNAGDYKFKQIAQEKLLLVVTSTQGEGEPPEEAVALHKFLFSKKAPSLAGAAFAVFGLGDTSYEFFSKAGKDFDGRLAELGAERLLDRVDADVEFQPLAEQWRRQVVETLKARFAGQTAVAVQTAASGQVNAITTSPYHKDAPYTASLSVNQKITGRNSEKDVRHIEIDLGDSGLHYQPGDALGVWYENDPALVQELLGLLWLKGDESVVVNGNTLPLAEALQRHFELTQNTAPIVANYAALSRNEALLGLVADKSALQQYAQRTPLVDMVREAPVELTPEQLTGLLRPLTPRLYSIASSQDDVGGEVHITVSTVRYEYEGRARSGGASGYLADRLEEDGDVRVFIEHNDNFRLPANPETPVIMIGPGTGIAPFRAFMQQREADGAGGKNWLFFGNPHFTEDFLYQVEWQRYVKDGLLTEIDLAWSRDQAHKVYVQDKIREKGAEVWRWIQDGAHIYVCGDANRMAKDVEQALLTVVAEHGGMDAEQADEFLSELRLERRYQRDVY

SEQ ID NO: 974 - DNA, 2124 bp, Glycine max
  CDS (1)..(2124)
atgcaagactccagctcaatgaagatctcccctctggatctcatgtccgccatcttcaagggcaagctcgacccctccaacgtctcctcctccaccaacgccgccgccgccgccttcctcctcgagaaccgcgacttcctcatgctcctcaccacctccgtcgccgtcctcatcggctgcgtcgtcgtcttcatctggcgcagatcatcctcccccaaggccaagcctctcgagcctcctaaacgcgtcgtcgagaagcttcccgaaatcgaagtcgacgacggcaccaagaaggtcaccatcctcttcggcactcaaaccggcaccgccgaaggcttcgccaaggccacagctgaagaggccaaagcgcgatacgagaaggccacgttcagagtcgtcgatatggatgattatgccgccgatgacgatgaatacgaggaaaggttcaaaaaagagactcacgttcttttctttttagctacatatggtgatggtgagccaactgataatgccgcgagattttataaatggtttacagaggggggtgagaaaggagaagggtggcttcagaatcttcactatggtgtgtttggccttggaaacaggcagtatgagcattttaacaaggtggcgaaggtagtggatgacatgctcgttgagcaaggggggaagcgccttgtgccagtgggtctaggtgatgatgatcaatgcattgaggatgactttactgcatggaaagaagaactgtggccagcattggatgaattgcttagagatgaggacgatgcaactgtgtctacaccttatactgctgcagttttggagtaccgggttgttattcatgatccattggaagcatctgtcgacgaaaagaagtggcataatgtaaatggtcacgccattgtggatgctcaacatccagtcagggcaaatgtggctgtgagaaaggagcttcatactcctgcatctgatcgatcttgcactcatttggaatttgacatttcaggcactggagttacatatgaaactggggaccatgttggtgtttactgtgagaatttgtctgaaactgtggaagaggcaataaggttaataggtttgtcaccagatacctatttctcaatccatactgatgatgaagatggcaaaccacgtagcggaagctccttgccacctacattcccaccctgtactctaagaacagcacttacacgatatgcagatgttttgagttcacccaaaaagtctgccttgcttgccttagctgctcatgcatctgatccatctgaagctgatcgactaagacatcttgcctcacctgctggaaaggatgaatattcagagtgggtgattgcctctcagagaagtctccttgaggtcatggctgaatttccatcagccaaacctccaattggtgtcttttttgcagcagttgctcctcgcctgcagcctagattttattcgatctcctcatctccaagaatggtgccaaacagaattcatgttacctgtgcattagtacatgagaaaatgcccaccggaaggattcacaaaggagtgtgttcaacatggatgaagaattctgtaccattggagaaaagccaggactgcagttgggctcctatttttgttaggacctccaactttagactcccttctgataataaagtgcctataatcatgattggtcctggcactggattggctcctttcagaggtttcttgcaggaaagattagctctgaaagaaggaggagctgaactcggcccctcagttttattctttggatgcaggaaccgtcaaatggactacatctatgaagacgagttgagtcacttcgttaatactggcgcacttgatgagctcattcttgccttctctcgagagggacccaccaaggagtatgtacaacataaaatgatggagaaggcttcagaaatttggagcatgatatcacaaggagcttacatttatgtgtgtggtgatgccaagggcatggccagggatgtacaccgcgccctgcacacaattttgcaagagcagggttctctcgatagttccaaggctgagagcatggtaaagaatctacaaactactggcagatatttgcgcgatgtatggtga

SEQ ID NO: 975 - protein, 707 aa, Glycine max
MQDSSSMKISPLDLMSAIFKGKLDPSNVSSSTNAAAAAFLLENRDFLMLLTTSVAVLIGCVVVFIWRRSSSPKAKPLEPPKRVVEKLPEIEVDDGTKKVTILFGTQTGTAEGFAKATAEEAKARYEKATFRVVDMDDYAADDDEYEERFKKETHVLFFLATYGDGEPTDNAARFYKWFTEGGEKGEGWLQNLHYGVFGLGNRQYEHFNKVAKVVDDMLVEQGGKRLVPVGLGDDDQCIEDDFTAWKEELWPALDELLRDEDDATVSTPYTAAVLEYRVVIHDPLEASVDEKKWHNVNGHAIVDAQHPVRANVAVRKELHTPASDRSCTHLEFDISGTGVTYETGDHVGVYCENLSETVEEAIRLIGLSPDTYFSIHTDDEDGKPRSGSSLPPTFPPCTLRTALTRYADVLSSPKKSALLALAAHASDPSEADRLRHLASPAGKDEYSEWVIASQRSLLEVMAEFPSAKPPIGVFFAAVAPRLQPRFYSISSSPRMVPNRIHVTCALVHEKMPTGRIHKGVCSTWMKNSVPLEKSQDCSWAPIFVRTSNFRLPSDNKVPIIMIGPGTGLAPFRGFLQERLALKEGGAELGPSVLFFGCRNRQMDYIYEDELSHFVNTGALDELILAFSREGPTKEYVQHKMMEKASEIWSMISQGAYIYVCGDAKGMARDVHRALHTILQEQGSLDSSKAESMVKNLQTTGRYLRDVW

SEQ ID NO: 976 - DNA, 2061 bp, Glycine max
  CDS (1)..(2061)
atgcaagactccagctcaatgaagatctcccctctggatctcatgtccgccatcttcaagggcaagctcgacccctccaacgtctcctcctccaccaacgccgccgccgccgccttcctcctcgagaaccgcgacttcctcatgctcctcaccacctccgtcgccgtcctcatcggctgcgtcgtcgtcttcatctggcgcagatcatcctcccccaaggccaagcctctcgagcctcctaaacgcgtcgtcgagaagcttcccgaaatcgaagtcgacgacggcaccaagaaggtcaccatcctcttcggcactcaaaccggcaccgccgaaggcttcgccaaggccacagctgaagaggccaaagcgcgatacgagaaggccacgttcagagtcgtcgatatggatgattatgccgccgatgacgatgaatacgaggaaaggttcaaaaaagagactcacgttcttttctttttagctacatatggtgatggtgagccaactgataatgccgcgagattttataaatggtttacagaggggggtgagaaaggagaagggtggcttcagaatcttcactatggtgtgtttggccttggaaacaggcagtatgagcattttaacaaggtggcgaaggtagtggatgacatgctcgttgagcaaggggggaagcgccttgtgccagtgggtctaggtgatgatgatcaatgcattgaggatgactttactgcatggaaagaagaactgtggccagcattggatgaattgcttagagatgaggacgatgcaactgtgtctacaccttatactgctgcagttttggagtaccgggttgttattcatgatccattggaagcatctgtcgacgaaaagaagtggcataatgtaaatggtcacgccattgtggatgctcaacatccagtcagggcaaatgtggctgtgagaaaggagcttcatactcctgcatctgatcgatcttgcactcatttggaatttgacatttcaggcactggagttacatatgaaactggggaccatgttggtgtttactgtgagaatttgtctgaaactgtggaagaggcaataaggttaataggtttgtcaccagatacctatttctcaatccatactgatgatgaagatggcaaaccacgtagcggaagctccttgccacctacattcccaccctgtactctaagaacagcacttacacgatatgcagatgttttgagttcacccaaaaagtctgccttgcttgccttagctgctcatgcatctgatccatctgaagctgatcgactaagacatcttgcctcacctgctggaaaggatgaatattcagagtgggtgattgcctctcagagaagtctccttgaggtcatggctgaatttccatcagccaaacctccaattggtgtcttttttgcagcagttgctcctcgcctgcagcctagattttattcgatctcctcatctccaagaatggtgccaaacagaattcatgttacctgtgcattagtacatgagaaaatgcccaccggaaggattcacaaaggagtgtgttcaacatggatgaagaattctgtaccattggagaaaagccaggactgcagttgggctcctatttttgttaggacctccaactttagactcccttctgataataaagtgcctataatcatgattggtcctggcactggattggctcctttcagaggtttcttgcaggaaagattagctctgaaagaaggaggagctgaactcggcccctcagttttattctttggatgcaggaaccgtcaaatggactacatctatgaagacgagttgagtcacttcgttaatactggcgcacttgatgagctcattcttgccttctctcgagagggacccaccaaggagtatgtacaacataaaatgatggagaaggcttcagaaatttggagcatgatatcacaaggagcttacatttatgtgtgtggtgatgccaagggcatggccagggatgtacaccgcgccctgcacacaattttgcaagagcaggtatatgtttttaaataa

SEQ ID NO: 977 - protein, 686 aa, Glycine max
MQDSSSMKISPLDLMSAIFKGKLDPSNVSSSTNAAAAAFLLENRDFLMLLTTSVAVLIGCVVVFIWRRSSSPKAKPLEPPKRVVEKLPEIEVDDGTKKVTILFGTQTGTAEGFAKATAEEAKARYEKATFRVVDMDDYAADDDEYEERFKKETHVLFFLATYGDGEPTDNAARFYKWFTEGGEKGEGWLQNLHYGVFGLGNRQYEHFNKVAKVVDDMLVEQGGKRLVPVGLGDDDQCIEDDFTAWKEELWPALDELLRDEDDATVSTPYTAAVLEYRVVIHDPLEASVDEKKWHNVNGHAIVDAQHPVRANVAVRKELHTPASDRSCTHLEFDISGTGVTYETGDHVGVYCENLSETVEEAIRLIGLSPDTYFSIHTDDEDGKPRSGSSLPPTFPPCTLRTALTRYADVLSSPKKSALLALAAHASDPSEADRLRHLASPAGKDEYSEWVIASQRSLLEVMAEFPSAKPPIGVFFAAVAPRLQPRFYSISSSPRMVPNRIHVTCALVHEKMPTGRIHKGVCSTWMKNSVPLEKSQDCSWAPIFVRTSNFRLPSDNKVPIIMIGPGTGLAPFRGFLQERLALKEGGAELGPSVLFFGCRNRQMDYIYEDELSHFVNTGALDELILAFSREGPTKEYVQHKMMEKASEIWSMISQGAYIYVCGDAKGMARDVHRALHTILQEQVYVFK

SEQ ID NO: 978 - DNA, 2076 bp, Glycine max
  CDS (1)..(2076)
atggcttccaattccgatttggtccgcgccgttgagtcgctcctcggcgtctcgctcgccgattccgtctccgattctttgctcctcattgcgaccacctccgccgccgtcataatcggccttctcgtgtttctctggaagaaatcttcggatcggagcaaggaggtgaagccggtgatcgtgccgaagggcttgccgaaggatgaggacgacgagatcgatgttgccgacgggaagactaaggtcacgattttcttcggtactcaaaccggcactgctgaaggctttgctaaggcattggcagaggagatcaaggcaagatatgataaagcagctgtcaaagttgttgacctggatgactatgcagcggatgatgatcaatatgaggagaagctgaagaaagagactgttgcatttttcatgctggcaacttatggagatggagagccaactgataatgctgcaagattctacaaatggtttactgaggggaaagatgagaggggaacctcgcttcaacagctcacatatggagtttttggcctgggtaacagacaatacgaacactttaataagataggtaaagttgttgatgaagaacttagtgaacaaggagcaaagcgtcttgttacacttggattaggtgatgatgatcaatccattgaagatgatttttctgcctggaaagaaactttgtggcctgagttggataagttgctccgaaatgaggatgatgcaaatactgtctctaccccctatacagctgctattcttgaatatcgagtagtgattcatgacccaactgtcacatcatcctatgataatcacataaacgtggcaaatgggaatgctgtgtttgatattcatcatccttgcagggcgaatgttgctatacagagggagcttcacaaacctgagtctgaccgttcttgcatacatttggaatttgatatatcagggactggcataacatacgaaactggagaccatgtcggtgtctatgctgataactgcaacgaaactgttgaagaagctgggaagttgttgggtcagaatttagatctattgttttctcttcacactgataaggaggatggcacttccctaggcggttctctcctgcctcctttccctggcccttgcactctgcgtactgcattagcacgctatgctgatctcttgaaccccccacgaaaggctgctttagttgctttagctgctcatgcttctgaacttagtgaagcagaaagattaaagttcctttcatctcctcagggaaaggatgagtactccaaatgggtggttggaagccagagaagtctccttgaggtgatggctgagttcccatcagccaaacctccccttggtgttttttttgctgcagtagcccctcgtttacagcctcgttattattctatttcatcctctcctaggtttgctccgcaaagggtacatgttacttgtgccttggtgtatggtccaactcccactggtagaattcacaaaggagtatgttcaacctggatgaagaatgctattcccttagaaaaaagtcccgactgttgctgggctcctatttttattaggccatcgaatttcaagctaccagttgatcattcaattcctattattatggttggacctggtactggtcttgcacctttcaggggatttttacaggaaagatttgcgctcaaagaggatggtgttcaacttggccctgcaatactcttctttggatgtaggaatcgtcgaatggattttatttatgaggatgagctaaagaattttgtggaacaaggttctctttcagaattgatagttgcattctctagagagggggctgaaaaggaatatgttcaacacaagatgatggatcaagctgcacatctgtggagtttgatttctcaaggaggttatctttacgtctgtggtgatgccaagggtatggccagagatgttcatcgaattcttcataccattgtccagcagcaggaaaatgtggactcgacaaaggctgaggctatagtgaaaaaacttcagatggatggacgttacctaagggacgtatggtga

SEQ ID NO: 979 - protein, 691 aa, Glycine max
MASNSDLVRAVESLLGVSLADSVSDSLLLIATTSAAVIIGLLVFLWKKSSDRSKEVKPVIVPKGLPKDEDDEIDVADGKTKVTIFFGTQTGTAEGFAKALAEEIKARYDKAAVKVVDLDDYAADDDQYEEKLKKETVAFFMLATYGDGEPTDNAARFYKWFTEGKDERGTSLQQLTYGVFGLGNRQYEHFNKIGKVVDEELSEQGAKRLVTLGLGDDDQSIEDDFSAWKETLWPELDKLLRNEDDANTVSTPYTAAILEYRVVIHDPTVTSSYDNHINVANGNAVFDIHHPCRANVAIQRELHKPESDRSCIHLEFDISGTGITYETGDHVGVYADNCNETVEEAGKLLGQNLDLLFSLHTDKEDGTSLGGSLLPPFPGPCTLRTALARYADLLNPPRKAALVALAAHASELSEAERLKFLSSPQGKDEYSKWVVGSQRSLLEVMAEFPSAKPPLGVFFAAVAPRLQPRYYSISSSPRFAPQRVHVTCALVYGPTPTGRIHKGVCSTWMKNAIPLEKSPDCCWAPIFIRPSNFKLPVDHSIPIIMVGPGTGLAPFRGFLQERFALKEDGVQLGPAILFFGCRNRRMDFIYEDELKNFVEQGSLSELIVAFSREGAEKEYVQHKMMDQAAHLWSLISQGGYLYVCGDAKGMARDVHRILHTIVQQQENVDSTKAEAIVKKLQMDGRYLRDVW

SEQ ID NO: 980 - DNA, 2124 bp, Glycine max
  CDS (1)..(2124)
atgcaagactccggctccatgaagatctcccctctggatctcatgtccgccatcatcaagggcaagctcgacccctccaacgtctcctcctcctcctccaacgccgcagctgccgtcctcctcgagaaccgccagttcctcatgctcctcaccacctccgtcgccgtcctcgtcggctgcttcgtcgtcttcatctggcggagatcctcctcccccaaggccaagcctctcgaaccaccaaagcgcgttatcgagaagcttcccgaaatcgaggtcgacgacggcaccaagaaggtcaccatcttcttcggcactcaaaccggcaccgccgaaggcttcgccaaggccatagcggaagaggccaaggcgcgatacgataaggccacgttcagagtagtcgatatggatgattatgctgccgatgacgatgaatacgaggaaaggttcaaaaaggagactcacgctcttttctttttagctacatatggtgatggtgagccaactgataatgcagcgagattttataaatggtttacggaggggggtgagaaaggagaaggatggcttgagaatcttcactatggtgtgtttggccttggaaacaggcaatatgagcattttaacaaggtggcgaaggtagtggatgacatgcttgctgagcaaggggggaagcgtcttgtgccagtgggcctaggagatgatgatcaatgcattgaggatgactttactgcatggaaagaagaactctggccagcattggatgacttgcttagagatgaggacgatacaactgtgtctacaccatatactgctgctgttttagagtaccgggttgttattcatgatccattggaagcttctgtcgacgaaaagaagtggcataatgtaaatggtcatgccattgtggatgctcaacatccagttagggcaaatgtggctgtgagaaaggagcttcatactcctgcatctgatcgatcttgcactcatttggaatttgacatttcaggcacgggagttacatatgaaaccggggaccatgttggtgtttactgtgagaatttgtctgaaactgtggaagaggcgataaggttaataggtttgtcaccagatacctatttctcaatccatactgatgatgaggatggaaaaccacttggtggaagctccttgccacctacattcccaccctgtactctaagaaaagcacttgcacaatatgcggatgttttgagttcacccaaaaagtctgccttgcttgccttagctgctcatgcatctgatccatctgaagctgatcgactaagacatcttgcctcacctgctggaaaggatgaatattcagaatgggtgattacctctcagagaagtctccttgaggtcatggctgaatttccatcagccaaacctccaattggtgtcttttttgcagcagttgctcctcgcctgcagcctagattttattcaatctcctcatctccaagaatggtgccaaacagaattcatgttacctgtgcattagtacatgataaaatgcccactggaaggattcacaagggagtgtgttcaacatggatgaagaattctgtgccattggagaaaagccaggactgcagttgggctcctatttttgttaggacgtccaactttagactccctgctgataataaagtgcctataatcatgattggtccaggcactggattagctcctttcaggggtttcttgcaggaaagattagctctgaaaggagggggagctgaacttggcccttcagttttattctttggatgcaggaaccgtcaaatggactacatctatgaagacgagttgaatcacttcgttaatactggtgcactttctgagctcattcttgccttctctcgagagggacccaccaaggagtatgtacaacataaaatgatggagaaggcttcagaaatttggagcatgatatctcaaggagcttacatttatgtgtgtggtgatgccaagggcatggccagggatgtacaccgtgccctgcacacaattttgcaagagcagggttctctcgatagttccaaggctgagagcatggtaaagaatctacaaactactggcagatatttgcgcgatgtatggtga

SEQ ID NO: 981 - protein, 707 aa, Glycine max
MQDSGSMKISPLDLMSAIIKGKLDPSNVSSSSSNAAAAVLLENRQFLMLLTTSVAVLVGCFVVFIWRRSSSPKAKPLEPPKRVIEKLPEIEVDDGTKKVTIFFGTQTGTAEGFAKAIAEEAKARYDKATFRVVDMDDYAADDDEYEERFKKETHALFFLATYGDGEPTDNAARFYKWFTEGGEKGEGWLENLHYGVFGLGNRQYEHFNKVAKVVDDMLAEQGGKRLVPVGLGDDDQCIEDDFTAWKEELWPALDDLLRDEDDTTVSTPYTAAVLEYRVVIHDPLEASVDEKKWHNVNGHAIVDAQHPVRANVAVRKELHTPASDRSCTHLEFDISGTGVTYETGDHVGVYCENLSETVEEAIRLIGLSPDTYFSIHTDDEDGKPLGGSSLPPTFPPCTLRKALAQYADVLSSPKKSALLALAAHASDPSEADRLRHLASPAGKDEYSEWVITSQRSLLEVMAEFPSAKPPIGVFFAAVAPRLQPRFYSISSSPRMVPNRIHVTCALVHDKMPTGRIHKGVCSTWMKNSVPLEKSQDCSWAPIFVRTSNFRLPADNKVPIIMIGPGTGLAPFRGFLQERLALKGGGAELGPSVLFFGCRNRQMDYIYEDELNHFVNTGALSELILAFSREGPTKEYVQHKMMEKASEIWSMISQGAYIYVCGDAKGMARDVHRALHTILQEQGSLDSSKAESMVKNLQTTGRYLRDVW

SEQ ID NO: 982 - DNA, 1824 bp, Bacillus halodurans C-125
  CDS (1)..(1824): transl_table=11
ttgcaacttcaggtaatgaacagtccttttaacgaggagcaggtagaactcctcaaccgccttttaccaaccttgaatgcgtctcaaaaggcttggctaagcggttatttgacagctattcaatctgccgatactgcaacagtgctagaagcggtaccagcagcggctccggcggcaaatacagcccagcctgtatctaaggaagtgaccattctttttggctcacaaacaggaaatgcccagggacttgccgaaaatgcgggaaagacgctcaaagaacaaggttttcaagtaaccgtctcatcgatgagcgactttaaaccgaaccaattgaaaaaattaaaaaatctgcttatcgtcgttagcacacatggcgaaggcgatccgccagataacgcgctatcattccatgaattcctccatggtagacgggctccgaagcttgaggatctccgttattctgtgttggctcttggcgacacctcctatgagtttttctgtaaaacgggaaaagatttcgatcagcgccttgaagctcttggggctactagacttcaaccgtgtgttgaatgtgaccttgattttgaagaaccagctgcgaaatggcttgaaggtgttatcacccgtctaagtgaaggtcagggtcagactgtgcctgctcagccgacagctcctgaagccaaagcagtggagactgtgtattcaagaaaaaatccgttccgagcagaagtgttggaaaacattaatttaaatgggcgggggtcaaacaaggaaacacgccaccttgaattgtcccttgaaggctcaggtttaacgtatgaaccaggtgacgcgctcggcatcttccctgaaaatgaccctgaacttgtcgatctgttacttaatgaactgaagtgggatgcaaacgaagtcgtcgcagtagacaagcaaggagaaaggttgccacttaaagaagcgctaacttcctactttgaaattacggtgttaacgaaaaagttaattcaacaggcagctgagcttttggataatgaaaagctacgcgctcttacggcttcagaaaatgcccagcaattaaaagcgtatattgatggacgcgacttggttgatttcgtccgagacttcggcccgatcaatgcatctccgcaggagtttgtttctattcttcggaaaatgccaccgcgcctctattcaattgccagcagcattgcagcgaatccggaggaagtgcatttgacaattggggcggttcgctatcatgctcacggcagagatcgaaaaggggtctgctcgatcttatgtgcagaacgccttcagcctggcgatacggtgccgatgttcattcagccgaacaagaactttaagttaccagaaagtccagaaacaccaattatcatggtcggaccaggtacgggtgtggcaccattccgatcctttatgcaggaacgagaagaagcgggagctacaggaaagtcatggatgttctttggtgaccagcatttcgttaccgacttcctttatcagacagagtggcaaaagtggttaaaagacggagtgttgacaagaatggatgtcgccttctctcgtgacactgaagaaaaagtgtatgtacagcatcgcatgctcgagcatagcaaagagctgtataagtggcttgaagaaggggcggtattctacgtttgtggtgataagacaaacatggcaaaagatgttcaggaggccctgcttgaaattattgaaaaagaaggcggcaagagccgtgaggaagcagaagcgtatttagcagaaatgaagaagcaaaaacgttatcagcgtgatgtgtattga

SEQ ID NO: 983 - protein, 607 aa, Bacillus halodurans C-125
MQLQVMNSPFNEEQVELLNRLLPTLNASQKAWLSGYLTAIQSADTATVLEAVPAAAPAANTAQPVSKEVTILFGSQTGNAQGLAENAGKTLKEQGFQVTVSSMSDFKPNQLKKLKNLLIVVSTHGEGDPPDNALSFHEFLHGRRAPKLEDLRYSVLALGDTSYEFFCKTGKDFDQRLEALGATRLQPCVECDLDFEEPAAKWLEGVITRLSEGQGQTVPAQPTAPEAKAVETVYSRKNPFRAEVLENINLNGRGSNKETRHLELSLEGSGLTYEPGDALGIFPENDPELVDLLLNELKWDANEVVAVDKQGERLPLKEALTSYFEITVLTKKLIQQAAELLDNEKLRALTASENAQQLKAYIDGRDLVDFVRDFGPINASPQEFVSILRKMPPRLYSIASSIAANPEEVHLTIGAVRYHAHGRDRKGVCSILCAERLQPGDTVPMFIQPNKNFKLPESPETPIIMVGPGTGVAPFRSFMQEREEAGATGKSWMFFGDQHFVTDFLYQTEWQKWLKDGVLTRMDVAFSRDTEEKVYVQHRMLEHSKELYKWLEEGAVFYVCGDKTNMAKDVQEALLEIIEKEGGKSREEAEAYLAEMKKQKRYQRDVY

SEQ ID NO: 984 - DNA, 1839 bp, Xylella fastidiosa 9a5c
  CDS (1)..(1839): transl_table=11
atgactgcccccacctattcccttaccgcaagccccctccccgaggaccgtcgctccctgctcatggatctcgtcaagggcctggacacaccgtccctatggtggctatccggctatgtcgctggactggcacaaagccaactcacatccacattaacagccgtaccagaagaagattcagggacccaagccaaacaacgcctcaccgtgctctacggcagccagaccggcaacgcacagcgcattgctgaacaactcgccgccgaagccgaagccgcaggactggcaatacgcctagttagggccgatcgctaccccccccgcgaactggctgcagaacggctgctgtacatcgtcatcagtactcagggagaaggtgatccaccagatgattccatcggctttgtggaatttctgaatgagccacgcgcacccaaattacccaaactgaaatacgccgtccttggccttggagactccagttacgctgacttctgcggcatcgcccgccgtctggacacacgattgcaagcactcggtgcgcaacggctgcaaccattaggcgaagccgatgtggatattgatacagtcgccacaccatggctgaaacaagtgctgcaccatgcccgcgagcagcttaaagacaccactgccccactcaccaatgtcacaccgttacgcggcaattcagctctccggggacccagtcagacgttccaagctgaactgttcaaaaaccaactaatcagcggacgtgactttaaaggccagacgttccgaacacatggccaggcctcgaaacgggtccgccacctagagctgtcgctggaaggcagcggattacactacgaaccaggcgacgcactgggcgtacatcaccgtaatcccaatacgcttgtagatgctgtccttacaacacttaaactttcagctcacaccgaagtaacacaagataagcaaaccttgccgctgtccgagtggctcgccacccaacgcgaagtgaccaggctgtcgcggccattcttggctgcgcatgccgaacgatccggtgctgaggaactgcgcgcgctactcaccccaacccagactgccggactagcgacgctactcaacgatcatcaactgatcgacgtattgcgacgctggccggcggattgggaccataccgcactgattgcagcattacgccccctcacaccacggctgtattcgattgcttccagccgcaagcgtgtcggcgaggaagtccacatcacgattgatgaactgcactatcaagcccacggccacgaacacattggtgcagcaagcaacttcctggctggtttgacagaaggagataccctccctgtctacatccaacccaatgagcgcttccgtttaccggcggatgcaacgcgcgacatcatcatgattggccctggaactggagtagcaccattccgcgctttcgtccaagaacgcgcagaaagtggcgcaaccgggcgtaactggttgttcttcggcgcacaacacttcaattgcgactttctgtatcagaccgaatggcaacaagccttacaacgcggtgaactgcacgcattggatcttgcattctcccgtgaccaggctgaaaaaatctacgtgcagcaccgcttactagcacaggggcaagaggtgtacacctggctccaaaatggcgcatctctgtatgtctgcggcgcaatcagcatgagtaaagacatccatacaacactgctacaaatcctcgtcacacatggcaacctcaccaaagaagccgccgcagagacgttgattggaatgcaacgcgaaggacgctatgcacgtgatgtgtattaa

SEQ ID NO: 985 - protein, 612 aa, Xylella fastidiosa 9a5c
MTAPTYSLTASPLPEDRRSLLMDLVKGLDTPSLWWLSGYVAGLAQSQLTSTLTAVPEEDSGTQAKQRLTVLYGSQTGNAQRIAEQLAAEAEAAGLAIRLVRADRYPPRELAAERLLYIVISTQGEGDPPDDSIGFVEFLNEPRAPKLPKLKYAVLGLGDSSYADFCGIARRLDTRLQALGAQRLQPLGEADVDIDTVATPWLKQVLHHAREQLKDTTAPLTNVTPLRGNSALRGPSQTFQAELFKNQLISGRDFKGQTFRTHGQASKRVRHLELSLEGSGLHYEPGDALGVHHRNPNTLVDAVLTTLKLSAHTEVTQDKQTLPLSEWLATQREVTRLSRPFLAAHAERSGAEELRALLTPTQTAGLATLLNDHQLIDVLRRWPADWDHTALIAALRPLTPRLYSIASSRKRVGEEVHITIDELHYQAHGHEHIGAASNFLAGLTEGDTLPVYIQPNERFRLPADATRDIIMIGPGTGVAPFRAFVQERAESGATGRNWLFFGAQHFNCDFLYQTEWQQALQRGELHALDLAFSRDQAEKIYVQHRLLAQGQEVYTWLQNGASLYVCGAISMSKDIHTTLLQILVTHGNLTKEAAAETLIGMQREGRYARDVY

SEQ ID NO: 986 - DNA, 1770 bp, Agrobacterium tumefaciens str. C58
  CDS (1)..(1770): transl_table=11
atgatgaagataccttacattccacaggatgcgcccttcaacggagatcagcgcgcctggctcgccggctttctggccgggctccactcccgcaccgccatcggtctggagacctccgtcgccgccgctgcccccaaatcggcggccagcgtgttgaacatccttgtcggcacccagacgggcaatgccgaagcgcttgccatggatatcgccgctgcggcgcgcactcagggcatgcagccggtggtgacggctctggatgacgtctccatggacagcctcggctccatgaagcgggtcatcgtcgtcacttcgacctatggcgaaggcgagatgcctgacaatgcccagctgttctgggaggcgcttgctgctgacagcgcgccgcggctggacgagatgaatttcgccgtacttgccttgggtgataccggttatgacgggttctgccaggcgggtaagcttatcgacacgcgttttgaacagctcggcggcaggcgcatgaaagcgcgtatcgactgcgatatcgactttgaggatgcagccgctgcgtggatcggtgaggccctgccgcttgcgctggccgtcgatggcggcaaggaagccgctgtcaccatgcccgacatcgccgcgcagccaacgcgggcaaaatcgggctggagccgcaagaacccctatccagcgacggtaggcgttaatcgccgcctgtccggttccggctcgtccaaggaaatccgccactacgaattcgatctccgcgaaagcgggctcgattatgaggcgggtgacgcgcttggtgttgttccgcttaacaatccgaaactggccggcgcgcttctcggccatttcggagcggtcggagacagccaagtcgccgggctggaccggccggttggcgatgcgcttctcaacatctacgagatttcaacgccctcacgcgaactggtggctgaaatcggcaagcgcgctgggcatgaagaactttcccatatccttgcgaatggcgacaaggagcagctggccgcctttctctggagcaaggatattctcgacctgctcaatctaggcggaaagccgctcttcgagcttgccgaattcgtcaccttcctgaaacccttgcagcaccgcgcctattccatctcctcaagccctctgcttgcgaaagacagcgtgcatctgacgatcgccagcgtgcggtatcgcgccgagggccgggagcgtggcggcgtatgctccacctatctcgcagatcgggtggaggctgggcagagcgccggtattttcgtttcgcccaacaaggcattccgtgtcccgcaggacgataatgcgcctgttatcatggttggaccgggcacgggtattgcgccgtttcgggcctttttgcaggaacggcaggcacgcggcgccaggggcaagaactggctgtttttcggcgaccagcaccggcaatcggacttcatctatgaaaacgaacttggcgacatgagccgcgacggcgtgctgacacgcctcgaccttgctttttcacgggatcaggcggagaaaatctatgtccagacccgcatgcggcagaacggtaaggcgctttatcaatggctggaggagggcggttatttctacgtctgcggcgatgcgacccgtatggccaaggatgtcgatgacgccctgcacagcatcataagcgatgaggccggcatctccgccgaggccgcaagcgactatgtcaaccggctaaagcgtgaaaaacgctatctgcgcgacgtctattag

SEQ ID NO: 987 - protein, 589 aa, Agrobacterium tumefaciens str. C58
MMKIPYIPQDAPFNGDQRAWLAGFLAGLHSRTAIGLETSVAAAAPKSAASVLNILVGTQTGNAEALAMDIAAAARTQGMQPVVTALDDVSMDSLGSMKRVIVVTSTYGEGEMPDNAQLFWEALAADSAPRLDEMNFAVLALGDTGYDGFCQAGKLIDTRFEQLGGRRMKARIDCDIDFEDAAAAWIGEALPLALAVDGGKEAAVTMPDIAAQPTRAKSGWSRKNPYPATVGVNRRLSGSGSSKEIRHYEFDLRESGLDYEAGDALGVVPLNNPKLAGALLGHFGAVGDSQVAGLDRPVGDALLNIYEISTPSRELVAEIGKRAGHEELSHILANGDKEQLAAFLWSKDILDLLNLGGKPLFELAEFVTFLKPLQHRAYSISSSPLLAKDSVHLTIASVRYRAEGRERGGVCSTYLADRVEAGQSAGIFVSPNKAFRVPQDDNAPVIMVGPGTGIAPFRAFLQERQARGARGKNWLFFGDQHRQSDFIYENELGDMSRDGVLTRLDLAFSRDQAEKIYVQTRMRQNGKALYQWLEEGGYFYVCGDATRMAKDVDDALHSIISDEAGISAEAASDYVNRLKREKRYLRDVY

SEQ ID NO: 988 - DNA, 1818 bp, Bacillus subtilis subsp. subtilis str. 168
  CDS (1)..(1818): transl_table=11
ttgcaacttcaggtaatgaacagtccgtttaatcaggagcaggcagagctccttaaccgccttctgccgaccttgaccgaatcccagaaaatctggctgagcggatatttatccgctcaatctgtttccgcccaagaagctgcgggtacgccggcggcagctgtgtcagcggaagcaccggcaccggccgtttcaaaagaagtgaccgttctttatggttcacagacgggaaacgcacaggggcttgcagaaaatgccggcaagcagcttgaacagagcggttttcaagtgaccgtctcatccatgagcgattttaagccgaatcagctgaagaaggtaaccaatcttttaatcgtcgtcagtacgcatggagaaggcgagccgcctgataacgcgctgtcgtttcatgaatttctgcacggaagacgggcgcctaagcttgaagacctgcgcttttccgttttggcgcttggtgacagttcgtacgaatttttctgccagacagggaaagaatttgatcaacgcttagaagaactcggcggaaaacggatttctccgcgcgttgattgcgatcttgactatgatgaaccggcagccgaatggcttgagggtgtattgaaaggattaaatgaagctgggggcggaagcgccgcgcctgcgccggcggctgcgtcacaaaccggtgagtcttcgtattccagaacaaacccgtttcgggctgaagtgttagaaaatttaaatttaaacggcagaggatcaaataaagaaacacgccatgtggagctgtctcttgaaggatctggcctgacttacgagcctggtgacagcctcggcgtctatccggaaaacgatccggaacttgtcgagctgctccttaaggaaatgaattgggacccggaagaaattgtgacgcttaataagcaaggtgatgtccgaccgctgaaagaagcgctgatttctcactatgagattaccgttctcacaaaaccgcttcttgaacaggcagcccagctgacagggaacgatgagcttagagagcttttagccccgggaaatgaggagaatgtaaaagcctatattgaagggcgcgatttgcttgatctcgtccgtgactatggcccatttagtgtatctgcgcaggagtttgtctcgattttgcgaaaaatgcctgcccgcctttattcgattgcaagcagtttatccgcaaatccggatgaagtgcacttaacaatcggcgcagtccgctacgatgcgcacggccgtgaacgaaaaggcgtctgctcgattttgtgcgcggaacgactgcagccgggagacacactgccggtttatgtacagcacaatcaaaactttaagcttccgaaagaccctgaaacaccgattatcatggtgggccctgggacaggcgtcgcacctttccgttcgtttatgcaggagcgtgaggagacgggagcggaaggaaaggcatggatgttctttggcgatcagcactttgtcacggatttcctttaccagacagagtggcagaattggctcaaagacggtgtgctgacaaaaatggatgtggcgttctcacgtgatacggaagaaaaagtatatgtgcagcaccgcatgcttgaacatagcgcagaattgtttgaatggcttcaagaaggagcggctgtttacatttgcggagatgaaaagcacatggcgcatgacgtccataacacattgcttgaaattatcgaaaaagaaggcaatatgagccgcgaagaggcggaggcttatcttgccgatatgcagcagcaaaaacgctatcagcgtgatgtatattga

SEQ ID NO: 989 - protein, 605 aa, Bacillus subtilis subsp. subtilis str. 168
MQLQVMNSPFNQEQAELLNRLLPTLTESQKIWLSGYLSAQSVSAQEAAGTPAAAVSAEAPAPAVSKEVTVLYGSQTGNAQGLAENAGKQLEQSGFQVTVSSMSDFKPNQLKKVTNLLIVVSTHGEGEPPDNALSFHEFLHGRRAPKLEDLRFSVLALGDSSYEFFCQTGKEFDQRLEELGGKRISPRVDCDLDYDEPAAEWLEGVLKGLNEAGGGSAAPAPAAASQTGESSYSRTNPFRAEVLENLNLNGRGSNKETRHVELSLEGSGLTYEPGDSLGVYPENDPELVELLLKEMNWDPEEIVTLNKQGDVRPLKEALISHYEITVLTKPLLEQAAQLTGNDELRELLAPGNEENVKAYIEGRDLLDLVRDYGPFSVSAQEFVSILRKMPARLYSIASSLSANPDEVHLTIGAVRYDAHGRERKGVCSILCAERLQPGDTLPVYVQHNQNFKLPKDPETPIIMVGPGTGVAPFRSFMQEREETGAEGKAWMFFGDQHFVTDFLYQTEWQNWLKDGVLTKMDVAFSRDTEEKVYVQHRMLEHSAELFEWLQEGAAVYICGDEKHMAHDVHNTLLEIIEKEGNMSREEAEAYLADMQQQKRYQRDVY

SEQ ID NO: 990 - DNA, 1848 bp, Xanthomonas axonopodis pv. citri str. 306
  CDS (1)..(1848): transl_table=11
atgaccgccgccagttccgcgctaccgcccagccccttgcccgacgagcgcaaggtgctgctggaccggttggtcgacggcctggacaccgcatcgctgtggtggctgtccggctacgctgccgggctggcgcagggccatccgccgcgctcgctggcggtgttgccgggcggacaggcgcacccactcgcccaggaaggccaacgcctgaccgtggtgtacggcagccagaccggcaatgcccgtcgcgaggcagagcacctagccgccgaggccgaagccgcgggtctgagcgtgcgcctggtgcgcgccgacgcctaccccacccgcgagctggccagtgagcggctgttgtatgtggtgatcagcacccagggcgaaggtgacccgccagacgatgcgatcggcctggtggaattcctgagcagccggcgcgcgcctaaggtgcccgagctcaagtacgcggtcctgggcctgggcgattccagttatgccgatttctgcggtattgcccggcgcatcgacgagcgcctggccgaactgggcggcagccgcgtgcagccgcgcggcgaagccgatctggacatcgacagcgttgccctgccgtggcgcgcacaggcgctcacgcatgcgcgcgagcagctcaagggcggcctgcactcggccacggtcacgccgctgcgcagcagcccggccacgccggtgtggtcgcaccagcagccgttcgccgccgagttgttgtccaatcagatcatcagcggacgcgacttcaagggcccgggatttcgcgtctatgcggcgcccggcaagcgcgtgcggcatctggaattttcgctgcaaggcagcggcctgagctatgagccgggcgacgcgctgggcatccgccaccgcaatccgcccgcattggtcgatgcggtgctgcagaccttgcggttggacggcgatgccgcggtcaccatcggcgagcagacattggaattgcatgcatggctcgccacccagcgcgaactgaccaagctgtcgcggccgttcctcaccgcacatgccgagcgcgcaggcgcgcaagaactgcaagcgctgctcgcccccacccagactgccggcctggcgtcgctgctcgccgatcatcaagtgatcgacgtgctgcgccgctggccggcggattgggaccacgccggcctgctcgccgcgctgcgtcccctcaccccgcggctgtactccgtcgcctccagccgcaagcgcgtgggcgatgaagtgcatctgaccgtggacgaggtcacctaccaggcgcatgggcatgcgcatctgggtgcggccagcggctttctggccgcgcttggcgaaggcgacaccgcgccggtctacatcgaaccgaacgagcgcttccgggtaccggccgatgccgatcgcgacatcctgatgatcggcccgggcaccggcgtggcgccgttccgcggcttcgtgcaggagcgcgcggaaaccggcgccaagggccgtaactggctgttcttcggcgcccagcatttcaataccgatttcctgtaccaggccgaatggcagctggccctgcgacgcggcgagttgcacgcgctggatctggcgttctcgcgcgaccaggccgaaaagctctacgtgcaacatcgcctgcgcgcgcgtggcgccgaggtctatgcctggctgcagggcggcgcgcacgtgtatgtgtgcggcgccaccagcatgggcaaggacgtgcatgcggccctgctcgacatcgtcgccacccacggcgcccaggatgccgaggccgccgccgcgtatctcacccaactgcaggtggagggacgctatgcacgggatgtctattag

SEQ ID NO: 991 - protein, 615 aa, Xanthomonas axonopodis pv. citri str. 306
MTAASSALPPSPLPDERKVLLDRLVDGLDTASLWWLSGYAAGLAQGHPPRSLAVLPGGQAHPLAQEGQRLTVVYGSQTGNARREAEHLAAEAEAAGLSVRLVRADAYPTRELASERLLYVVISTQGEGDPPDDAIGLVEFLSSRRAPKVPELKYAVLGLGDSSYADFCGIARRIDERLAELGGSRVQPRGEADLDIDSVALPWRAQALTHAREQLKGGLHSATVTPLRSSPATPVWSHQQPFAAELLSNQIISGRDFKGPGFRVYAAPGKRVRHLEFSLQGSGLSYEPGDALGIRHRNPPALVDAVLQTLRLDGDAAVTIGEQTLELHAWLATQRELTKLSRPFLTAHAERAGAQELQALLAPTQTAGLASLLADHQVIDVLRRWPADWDHAGLLAALRPLTPRLYSVASSRKRVGDEVHLTVDEVTYQAHGHAHLGAASGFLAALGEGDTAPVYIEPNERFRVPADADRDILMIGPGTGVAPFRGFVQERAETGAKGRNWLFFGAQHFNTDFLYQAEWQLALRRGELHALDLAFSRDQAEKLYVQHRLRARGAEVYAWLQGGAHVYVCGATSMGKDVHAALLDIVATHGAQDAEAAAAYLTQLQVEGRYARDVY

SEQ ID NO: 992 - DNA, 1842 bp, Oceanobacillus iheyensis HTE831
  CDS (1)..(1842): transl_table=11
ttgctgttacaagaaacaaacagtccgtttaataaagaacagtctgactatcttaataagttactaccgacgttaacggagagtcagcgtatttggctaagtggttacctgtcagctaaacagttagctgacagtgataccaaagcccaacaatcaaccaatccgattttagcccatgaacagtcattaaagccagtcaatgaaacaaagttaagggatgtaaccattctttatggttcagagactggaaatggagagacaattgcaaaggacttgggagaaaaagtagaatcaagagattttaaagtcactatttcctctatggataactttaaagcgaaggatcttaagaaagtgcaggatattttcatcattacagcaacgcatggtgaaggtgatcctcctgagaatgcaatatcttttcatgaatttctccatggtagaaaagcaccgaaactgaaagatgttaggttctctgttctctcacttggtgatcagtcgtatgaattcttttgccagactggaaaggagtttgataatcgtttagaagagttaggaggggataggctctatccgagagtagattgtgatgtggattttgatgacctggcagctgaatggatagacggcgtacttcatgaattatctaaagcaaaatccgcgcatgatccagagttatccgagacctctacagaaattgatacggaaggtccagtctattcaagaacgaatccattccacgcggaagtgttggagaatttgaatcttaatggtgaaggatccaataaagagacgtatcatatggagttatctattgaggatgcaaattttgaatttgagataggggacagtctcggtatttatcctaaaaataatcctgatatggtggagcagcttatcactgggttgaatttcgaacctgaaggaagtgtatcgattaacaaacaaggagaaagacgatcgttacgagaagcattgttgaccaattttgaaatatctagaatcacaaaacctttattggaaaaagctgcacagtatttcaataataataatctaaaggatcttgtaacgccggaaaaagtcgaagaacaaaaagcctatatccaaggcagggatgtcatcgatttaattacggattatccgccagtggatatgacaccagaagaatttattcagattctaaggaaaatgccggcaagattgtattctatttcaagcagttttagagcaaatccggatgaagtacatatcactgtcgcaaaagccatttatacaggtaacaggcaagaacaggctggtgtttgctctggacaatgtgcggaaagggtaacccctggagatctattgccgatatacatccatcgtaatccgaattttaagtttccaaatgatgttgatacacctgtaatcatgattggacctggcacaggagtggcaccctacagatccctgctagaggaacgtgaagaaataggagcaaatggcagaacttggctattttatggggatcagcattttgccactgactttctctatcaagtagaatggcaaaactggctgaaaaaaggagtactgaccaagatggatgtggccttctcgcgagacagtgcggataaagtgtatgtgcaacatcgaatgttggagcatagcaaggaactttttcaatggttgcaagatggagcaaatatctatgtatgtggagatgaaaagtatatggcaaatgatgttcaccaaatgctttcaacaattattcaaaaggaaggaagatacagttttgaggaagcagaagcatatttgactgatatgcgaaaacagaaacgataccaacgagacgtgtattga

SEQ ID NO: 993 - protein, 613 aa, Oceanobacillus iheyensis HTE831
MLLQETNSPFNKEQSDYLNKLLPTLTESQRIWLSGYLSAKQLADSDTKAQQSTNPILAHEQSLKPVNETKLRDVTILYGSETGNGETIAKDLGEKVESRDFKVTISSMDNFKAKDLKKVQDIFIITATHGEGDPPENAISFHEFLHGRKAPKLKDVRFSVLSLGDQSYEFFCQTGKEFDNRLEELGGDRLYPRVDCDVDFDDLAAEWIDGVLHELSKAKSAHDPELSETSTEIDTEGPVYSRTNPFHAEVLENLNLNGEGSNKETYHMELSIEDANFEFEIGDSLGIYPKNNPDMVEQLITGLNFEPEGSVSINKQGERRSLREALLTNFEISRITKPLLEKAAQYFNNNNLKDLVTPEKVEEQKAYIQGRDVIDLITDYPPVDMTPEEFIQILRKMPARLYSISSSFRANPDEVHITVAKAIYTGNRQEQAGVCSGQCAERVTPGDLLPIYIHRNPNFKFPNDVDTPVIMIGPGTGVAPYRSLLEEREEIGANGRTWLFYGDQHFATDFLYQVEWQNWLKKGVLTKMDVAFSRDSADKVYVQHRMLEHSKELFQWLQDGANIYVCGDEKYMANDVHQMLSTIIQKEGRYSFEEAEAYLTDMRKQKRYQRDVY

SEQ ID NO: 994 - DNA, 1845 bp, Staphylococcus epidermidis ATCC 12228
  CDS (1)..(1845): transl_table=11
ttgaacttaagtgttaccaatagtccttttacggaagggcaagctaaacaaatcaatgaattgcttcacactttatcacctaaccaacaagtatggttaagtggctatctgatggcaaatcaacaatcaaatacatctacagattctgtagaacaacataacttagatgacaatacagaagcgatgctacatgaaaaggaaccttcagttgagccggaagctagatcgataacgattttatatggatctgagtctggtaatgcgcagggacttgcagaaatatttgaacaacgtttatctgatattggaaatgacgttacgctcaaatcaatggatgactttaaacctaagaatttgaagaaagtagaagatttatttattatcacatctacacatggcgaaggagatccaccagataacgctgttgaattacatgaatacatccacggacgtaaagcgccaaaattggatggggtgagattttcagtattagcattaggagatcaaacctatgaattcttctgtcaaactggtaaagattttgataaccgtttggctgaattaggggcagaaagactttatcatcgtactgattgcgatgttgattatgaagaagacgctgaaaagtggatggccaatgttattaatacgattgattcaacaccagctggtactgaaagtgaacaagttgttagcgaatctataaaatcagcaaaagaaaagaaatatagtaagtctaatccttacgatgctgaagtattgaccaatattaatttgaatggtagaggttcagacaaagagacgagacatattgagttattacttgataattttggtgaggaatatgaaccgggagattgcgtagttgtcttgcctcaaaatgatccagctatcgtagacttacttattagcacattaggttggagtccagaaacacaagttttaattaacgaggatggagatactttaaatcttgaagaggcattaacatcgcattttgaaattactaaattaacaaaaccgttaatagaaaatgctgcgatattttttgataatgaagagctttctgaaaaaattcaagataaagaatggattcaaaactacgttgagggaagggatttgattgacttattaaatgacttcgcaacgacagaactacaacctgaaaatttacatcaattattaagaaagttaccacctagagagtactcaatatctagtagttataaagcaacaccagatgaagttcacattactgttggagcagttagatatcaagcacacggtcgggaacgttcaggtgtttgttcagtacaatttgcagagagaatacaagagggcgatacaattcctatctatttaaaacgaaatccgaattttaagtttccgcaagatgaatcaacacctgtgattatgataggtcctgggacaggtgttgcaccgtttagatcctatatgcaagaacgagaggagctaggttttgaaggaaatacatggttattctttggagatcaacacttcactacagattttctgtatcaaacggaatggcaagaatggcttgaagatggaactttatcaaaattagatgttgctttttctagagatactgataaaaaagtgtatgtgcaacataaaattgcagaaaatagtgaacaatttaatcgatggattgaaaatggcgctactatttatgtatgtggtgatgaaagtaaaatggcaaaggatgttcatcaagcgattaaaaatgtgttaatcaaagagcaaaacctatctgaaacagatgcagaagaatacttaaaacaaatgaaaagagataaaagatatcaaagagacgtgtattaa

SEQ ID NO: 995 - protein, 614 aa, Staphylococcus epidermidis ATCC 12228
MNLSVTNSPFTEGQAKQINELLHTLSPNQQVWLSGYLMANQQSNTSTDSVEQHNLDDNTEAMLHEKEPSVEPEARSITILYGSESGNAQGLAEIFEQRLSDIGNDVTLKSMDDFKPKNLKKVEDLFIITSTHGEGDPPDNAVELHEYIHGRKAPKLDGVRFSVLALGDQTYEFFCQTGKDFDNRLAELGAERLYHRTDCDVDYEEDAEKWMANVINTIDSTPAGTESEQVVSESIKSAKEKKYSKSNPYDAEVLTNINLNGRGSDKETRHIELLLDNFGEEYEPGDCVVVLPQNDPAIVDLLISTLGWSPETQVLINEDGDTLNLEEALTSHFEITKLTKPLIENAAIFFDNEELSEKIQDKEWIQNYVEGRDLIDLLNDFATTELQPENLHQLLRKLPPREYSISSSYKATPDEVHITVGAVRYQAHGRERSGVCSVQFAERIQEGDTIPIYLKRNPNFKFPQDESTPVIMIGPGTGVAPFRSYMQEREELGFEGNTWLFFGDQHFTTDFLYQTEWQEWLEDGTLSKLDVAFSRDTDKKVYVQHKIAENSEQFNRWIENGATIYVCGDESKMAKDVHQAIKNVLIKEQNLSETDAEEYLKQMKRDKRYQRDVY

SEQ ID NO: 996 - DNA, 1860 bp, Xylella fastidiosa Temecula1
  CDS (1)..(1860): transl_table=11
ttgctccggctcatcacaagcatgactgcccccacctattcccttaccgcaagccccctccccgaggaccgtcgctccctgctcatggatctcgtcaagggcctggacacaccgtccctatggtggctatccggctatgtcgctggactggcacaaagccaactcacatccacattaacagcggtacaagaagaagattcagggacccaagccaaacaacgcctcaccgtgctctacggcagccagaccggcaacgcacagcgcattgctgaacaactcgccgccgaagccgaagccgcaggactggcaaggcgcctaattagagccgatgactacacccctcgtgaactagctgcagaacggctgctgtacatcgtcatcagtactcagggagaaggtgatccaccagatgactccatcggctttgtggaatttctgaatgagcgacgcgcacccaaattacccgaactgaaatacgccgtccttggccttggagactccagttacgctgacttctgcggcatcgcccgccgtctggacgcacgattgcaagcactcggtgcacaacggctgcaaccattaggcgaagccgatgtggatatcgatacagtcgccacgccatggctgaaacaagcgctgcaccatgcccgcgagcaacttaaaaacgccaccgccccactgaccaatgtcacaccgttacgcggcaattcagctctccgtggatccaatcagacgttccaagctgaactgttcaaaaaccaactggtcagcggacgcgactttaaaggtccagcgttccgaacacatggccaggcctcgaaacgggtccaccacctagagctgtcgctggaaggcagcggattacactacgaaccaggcgacgcactgggcgtacatcaccgtaatcccaatacgcttgtagatgctgtccttacgacacttaaactttcagctcacaccgaagtaacacaagataaggaaaccttgccgctgtccgagtggctcgccacccgacgcgaagtgaccagattgtcgcgaccattcttggctgcgcatgccgaacgatccggtgctgaggaactgcgcgcgctactcaccccaacccagactgccggactagcgacgctactcaacgatcatcaactgatcgacgtattgcgacgctggccggcggattgggaccataccgcactggttgcagcattacgccccctcacaccacggctgtattcgattgcttccagccgcaagcgtgtcggcgaggaagtccacatcacgattgatgaactgcactatcaagcacacggccacgaacacattggtgcagcaagcagctttctggctggtttgacagaagcagataccctccctgtctacatccaacccaatgagcgcttccgtttaccggcggatgcaacacgcgacatcatcatgattggctctggaactggagtagcaccattccgcgctttcgtccaagaacgcgcagaaagtggcgcaaccgggcgtaactggttgttcttcggcgcacaacacttcaattgcgactttctgtatcagaccgaatggcaacaagccttacaacgcggtgaactgcacgcattggatcttgcattctcccgtgaccacgctgaaaaaatctacgtacagcaccgcttattagcacaggggcaagaggtgtacacctggctccaaaatggcgcatatctgtatgtctgcggcgcaatcagcatgagtaaagacgtccatacaacactgctacaaatcctcgtcacacatggcaacctcaccaaagaagccgccgcagagacgttgattggaatgcaacgcgaaggacgctatgcacgtgatgtgtattaa

SEQ ID NO: 997 - protein, 619 aa, Xylella fastidiosa Temecula1
MLRLITSMTAPTYSLTASPLPEDRRSLLMDLVKGLDTPSLWWLSGYVAGLAQSQLTSTLTAVQEEDSGTQAKQRLTVLYGSQTGNAQRIAEQLAAEAEAAGLARRLIRADDYTPRELAAERLLYIVISTQGEGDPPDDSIGFVEFLNERRAPKLPELKYAVLGLGDSSYADFCGIARRLDARLQALGAQRLQPLGEADVDIDTVATPWLKQALHHAREQLKNATAPLTNVTPLRGNSALRGSNQTFQAELFKNQLVSGRDFKGPAFRTHGQASKRVHHLELSLEGSGLHYEPGDALGVHHRNPNTLVDAVLTTLKLSAHTEVTQDKETLPLSEWLATRREVTRLSRPFLAAHAERSGAEELRALLTPTQTAGLATLLNDHQLIDVLRRWPADWDHTALVAALRPLTPRLYSIASSRKRVGEEVHITIDELHYQAHGHEHIGAASSFLAGLTEADTLPVYIQPNERFRLPADATRDIIMIGSGTGVAPFRAFVQERAESGATGRNWLFFGAQHFNCDFLYQTEWQQALQRGELHALDLAFSRDHAEKIYVQHRLLAQGQEVYTWLQNGAYLYVCGAISMSKDVHTTLLQILVTHGNLTKEAAAETLIGMQREGRYARDVY

SEQ ID NO: 998 - DNA, 1836 bp, Nitrosomonas europaea ATCC 19718
  CDS (1)..(1836): transl_table=11
atgatggcatcacaactctcgaggggcacactgactgcggaacagtggcaacttgtcgaggcactaggctcttcgcttacgccagaacatgcatactggatcagcggctactttgccggccttggatcagctttgttacgcagcagcggcacagcctcccagtcgccggatgtatgcattcctccagtagtaacacaagcagaacccgttgcagctcgttcacttaccattcttcacatcagtgaaaccggtaacagtactgagctggcaatccgtctggcagcactggccgttgagcaagggctcagtccaacactcgttggcatagctgattacaaagttcgcaaactcaaagaagagcaggatctgctgattattacctccactcatggagaaggagatccacctcagtccggaatggaattttttgaatttgtcgaggggcgcaaggctccctcactatccgggttgcgttatgccatactcgcactgggcgacatgagctatgaacatttttgtggcgccggtaaacgtctcgatgagcgttttgaggcattaggtgcaaaacggctgcaaccgcgcgtcgattgcgatgtggattacgaagacccggcagccgtatggagtaccggtatactggcattgctcgccgccgaacaggcatcggccatatcatcagtcgcatcaccatcaaagacaacaggcggtactcagcaagctaacaattcagtttatagtaaacgaaatcctttcccggcaactgtcatcgataatattgttctctctggtcgaggctcgacccgggaaacacaccatattgaaatttcacttgctgattccggcctgacctacgaaccgggtgatgcattaggcatcgcggctcataacgaccccgcaatggttgaagcactactggctgcgctcaacatgaatccagacgcaccactcactgtaaagggtcagacaaccactctctttgatgcacttggcaaatcgttcgaaatcaccacagcaacgctgcgtttccttgatcactggggagaattgaccggcacgactgatattttttccgcaatggataataccaagcgcgcagcattccttcatgataatcatataattgatatcattcgcgcttatccactcaagggccttgatccgcagcgttttgtcgatggactgcgtccgttgcagccgcgtctctattccatagcctccagtttgtcgatctgtcctgatgaggcacatatcactattgcgccagtacgctataagctgcatggggaacctcgctcaggtgtcgcctccggtcatctggcagatcgggctatagctgattccgtactaccggtttatatccagagtaatcctcatttccgtctgccatccaacggtgagccgatcatcatgatcggtgccgggaccggcgtggcaccctatcgtgccttcatgcaagagcgtgaagcaaatggtggtggccgttcatggatgtttttcggtgaacgtaatttccgtaccgattttctttaccagaccgaatggcaggactggctgaagaatggtgtcttaacaaaaatggaagtcgccttctcacgtgacggagcagagaaggtctatgtacaacatcgcatctatgagcatgcgcacgatgtctatgcctggctggaagaaggcgcctatatttacttatgtggcgacgcttcgcacatggcacccgatgttcataacatactggtcaccgttattgaagaacaggcaagcgttcaacgtgaggaagcagaagaatatcttcgcgatttgcaacgcgatgggcgctatcagcgcgatgtttattga

SEQ ID NO: 999 - protein, 611 aa, Nitrosomonas europaea ATCC 19718
MMASQLSRGTLTAEQWQLVEALGSSLTPEHAYWISGYFAGLGSALLRSSGTASQSPDVCIPPVVTQAEPVAARSLTILHISETGNSTELAIRLAALAVEQGLSPTLVGIADYKVRKLKEEQDLLIITSTHGEGDPPQSGMEFFEFVEGRKAPSLSGLRYAILALGDMSYEHFCGAGKRLDERFEALGAKRLQPRVDCDVDYEDPAAVWSTGILALLAAEQASAISSVASPSKTTGGTQQANNSVYSKRNPFPATVIDNIVLSGRGSTRETHHIEISLADSGLTYEPGDALGIAAHNDPAMVEALLAALNMNPDAPLTVKGQTTTLFDALGKSFEITTATLRFLDHWGELTGTTDIFSAMDNTKRAAFLHDNHIIDIIRAYPLKGLDPQRFVDGLRPLQPRLYSIASSLSICPDEAHITIAPVRYKLHGEPRSGVASGHLADRAIADSVLPVYIQSNPHFRLPSNGEPIIMIGAGTGVAPYRAFMQEREANGGGRSWMFFGERNFRTDFLYQTEWQDWLKNGVLTKMEVAFSRDGAEKVYVQHRIYEHAHDVYAWLEEGAYIYLCGDASHMAPDVHNILVTVIEEQASVQREEAEEYLRDLQRDGRYQRDVY

SEQ ID NO: 1000 - DNA, 1872 bp, Vibrio vulnificus YJ016
  CDS (1)..(1872): transl_table=11
atgaatagggatgtcgtgactatgtcttctcaaaagaaagtgtcatcaggaaacactactccatcaggattggctggcttagctagcccactcaacgatcaacaaattaatctattacagcagatttcagatttatcaccgcagcaattggcttgggtgagtggctacttttggggattgtcgcaaagtgccgcgccatccgctgtcacgcctatcgctcaagcggtttcggctgtggccgctaaacccgcaggaaaactgacgattatctttgcttctcaaacaggcaacgccaaaggggttgctgaagcgctagagcaagaggcaaaagcagaaggtattgctgttcagctatttgatgcgagcgattacaaaggtaaaaacttagccaatgaaactcatgtcattattgtcgcgtccaccaatggtgaaggtgaagcgccagataacgctatcgagctgcacgagtttctccagtcaaagaaagctcccaaattaccaaacctgcaatacggtgtgattggtttaggggattcaagctatgaattcttctgtcagacgggcaaagatttcgattcgtatcttgccaagcttggtgcgacgccattcatcgaacgtgtcgattgcgatgtcgactatgatgcatccgcagcgcagtggcgaaaacaggcgctagaaaaagtaaaagatgctttgtctgcgggagttgaagctgacgtggttcaattgccagtcgcgcaattggctgcggggcatgctctctatactaagcaaaaaccttatgctgcgacgctgctgaccagccaaaaaatcacaggccgagattcaggtaaagacgttcgtcacgttgaaattgacctagcaggctccggaatcacttatcagccgggagatgccttaggggtgtggtttgagaatagtggtgagttagccaatcaagtgctagccaaagtgggattgtctggggtggaaagcgttgatgtggacggtgaaagcctctctattcacagtgctttggtgagtaagtttgaaattacctcttctaatcctcaacaagtcgaaaagtttgcccagctttccggtagcaaaaagctgctaaaacttgtggaagagaaagacaagctgcgtgagtacgcaggtaatactcagcttgtggacctgttagcggaaaagcaaaccaaacttacggcagaggagttggtggggctactgcgtcgccttactccaaggctttactccattgcctcgagccaaacggaagtggatgaagaagttcatctcaccgttggtttggttgaatacgatgttaaaggtgagaaacgttttggaggcgcttctggttatttagcgcaacgtctagaagaaggtgagcaagtaaaagtatttgtagagaacaacaataacttcaagttgccagcagacgataacgtcccagtcatcatggttgggcctggtacgggtattgcacctttccgcagtttcatccaagagcgtgataaccgcggtgcagaaggcaaaaactggttgttctttggtgatcgtacctttacgcaagatttcctctaccaggttgaatggcagaagtatctgaaatctggcctgctgacgaaactcgatgtcgcttttagtcgtgaccaagcagagaaagtctatgtgcagcaacgcatcttagaaaatgcagcgcaagtatggcagtggattcaagaaggcgcttatctctacgtctgtggtgatgcgaaccgaatggcaaaagatgttcatcaagcctttgtcgcagtcgcagagcaagagggcaagatgtcacgcggtgacgcagaagaatttattaacgacttacgtaaagcaaaacgttatcaaagggatgtgtactaa

SEQ ID NO: 1001 - protein, 623 aa, Vibrio vulnificus YJ016
MNRDVVTMSSQKKVSSGNTTPSGLAGLASPLNDQQINLLQQISDLSPQQLAWVSGYFWGLSQSAAPSAVTPIAQAVSAVAAKPAGKLTIIFASQTGNAKGVAEALEQEAKAEGIAVQLFDASDYKGKNLANETHVIIVASTNGEGEAPDNAIELHEFLQSKKAPKLPNLQYGVIGLGDSSYEFFCQTGKDFDSYLAKLGATPFIERVDCDVDYDASAAQWRKQALEKVKDALSAGVEADVVQLPVAQLAAGHALYTKQKPYAATLLTSQKITGRDSGKDVRHVEIDLAGSGITYQPGDALGVWFENSGELANQVLAKVGLSGVESVDVDGESLSIHSALVSKFEITSSNPQQVEKFAQLSGSKKLLKLVEEKDKLREYAGNTQLVDLLAEKQTKLTAEELVGLLRRLTPRLYSIASSQTEVDEEVHLTVGLVEYDVKGEKRFGGASGYLAQRLEEGEQVKVFVENNNNFKLPADDNVPVIMVGPGTGIAPFRSFIQERDNRGAEGKNWLFFGDRTFTQDFLYQVEWQKYLKSGLLTKLDVAFSRDQAEKVYVQQRILENAAQVWQWIQEGAYLYVCGDANRMAKDVHQAFVAVAEQEGKMSRGDAEEFINDLRKAKRYQRDVY

SEQ ID NO: 1002 - DNA, 2151 bp, Chlamydomonas reinhardtii
  CDS (1)..(2151)
atggccggcgaacccgccaagacgtccagcgcgtactggcgctgggcgctggcggctggtgtgccagtggcgtggtacctatactcccgcggccggaaagcagaggacgagcgcacggacatcgatgccttcttcaaggcgcccgagccggttggctctactggcagccggcccgtgggcggcggcctgcagagcggacccattgacgccttcttccgaaacgcgggcgaggaggtggacacacgcaacccacttgacttcgatagcttcctggtcggcaacaagcgcggtgcggctggcaaagccgcctctgccactgctgcgcccgcgaagcccaaggaggcaggcccctcgcccgaaatgaagcccgtgacggtgttgtacggcaccgagttcggtttcagcaaggagatcgcagaaaagctgtgcagccagctcaaggccgcgggctgcaagctgtggccccagctggagaacatggccgaccacgcggatggctatgactttagcaaggcacaggtggctgtactggcctgctccacacagggtgacggcgtgccgcctaccgaggctcgcgagttctgcgagtggctgttcgcgggcaaggccggcagcctggcgcacctgcagtacgcggtgtgcgccctgggcgacaagtcctacacgcacttctgccgctgcggcaagcagctggactcggcgctggaggccgcgggcgccaagcgcctggcggagcgtgtggatgtgaacaaggaggactggccggtggtggatgcctggctggagggcgtggtggcagccgtgcgtggcatggcgctcaagagctttgtcgagctggggctagatgtgggcgacagcagtgccgcgaaggccgctgcgcccaagaaatggggtaagagccggccctactttgcgacggtgctggcgctggagggcctgtgcacgctgtccgggcctgacgacaagaacacggtgcgcatggagctggacctcggcgacagcggcatcggctacctgcccggagacgcgctgggcctgtaccctaccaaccagccgcaggctgtggaggagctgctccgcgtcatgggtgcctccgcctccgaatcggtgcctgtgcccagctggcactacgaggaggagggcgtggcgcctgggggcagcatgccgctggcgcaggcgctgaccaagtgctacgacatcaggtcgcccaagcccgagctgctgaggcttctggtggcggcgctggacggcaccgccaacgatcacgcagctaacggccacgcgaacggccatgcgaacggccacgccatcaacggcgacgctgcggctgtgcctccgcagcagcggctgcgtgacgcgctcaaggaccaggccgccattgaggcctacctggagccgcgccacgtggtggatgtgctggcggacgccgcacctgccaagctcaccagctcgcaggtgctgtcctgcctgcgtcagctgcagccgcgcctgtactccatctcctcgtcgccgctggaggcgccggcgcgcgtgcaggtgacggttgccgaggtcaagtacctgagcctgggcaaggggcgcgtcggcgtctgctccaccatgctttcggagcgcctcaaggtgggcgcgcgcgtgccggtgtacgtccacaagaaccctgacttccgcctgcctgccgacgcggctcaacccattatcatggtgggccccggcacgggcctggcgcccttccgctccttcatcctggagcgcctgctggaggcgcaggccagcaacggcaagaaggcccccggcgagatggtgctctactttgggtgccgccgctccgaccaggactacctctacggtgacgtgctggagggctgggcggcggagggcaagatcaagctattcaccgcattctcgcgccagcaggcccagaaggtgtacgtccagaaccggctgacggagagcgcggaccttgtgtggggcctgctcgagaagggcgcgcacttctacgtgtgcggcgacgccagctccatggcgggcagcgtggagaaggcgctgctacagctcattggggagcggctggaggcgggaccggcgggcgcggacgcgtacttgcagaagctatcggacaccggccgctaccagcgcgatgtctggtactga

SEQ ID NO: 1003 - protein, 716 aa, Chlamydomonas reinhardtii
MAGEPAKTSSAYWRWALAAGVPVAWYLYSRGRKAEDERTDIDAFFKAPEPVGSTGSRPVGGGLQSGPIDAFFRNAGEEVDTRNPLDFDSFLVGNKRGAAGKAASATAAPAKPKEAGPSPEMKPVTVLYGTEFGFSKEIAEKLCSQLKAAGCKLWPQLENMADHADGYDFSKAQVAVLACSTQGDGVPPTEAREFCEWLFAGKAGSLAHLQYAVCALGDKSYTHFCRCGKQLDSALEAAGAKRLAERVDVNKEDWPVVDAWLEGVVAAVRGMALKSFVELGLDVGDSSAAKAAAPKKWGKSRPYFATVLALEGLCTLSGPDDKNTVRMELDLGDSGIGYLPGDALGLYPTNQPQAVEELLRVMGASASESVPVPSWHYEEEGVAPGGSMPLAQALTKCYDIRSPKPELLRLLVAALDGTANDHAANGHANGHANGHAINGDAAAVPPQQRLRDALKDQAAIEAYLEPRHVVDVLADAAPAKLTSSQVLSCLRQLQPRLYSISSSPLEAPARVQVTVAEVKYLSLGKGRVGVCSTMLSERLKVGARVPVYVHKNPDFRLPADAAQPIIMVGPGTGLAPFRSFILERLLEAQASNGKKAPGEMVLYFGCRRSDQDYLYGDVLEGWAAEGKIKLFTAFSRQQAQKVYVQNRLTESADLVWGLLEKGAHFYVCGDASSMAGSVEKALLQLIGERLEAGPAGADAYLQKLSDTGRYQRDVWY

SEQ ID NO: 1004 - DNA, 1881 bp, Physcomitrella patens subsp. patens
  CDS (1)..(1881)
atggtagagaagcagaggattctggttctgtatgcgacccagacggggaacgcccaggatgttgccgaacgcgtgggccgggaggctgcccgtcaccacttcaagcccgtagtggagtctatgcacttgtatgaccccagcaagcttccccaggaaaaaattgccatctttgtggtgtcgaccacaggccagggcgacccgccggagtccatgagggtgttctggaaatttttgcttcgcaggagccttggtcctcattggttggaatcaacactgttttctgtgtttgggttaggagattctgggtaccagaagtataacatcattgggaagaagcttgataggaggttattggatttgggcgggacgtccgtagtgcccagggggttaggagatgaccaacacccgtcaggtttcgaggctggtttggacccctggttggcgtctctatgggttgctttacgccgccatgtcccacttccagccggccttgaagatcctagacccgaagacacgggtatcagtgttttagaccctccaaagtatcgggttacttttcatcatcctttggcgccagagtcgaagttagccactttacctgaaagtttaaagacggatattgtggcaagtagcactggatttggccccccagtcatgcccatattcgctaaaatgttagtaaattctcggattaccagtgaggatcacgagcaagacgttcggcacattgaacttgacttgggaagctcgggagctcagtacgtacccggggatattttgaccttgttaccaagccaaaaactagcttctgttgacaaattcttacaacgatgtggtctcgatggagacacttttgtcacggtggaagctaatgacagtgatgtttgtaccatcgcacaagccgaagatgttgaaaccgtttgcaagccaacagcagtcttactgaagacaatagtcgaagctctcatggacatcgactctgcttcccctcgtcgttatttctttgaggttatgagtcattttgcgtctgctgagcatgagaaagagagactgcagtattttgcgactcctgaaggccgtgatgatttatatcgttacaatcaaagagaaggacggacggttcttgaagtattggaagactttccatcggttcaaatgccattcgaatggcttctacagacggtgcctcgccttcaacaacgctctttctccatttcatcatcacaactggcacattcgaatgaggctcatttgacagtggctgtggtagagtggacgactccgtttaaaaggaaacgaagaggtctttgctcgtcgtggctggcctcccttgacccgaagattgggaaggttttcctacctgtttggttcactaagggtgccatagctttgccttcgccttctgtgccactgattctcgttgggcctggaaccggctgtgctccctttcgagcttttattcaagagcgagttgcactctcaaatgcggaagaagcagtggcgccagttctgttcttttttggctgtcggatgcaggcaaaggatttcttatacgaatctgactggtcagcatggtctcaaggcaaaaatgttttatcaccggatgtgggtggagacttttttgttgccttttctagagatcaaccagagaaagtgtatgtgcagcataagatacgtgagcagggaaagaaagtgatgcagttcattcagtcaggagcagtgatatatgttgcgggatctgcaaacaagatgccagccgatgtgatggcagcttttgagactgtacttgcgaaggaaactggttggcctcaggagaaagcaaccaaatatttgagagatctggagcgcagaggtcaatacgtagttgaggcatggtcgtga

SEQ ID NO: 1005 - protein, 626 aa, Physcomitrella patens subsp. patens
MVEKQRILVLYATQTGNAQDVAERVGREAARHHFKPVVESMHLYDPSKLPQEKIAIFVVSTTGQGDPPESMRVFWKFLLRRSLGPHWLESTLFSVFGLGDSGYQKYNIIGKKLDRRLLDLGGTSVVPRGLGDDQHPSGFEAGLDPWLASLWVALRRHVPLPAGLEDPRPEDTGISVLDPPKYRVTFHHPLAPESKLATLPESLKTDIVASSTGFGPPVMPIFAKMLVNSRITSEDHEQDVRHIELDLGSSGAQYVPGDILTLLPSQKLASVDKFLQRCGLDGDTFVTVEANDSDVCTIAQAEDVETVCKPTAVLLKTIVEALMDIDSASPRRYFFEVMSHFASAEHEKERLQYFATPEGRDDLYRYNQREGRTVLEVLEDFPSVQMPFEWLLQTVPRLQQRSFSISSSQLAHSNEAHLTVAVVEWTTPFKRKRRGLCSSWLASLDPKIGKVFLPVWFTKGAIALPSPSVPLILVGPGTGCAPFRAFIQERVALSNAEEAVAPVLFFFGCRMQAKDFLYESDWSAWSQGKNVLSPDVGGDFFVAFSRDQPEKVYVQHKIREQGKKVMQFIQSGAVIYVAGSANKMPADVMAAFETVLAKETGWPQEKATKYLRDLERRGQYVVEAWS

SEQ ID NO: 1006 - DNA, 2073 bp, Magnaporthe grisea 70-15
  CDS (1)..(2073)
atggccgaactcgacactctggacatcattgtcctcgggctgatcctttgcggcactattgcgtatttcaccaagggcaaatactggggggtagtcaaagacccttacgcagcttcatttgccaacacaaatggacccaagacaggcaagacgagaaacattgtggagaagatggaggagacgggcaagaattgtgtgatcttctacggctcgcagacaggtaccgccgaggactacgcctccaggcttgcaaaggagggaaagagccgcttcggactcgagacaatggttgccgatcttgaggactacgactacgaaaacctggacaccgtcccgagcgacaagattgtcatgtttgttctcgccacctacggagagggcgagcctaccgacaacgccgtggacttttacgagttcattaccggagaggatgtctcgttttccgaaggcagcactcttgacaacctgaactacgtcgctttcggtctcggcaacaacacctatgagcactacaactccatggtacgcaacgtcaacaaggccttggagaagcttggtgcgcaccgcatcggcgacgcaggagagggcgatgacggcgctggcacaatggaggaggacttcctggcctggaaggaccccatgtgggccgccctcgctgagaagatgggtcttgaagagcgcgaggccgtctacgagcccgtctttagcgtgactgagcgtgagggactcaccgtcgaatctcccgaagtctacctcggcgagcccaacaagatgcacctggagggcaccgccaagggacccttcaacgctcacaacccatacattgcccccattgtcaaatcgtatgagcttttcaacgtcaaggatcgcaattgtctgcacatcgacgtcgacgtcagtggctctaacctgacgtaccagaccggtgaccacatcgcagtctggcctactaacccgggcgaggaggtcgactgcctcctcgatgtgcttgggcttacggacaagcgtgacaccgtagtcagcgtcaggcctcttgagccaaccgcaaaggttcccttccccgcacctacgacgtacgatgccattctccgctaccacatggagatatgtgctccggtctcgcgtcaattcattgccacactggccgcctttgcgcccgatgaggaaaccaaggcggagatgaccaagctcggcggtgacaaggactacttctcagcaaagatcagcaagcactacctcaacatcgcacgagtacttttcaatgttggcaagggcaagaagtggaacaacattcctttctccgctttcatcgaaggtctcacaaagttgcagcccaggtactactcgatttcgtcctcctcgttggttcagcccaaggtcatcaccattactgctgttgtagagaagcaggagattcctggccgcgacgatccattccgcggtgttactaccaactacctcttggccctcaagcagaagcaaaatggagaaccccacccagagccgtttggtcgcacatttgcgctcgcgggacccagggacaagtacgatggaatcaaagttcccgtccacgtccgccattccaacttcaagctgccctcagactcgacgaagcccatcatccttgttggaccgggaactggcgtggctccgatgagggcttttgtccaggaacgcgccaagcaagccgagaacggcgaagaagttggaaagacgatattgttctttggctgccgaaagtctaccgaggactttttgtacaaggatgagtgggatgaatacaagaaggttcttggcgacaagttcgagcttgtcaccgctttttcgagagagggtcccaagaaagtctacgtccagcaccgcctgaaggagagggctcaagagatcaacgagctcttgaccaagaaggcttacatctacgtctgcggtgatgcggccaacatggctcgcgaggtcaactctgtcctgggacagataatagcggagcagcgtggcattccggaggccaaggccgaggaaatcgtcaagaacatgagggcggcaaaccagtaccaggaggacgtctggtcctaa

SEQ ID NO: 1007 - protein, 690 aa, Magnaporthe grisea 70-15
MAELDTLDIIVLGLILCGTIAYFTKGKYWGVVKDPYAASFANTNGPKTGKTRNIVEKMEETGKNCVIFYGSQTGTAEDYASRLAKEGKSRFGLETMVADLEDYDYENLDTVPSDKIVMFVLATYGEGEPTDNAVDFYEFITGEDVSFSEGSTLDNLNYVAFGLGNNTYEHYNSMVRNVNKALEKLGAHRIGDAGEGDDGAGTMEEDFLAWKDPMWAALAEKMGLEEREAVYEPVFSVTEREGLTVESPEVYLGEPNKMHLEGTAKGPFNAHNPYIAPIVKSYELFNVKDRNCLHIDVDVSGSNLTYQTGDHIAVWPTNPGEEVDCLLDVLGLTDKRDTVVSVRPLEPTAKVPFPAPTTYDAILRYHMEICAPVSRQFIATLAAFAPDEETKAEMTKLGGDKDYFSAKISKHYLNIARVLFNVGKGKKWNNIPFSAFIEGLTKLQPRYYSISSSSLVQPKVITITAVVEKQEIPGRDDPFRGVTTNYLLALKQKQNGEPHPEPFGRTFALAGPRDKYDGIKVPVHVRHSNFKLPSDSTKPIILVGPGTGVAPMRAFVQERAKQAENGEEVGKTILFFGCRKSTEDFLYKDEWDEYKKVLGDKFELVTAFSREGPKKVYVQHRLKERAQEINELLTKKAYIYVCGDAANMAREVNSVLGQIIAEQRGIPEAKAEEIVKNMRAANQYQEDVWS

SEQ ID NO: 1008 - DNA, 2043 bp, Candida albicans SC5314
  CDS (1)..(2043): transl_table=12
atggcattagacaaattagatttatacgttatcgtgacattggtggttgcagtagcagcatactttgccaagaaccaattccttagcaaaccacaagacactggatttctttccaatgatggtgctggtggaagttcaaggaacatattggagacgttgaagaagaataataaaaacacgttattactatttggatcacaaactggtactgctgaagattatgccaataaattgtctcgtgaattgcattccagatttgggttgaacaccatggttgccgattttgctgattatgattttgataattttggagatatcacagacgatatattggtgtttttcattgtcgctacttatggtgaaggggaacctactgataacgccgacgaattccacacttggttaaccgatgaagctgatactttgagtactttgagatttactgttttcggattaggtaactccacttatgagttttataacgctattggtagaaaatttgaccaattattggaagaaaaaggaggtgaaagatttgctgaatatggtgaaggtgatgacggtactggtactttggacgaagatttcttatcttggaaagatggtgtttttgattcattgaagaataatttgaattacgaagaaaaagagttgaaatatgaaccaaatgtcaaattgactgaacgtgacgatttaactgttgatgactctaatgtttcccttggtgaaccaaataaaaagtatattaactctcaaggcgttgatttaagcaaaggtccatttgatcacacacacccatatttagccaagataacgaaaacaaaggaattattcaattctaaagatagaaattgtgtccatgttgaatttgatatttctgactccaacttgaaatacagcactggtgatcatttagctgtttggccatctaattccgatgaaaatatcaaacaattccttaaatgttttggtttagaagacaaggaaaacaccgttatagaattgaaggcattagactccacttattccattccattcccaagcccaattacctatggtgctgttatcagacatcatttggaaatttctggaccaatttcgagacaattattcttatccattgccgggtttgccccaaatgaagagacaaaggctacattaactagaatcggtaacgataaacaagagtttgcttctacaattacccgtagaaagtttaatattgccgatgcattgttgtttgcttccaaaggtaaagcttgggttgatgttccatttgaatttattattgaaaatgttcaacatttgacacctcgttactactcgatttcttcttcatctttaagtgaaaaacaattgatcaatattactgctgttgttgaagctgaagttgaaagtgacggtagagctgttactggggttgttactaatttattgaaaaacattgagattgaacaaaataacaccaacgaaaccccagtagttcattatgatttgaatggtccaagaaacaaatttagcaagtttaaattacctgttcacgttagaagatccaatttcaaattaccaaagaatactaccactcctgttattttgattggaccaggaactggtgttgctccgttgagaggattcgttagagaaagagtccaacaagttaagaatggcgtgaatgttggtaaaactattttattctatggttgcagaaacgaacatgatgatttcttgtataaacaagaatggtctgaatatgctagtgtattaggtgacaaatttgaaatgttcaatgctttttcaagacaagatccatcgaagaaagtatatgtacaagataaaattgtggaaaattacaaaattgttaatgaattgttaaacaatggtgccactatctacgtttgtggtgatgccagtagaatggcaagagatgttcaagcagcaattgctaaaattgttgccaaagatagagatatctcacaagaaagtgctactgaattggtcaaatcttggaaagtacaaaacagatatcaagaagatgtttggtaa

SEQ ID NO: 1009 - protein, 680 aa, Candida albicans SC5314
MALDKLDLYVIVTLVVAVAAYFAKNQFLSKPQDTGFLSNDGAGGSSRNILETLKKNNKNTLLLFGSQTGTAEDYANKLSRELHSRFGLNTMVADFADYDFDNFGDITDDILVFFIVATYGEGEPTDNADEFHTWLTDEADTLSTLRFTVFGLGNSTYEFYNAIGRKFDQLLEEKGGERFAEYGEGDDGTGTLDEDFLSWKDGVFDSLKNNLNYEEKELKYEPNVKLTERDDLTVDDSNVSLGEPNKKYINSQGVDLSKGPFDHTHPYLAKITKTKELFNSKDRNCVHVEFDISDSNLKYSTGDHLAVWPSNSDENIKQFLKCFGLEDKENTVIELKALDSTYSIPFPSPITYGAVIRHHLEISGPISRQLFLSIAGFAPNEETKATLTRIGNDKQEFASTITRRKFNIADALLFASKGKAWVDVPFEFIIENVQHLTPRYYSISSSSLSEKQLINITAVVEAEVESDGRAVTGVVTNLLKNIEIEQNNTNETPVVHYDLNGPRNKFSKFKLPVHVRRSNFKLPKNTTTPVILIGPGTGVAPLRGFVRERVQQVKNGVNVGKTILFYGCRNEHDDFLYKQEWSEYASVLGDKFEMFNAFSRQDPSKKVYVQDKIVENYKIVNELLNNGATIYVCGDASRMARDVQAAIAKIVAKDRDISQESATELVKSWKVQNRYQEDVW

SEQ ID NO: 1010 - DNA, 1743 bp, Mycobacterium abscessus
  CDS (1)..(1743): transl_table=11
atgaagatcgcctacattcccgaagacgcacccttcaacgaggaccagagagcatggctttcgggcttcctcgccgggttgcactcccgcctcgccatgaacctggcggcgcaaccgccggcggccaccgcggatctggctgctccccggccaccactgcgcatcctgtacggcacccagacgggcaacgcggaaatcgtggcgggcgacgccgcggcggccgccaaagcacaaggtttcgacgtgaccgtcagcggcctcgacgaaatcgccctcgacgagttcgcgggcctgcgatacgtcctgatcatcacctccacctacggcgagggcgagatgcccgacaatgccgaattattctgggatgcactgtcttcggcggtcgctccacgactcgagggagtgtcctacggcgtgctggccctgggtgacaccagctacgacgggttctgccaggccggcaagctgatcgatacccgtcttgagcaactgggcgcgagccgcgtggtcgggcgcaccgactgcgacgtcgattacgaggcccaggccgcggagtgggttcagggcgcagtggcaagcctggtcactctggccggcgccagcggcagtccgggcactccccctccgagcaccgtcgcgcgttccgggtggacccgcaagaacccgttccccgccgaggtcccggtcaaccgactgctctcacgggcaggctctgacaaggagattcgccactacgagttcgcactcgccgacagcgggatcacctacgaagcgggcgacgcactcgcggtgattccggagaacgacccggcgctggtcgaggcgatcgccgatcacttccgggtctcgaccggcacactcgtcgatggggagccgctcggagaactgctacgccatcggtacgagatcagtactccgtcgcgagacctgttgagcgaggtggaaagccgtgccgaaagcgaggagttctcgcacgcgctgcgcggcggggtcaaagaggtactggatacctggctatatggcaaggacattctcgacatcctgcgtatcggcggcgacgctttgagcctcgaagagttcatgggactgctcaagcccctacagcatcgcgcctactcgatctcatcgagcgcgctggctcacccggataggatccacctgaccgtggccagcgtccggtatcagagcctgggccgtgagcgcggcggcgtgtgctcgacgttcttggcagaccgcggcagtaacgcacggatcttcctgcaacccaacaaatcattccgagtgcccagcgacgacgaagccccgatgatcatggtgggccccggcacgggtgtggccccattccgcgcattcctgcaggaacgcgagcagcggggagcgaggggcaacaactggctgttcttcggcgaccagcaccgggcacatgactacatctacgagaacgagatcgacacctggcactcttctggcctcctggatcgcctcgatctcgccttctcccgcgatcaagccgagaaggtctatgtgcagaaccgaatgcgcgagcatggcagcgatctgttcgcatggctgcaggacggcggccacttctacgtctgcggtgacgcgacacgcatggccaaggacgtggacaaggcgctgcacgagatcgtcggcgagcacggcggattcagcgacgatgaggcctccgaatatgtgaataccctcaagcgggaaaagcggtacgtccgcgatgtgtactga

SEQ ID NO: 1011 - protein, 580 aa, Mycobacterium abscessus
MKIAYIPEDAPFNEDQRAWLSGFLAGLHSRLAMNLAAQPPAATADLAAPRPPLRILYGTQTGNAEIVAGDAAAAAKAQGFDVTVSGLDEIALDEFAGLRYVLIITSTYGEGEMPDNAELFWDALSSAVAPRLEGVSYGVLALGDTSYDGFCQAGKLIDTRLEQLGASRVVGRTDCDVDYEAQAAEWVQGAVASLVTLAGASGSPGTPPPSTVARSGWTRKNPFPAEVPVNRLLSRAGSDKEIRHYEFALADSGITYEAGDALAVIPENDPALVEAIADHFRVSTGTLVDGEPLGELLRHRYEISTPSRDLLSEVESRAESEEFSHALRGGVKEVLDTWLYGKDILDILRIGGDALSLEEFMGLLKPLQHRAYSISSSALAHPDRIHLTVASVRYQSLGRERGGVCSTFLADRGSNARIFLQPNKSFRVPSDDEAPMIMVGPGTGVAPFRAFLQEREQRGARGNNWLFFGDQHRAHDYIYENEIDTWHSSGLLDRLDLAFSRDQAEKVYVQNRMREHGSDLFAWLQDGGHFYVCGDATRMAKDVDKALHEIVGEHGGFSDDEASEYVNTLKREKRYVRDVY

SEQ ID NO: 1012 - DNA, 1617 bp, Mycobacterium abscessus
  CDS (1)..(1617): transl_table=11
gtgaccgcccagccggatttttcgttgatcgtcggctacggcaccgatatgggcaacgccgaggacgccgccatgtcgttctgcgaggctctggaagaggccaccggcatcaaatccgaggcggtcgaactcaaccaggtcgatatcgcgaacttgcagtcggcgtcacacctcgtcgtggtggtgtccaccttcggcgacggcgaatttcccgataatgcgctgttgttctgggaggcgctgagtgctgaaggcgccgagcggcttgcgcacctgcaattcgcggtcttggcattgggcgacagcagctacgaattcttctgcaatgcggggctgctgttggacaagcgcctggaggagcttggcgcgagtcggctcaccgaacgtaccgatgtcgacggaccgtacctgcagccctcgaaggaatggaccaccgatctggtgaagctgctggccgccggccctattgggtccacggaatccgccgtcgtcaccgaaacggcaacacccgccaaacgcgaacgccacgaaaccgtcgaggcacgccttgttgtcaaccgattgctcaccacggcggaatccgacaaggaggtgcgtcactatgaggtggacctcgcggggaccggaatctcctatgaagccggcgattccatcgccgtgcacgcgcccaatgaccccgcattggtcgaggcgatccttgccgagttgggcgtgccggccgcgcatcggctagccggccacgacctgcccctcggtgagctgttatccgaccacctggagatccggactccctcgcgaacgcttcgggcgttggtcgcatcccgcaccgacgacgcggatgcggtcgccgcgctcagcggtgacggcacgccggtaccgggctcctggctatacggtaaggatgtgttggacctggtcaggctgggaaagctggccgttgaggaactgatcgacaatctgcgccccctgcagttccgcgattactccatcgcctcaagccctgtcgtgtatcccgatacggttcatctgaccgtggcgaccatccgctactccaatgccgatcgcacgtatggcggtgtggcgtcgacattcttggctgatcgcgggcaggcggtccgggtgcatctgcgcccaaaccacgccttccggctgcccgggggccatgtcccgatcatcatgatcgggccggggacggggattgcgccgtttcgcggctttctgcaagagcgccaggcggccggttccacggggcgttcctggctgttcttcggtgaccggcatcgcgccgcgagtttcctctacggcgaggagctgcaggggttcgtggcctcgggtgttctgactcgacttgaccttgccttctcccgtgacggggccaacggtgagcccaaacagtatgtccaacatcgtatgtcggagaatgcggccgagctgtgggcctggctccaggacggggcttatgtgtatgtgtgcggcgacgccgagcacatggcaaaggacgtcgatgcgacactgcacgagatcgtggctcgctgcggtggtatggacgccgccggcgcacacgcttatgtcaatgaactcatcaagaaccaccggtacgtgcgcgacgtctactag

SEQ ID NO: 1013 - protein, 538 aa, Mycobacterium abscessus
MTAQPDFSLIVGYGTDMGNAEDAAMSFCEALEEATGIKSEAVELNQVDIANLQSASHLVVVVSTFGDGEFPDNALLFWEALSAEGAERLAHLQFAVLALGDSSYEFFCNAGLLLDKRLEELGASRLTERTDVDGPYLQPSKEWTTDLVKLLAAGPIGSTESAVVTETATPAKRERHETVEARLVVNRLLTTAESDKEVRHYEVDLAGTGISYEAGDSIAVHAPNDPALVEAILAELGVPAAHRLAGHDLPLGELLSDHLEIRTPSRTLRALVASRTDDADAVAALSGDGTPVPGSWLYGKDVLDLVRLGKLAVEELIDNLRPLQFRDYSIASSPVVYPDTVHLTVATIRYSNADRTYGGVASTFLADRGQAVRVHLRPNHAFRLPGGHVPIIMIGPGTGIAPFRGFLQERQAAGSTGRSWLFFGDRHRAASFLYGEELQGFVASGVLTRLDLAFSRDGANGEPKQYVQHRMSENAAELWAWLQDGAYVYVCGDAEHMAKDVDATLHEIVARCGGMDAAGAHAYVNELIKNHRYVRDVY

SEQ ID NO: 1014 - DNA, 1848 bp, Xanthomonas campestris pv. campestris
  CDS (1)..(1848): transl_table=11
atgaccgccgccagccccgccgtgccgcccagccccttgcccgacgagcgcaaggcgctgctggagcgtctggtcgacggtctggatgccccgtccctgtggtggctgtccgggtataccgccggcttggcgcagggtcacccgccgcgctcgctggcggtactgccgggtggccaggtgcatgcggtagcgcacgagagccagcgcctgaccgtgttgtacggcagccagaccggcaatgcccggcggcaggccgagcaactggccgccgaggccgaggccgccggagtgagcgtgcgcctgctgcgtgccgatgcctaccccacccgcgagctggccagcgaacgcctgttgtacgtggtgatcagcacccagggcgaaggcgatccgccggatgatgcgattggcctggtcgagttcctgagcgggcgccgcgcgcccaagctgccggagctcaagtacgcggtgctgggcctgggcgattccagctacgccgatttctgcggcattgcgcggcggatcgacgaacgcctggccgaactcggcggcagccgcgtgcaaccgcgcggcgaagccgacctggacatcgacagcgtcgccactccctggcgcacgcatgcgctgcggcatgcgcgcgagcagctcaagagtgcccagccatcggccacggtcacgccgctgcgcagccagccggccgcgccggtgtggtcgcagcagcacccgttcgccgccgagttgctggccaaccagatcatcagcgggcgcgatttcaagggcccgggcttccgtgtctatggcccggcgatcaagcgggtgcgccacctggagttctcgttggacggcagcgggctcagctacgagcccggcgatgcgctcggcatccgtcaccgcaacccgcctgccttggtcgatgcggtgctggaaagcctgcgcctggatggtcatgcgtcggtcaccatcggcgaggacactctggccttgaacgagtggcttgccacgcggcgcgagctgaccaagctctcgcggcccttcctggctgcgcacgccgaacgtgcccatgcagacgatctgcaggcgctgctcacccagacccagactgccggcctggcgtcgctgctctccgatcaccagttgatcgacgtgttgcgacgctggccggcggattgggaccacggcggcctgctggccgccctgcgtccgctcaccccacgcctgtattccatcgcctccagccgcaagcgcgtgggcgaggaagtacacctggtggtggatgaactgcattaccaggcgcacggccatgggcacgtgggttcggccagcggatttctggcggcactggccgaaggcgacaccgcgccggtgtatatcgaaccgaacgagcgcttccgcgtgccggcagatccggatcgcgacatcctgatgatcggcccgggcaccggcgtggcaccgttccgcgcattcgtgcaggaacgtgccgaaaccggcgccaagggacgcaactggctgttcttcggcgcgcagcatttcaacaccgacttcctgtatcaggccgaatggcagcaggcgctgcagcgcggcgagctgcatgcactggaactggcgttctcgcgcgacgcggcagagaagatgtacgtgcaacaccgcctgcgcgcccgcggcgccgaggtctatgcctggctgcaaggcggcgcgcacgtgtatgtgtgcggcgcgatcggcatgggcaaggacgtgcacgccgcgctgctggacatcgtcgccacccacggcgcactcgatgccgaagcggccgcggcgtatctcacccgcctgcaggtggagggacgctatgcgcgcgatgtctactag

SEQ ID NO: 1015 - protein, 615 aa, Xanthomonas campestris pv. campestris
MTAASPAVPPSPLPDERKALLERLVDGLDAPSLWWLSGYTAGLAQGHPPRSLAVLPGGQVHAVAHESQRLTVLYGSQTGNARRQAEQLAAEAEAAGVSVRLLRADAYPTRELASERLLYVVISTQGEGDPPDDAIGLVEFLSGRRAPKLPELKYAVLGLGDSSYADFCGIARRIDERLAELGGSRVQPRGEADLDIDSVATPWRTHALRHAREQLKSAQPSATVTPLRSQPAAPVWSQQHPFAAELLANQIISGRDFKGPGFRVYGPAIKRVRHLEFSLDGSGLSYEPGDALGIRHRNPPALVDAVLESLRLDGHASVTIGEDTLALNEWLATRRELTKLSRPFLAAHAERAHADDLQALLTQTQTAGLASLLSDHQLIDVLRRWPADWDHGGLLAALRPLTPRLYSIASSRKRVGEEVHLVVDELHYQAHGHGHVGSASGFLAALAEGDTAPVYIEPNERFRVPADPDRDILMIGPGTGVAPFRAFVQERAETGAKGRNWLFFGAQHFNTDFLYQAEWQQALQRGELHALELAFSRDAAEKMYVQHRLRARGAEVYAWLQGGAHVYVCGAIGMGKDVHAALLDIVATHGALDAEAAAAYLTRLQVEGRYARDVY

SEQ ID NO: 1016 - DNA, 1881 bp, Staphylococcus aureus subsp. aureus MRSA252
  CDS (1)..(1881): transl_table=11
ttgaaattaaatacatctaatagtccatttacagaaaaacaagtcacagagattaacaatctgctgcaaacattaacagagagccaacaacagtggcttagtggttttttactagctaatagtaacgatacgacaagtgatagtaatcaacaacaattagagacagaagtgtggcaacaatcacaaatatcagaagaacaagaaacttcaacaacgtatatgttacaaaataaagagccacatatcgaagctaatcagcggcatgtcacagtgctatatggttctgaatcaggtaatgccatgcgtttagctgaaattttttcagaacgattaagtgatattggacatcaagttgttttgatgtcaatggatgaatatgatacgacaaacatcgcacagttagaagatttatttattattacgtctactcatggtgaaggagaaccgcctgataatgcatgggatttctttgaatttttagaagacgataacgcacctaatttaaatcatgtgagatattcagtactagctttaggtgatcaaacatatgaatttttctgtcaagccggtaaagatgtagatgctttactagaaaatctaggcgctgagcgtatatgtaagcgtgtagattgtgatattgattatgaagaagacgcagaaaagtggatggcagacatcattaatattattgataccacatcagaaggtattcaaagtgaatcggtgataagtgaatcaattaagtctgccaaagaaaagaaatattctaaatcaaatccataccaagcagaagtattagcgaatatcaatttaaatggtaccgattcaaataaagaaacacgacatatagaatttttacttgatgattttagtgaatcatatgaaccaggagattgtatagtagcattaccgcaaaacgaccctgaattggttgaaaaactaatatccatgttaggttgggatccgcaatctccggtgccaattaatgatcatggtgatacagttcctattgctgaagcactaacatcacattttgaatttactaaattaacattgccattattgaaaaatgcagatatctattttgacaatgaagaattatctgaacgtattcaagatgagtcatgggcgcatgaatatgttataaatcgggactttatagatttaataacagattttccaactatagaattacaacctgagaatatgtatcaaatccttagaaaattaccaccaagagagtattcgatttctagtagttttatggcaacgccagatgaagtgcatattaccgttggtacggttcgttatcaagcacatggacgtgagagaaaaggtgtatgctcggttcattttgctgagcgtattaaaccaggcgatatagtaccaatttatttgaagaaaaatccgaacttcaaatttccgatgaagcaagatataccggtaattatgattggtccaggtactggtattgctccttttagagcatatttacaagaacgtgaagaacttggtatgactggaaaaacatggttgttctttggtgatcaacaccgtagttctgactttttatatgaagaagaaatagaagaatggcttgaaaatggaaacttaacacgcgtagatttagcattttcaagagaccaagaacacaaagaatatgtacagcatcgtataatggaagaaagtgaacgtttcaatgaatggattgagcagggcgcagcaatctatatttgtggcgatgaaaaatgtatggcgaaagatgtccatcaagccattaaatatgtattggtaaaagaacgtcatatttctcaagaagaagctgagacgatattgcgtcaaatgaaacagcgacaacgttatcaacgcgatgtttattaa

SEQ ID NO: 1017 - protein, 626 aa, Staphylococcus aureus subsp. aureus MRSA252
MKLNTSNSPFTEKQVTEINNLLQTLTESQQQWLSGFLLANSNDTTSDSNQQQLETEVWQQSQISEEQETSTTYMLQNKEPHIEANQRHVTVLYGSESGNAMRLAEIFSERLSDIGHQVVLMSMDEYDTTNIAQLEDLFIITSTHGEGEPPDNAWDFFEFLEDDNAPNLNHVRYSVLALGDQTYEFFCQAGKDVDALLENLGAERICKRVDCDIDYEEDAEKWMADIINIIDTTSEGIQSESVISESIKSAKEKKYSKSNPYQAEVLANINLNGTDSNKETRHIEFLLDDFSESYEPGDCIVALPQNDPELVEKLISMLGWDPQSPVPINDHGDTVPIAEALTSHFEFTKLTLPLLKNADIYFDNEELSERIQDESWAHEYVINRDFIDLITDFPTIELQPENMYQILRKLPPREYSISSSFMATPDEVHITVGTVRYQAHGRERKGVCSVHFAERIKPGDIVPIYLKKNPNFKFPMKQDIPVIMIGPGTGIAPFRAYLQEREELGMTGKTWLFFGDQHRSSDFLYEEEIEEWLENGNLTRVDLAFSRDQEHKEYVQHRIMEESERFNEWIEQGAAIYICGDEKCMAKDVHQAIKYVLVKERHISQEEAETILRQMKQRQRYQRDVY

SEQ ID NO: 1018 - DNA, 1881 bp, Staphylococcus aureus subsp. aureus MSSA476
  CDS (1)..(1881): transl_table=11
ttgaaattaaatacatctaatagtccatttacagaaaaacaagtcacagagattaacaatctgctgcaaacattaacagagagccaacaacagtggcttagtggttttttactagctaatagtaacgatacgacaagtgatagtaatcaacaacaattagagacagaagtgtggcaacaatcacaaatatcagaagaacaagcaacttcaacaacgtatatgttacaaaataaagagccacatatcgaagctaatcagcggcatgttacagtgctatatggttctgaatcaggtaatgccatgcgtttagctgaaattttttcagaacgtttaagtgatatcggacatcaagttgttttgatgtcaatggatgaatatgatacgacaaacatcgcgcagttagaagatttatttattattacgtctactcatggtgaaggagaaccgcctgataatgcatgggatttctttgaatttttagaagacgataacgcacctaatttaaatcatgtgagatattcagtactagctttaggtgatcaaacatatgaatttttctgtcaagctggtaaagatgtagatgctttactagaaaatctaggcgctgagcgtatatgtaagcgtgtagattgtgatattgattatgaagaagacgcagaaaagtggatggcagacatcattaatatgattgatactacatcagaaggtattcaaagtgaatcggtgataagtgaatcaattaagtctgccaaagaaaagaaatattctaaattaaatccataccaagcagaagttttagcgaatatcaatttaaatggtaccgattcaaataaagaaacacgacatatagaatttttacttgatgattttagtgaatcatatgaaccaggagattgtatagtagcattaccgcaaaacgaccctgaattggttgaaaaactaatatccatgttaggttgggatccgcaatctccggtgccaattaatgatcatggtgatacagttcctattgttgaagcactaacatcacattttgaatttactaaattaacattgccattattgaaaaatgcagatatctattttgacaatgaagaattatctgaacgtattcaagatgagtcatgggcgcgtgaatatgttataaatcgggactttatagatttaataacagattttccaactatagaattacaacctgagaatatgtatcaaatccttagaaaattaccaccaagagagtattcgatttctagtagttttatggcaacgccagatgaagtgcatattaccgttggtacggttcgttatcaagcacatggacgtgagagaaaaggtgtatgctcggttcattttgctgagcgaattaaaccaggcgatatagtaccaatttatttgaagaaaaatccgaacttcaaatttccgatgaagcaagatataccggttattatgattggaccaggtactggaattgctccttttagagcatatttacaagaacgtgaagaacttggtatgactgggaaaacatggttgttctttggcgatcaacaccgtagttctgactttttatatgaagaagaaatagaagaatggcttgaaaatggaaacttaacacgcgtagatttagcattttcaagagaccaagaacacaaagaatatgtacagcatcgtataatggaagaaagtgaacgtttcaatgaatggattgagcaaggcgcagcaatctatatttgtggtgatgaaaaatgtatggcgaaagatgtccatcaagccattaaagatgtattggtaaaagaacgtcatatttctcaagaagaagcggagacgatattgcgtcaaatgaaacagcaacaacgctatcaacgtgatgtttattag

SEQ ID NO: 1019 - protein, 626 aa, Staphylococcus aureus subsp. aureus MSSA476
MKLNTSNSPFTEKQVTEINNLLQTLTESQQQWLSGFLLANSNDTTSDSNQQQLETEVWQQSQISEEQATSTTYMLQNKEPHIEANQRHVTVLYGSESGNAMRLAEIFSERLSDIGHQVVLMSMDEYDTTNIAQLEDLFIITSTHGEGEPPDNAWDFFEFLEDDNAPNLNHVRYSVLALGDQTYEFFCQAGKDVDALLENLGAERICKRVDCDIDYEEDAEKWMADIINMIDTTSEGIQSESVISESIKSAKEKKYSKLNPYQAEVLANINLNGTDSNKETRHIEFLLDDFSESYEPGDCIVALPQNDPELVEKLISMLGWDPQSPVPINDHGDTVPIVEALTSHFEFTKLTLPLLKNADIYFDNEELSERIQDESWAREYVINRDFIDLITDFPTIELQPENMYQILRKLPPREYSISSSFMATPDEVHITVGTVRYQAHGRERKGVCSVHFAERIKPGDIVPIYLKKNPNFKFPMKQDIPVIMIGPGTGIAPFRAYLQEREELGMTGKTWLFFGDQHRSSDFLYEEEIEEWLENGNLTRVDLAFSRDQEHKEYVQHRIMEESERFNEWIEQGAAIYICGDEKCMAKDVHQAIKDVLVKERHISQEEAETILRQMKQQQRYQRDVY

SEQ ID NO: 1020 - DNA, 1830 bp, Bacillus licheniformis ATCC 14580
  CDS (1)..(1830): transl_table=11
ttgcaacttcaggtaatgaacagtccttttaatcaggagcaggcagagctcctcaaccgtcttctgccaactttgacggcatcacaaaaagcctggctgagcggttatctggcagctgtgcaaaccgccgatgccgcggcggctcttgaaacattgccggcggaagctcctgctgcaagcccggctcagcctgtttccaaagaagtgaccattttattcggatcgcagacaggaaatgcacagggacttgccgaaaacgcggctaagacgcttacagaacggggatttcaagtcaccgtctcttcaatgagcgattttaagccgaaccaattgaagaaactaaaaaaccttctcatcgtcgtcagcacgcacggtgaaggggatccgccggacaacgcgctgtcattccatgagtttctccatggaagacgggctccgaagctcgatgatctccgttattctgtgctggctcttggcgacacgtcgtatgaatttttctgccagaccggaaaagagttcgaccagcggcttggtgagcttggaggcacaaggctccatccgcgcgtcgactgcgatctcgattatgatgagccggctgcagcatggcttgacggtgtcatctcaagcttaaacgaaggacaggaacagggcgcaagcgccgcacctgctcaaacggcagctccgcaagccgcgggaggagtaacagtatattcgagaaaaaatccgttcagagcggaagtgctggaaaatttgaatttaaacggccgcggatcaaataaagaaacgcgccatcttgaattatcgcttgaaggctcaggtttgacttatgaacctggcgacgcgctcggcatctttccggaaaatgaccctgaactcgtcgatatgctgctgaaagagctgaaatgggatccgaatgctgccgttgctgttgatcaaggggaaaacctttctttgaaagaagcgttgacttcttactatgaaattacggtgctgacaaagaaattcattcagcaggcggcagaaatcattgaaaatgaaaagctgcgcgagcttgccgctccggaaaatgcggatcaattaaaagcgtatatcgctggccgcgacctgattgattttgtgcgggatttcggtccgatcgcagcagctccgcaggaatttgtatcgattcttcgaaaaatcccgcctcggctttattcgatcgcatcgagcttcgctgcaaatccggatgaagtgcatttgacgatcggtgctgtccgctacaatgcgcacggcagagaccgaaaaggggtctgctcggtattatgtgccgaacgtctgcagcctggcgacaccctgcctgttttcattcagccgaataaaaactttaagctgccggagaatccggagactccgattatcatggtcggccccggcacaggcgttgcgccgtttaggtcatttatgcaggagcgcgaagaaaccggagcatcggggaaatcgtggatgttcttcggcgatcagcattttgtcactgatttcttatatcagacagaatggcaaaagtggctgagtgaaggcgtgctgacaaaaatggatgtcgcgttctcgcgggatacggaagaaaaagtatatgtacagcatcgcatgctggagcacagcaaagaattgtttgagtggcttgaagagggagcggctttctacgtttgcggcgacaagaacaacatggccaaagatgttcaaaacgcattgcttgaaattatcgaaaaagaaggcggcaaaagccgtgaggaagctgaagcctacctcgcagaaatgaaaaagcaaaaacgttatcagcgcgatgtatactga

SEQ ID NO: 1021 - protein, 609 aa, Bacillus licheniformis ATCC 14580
MQLQVMNSPFNQEQAELLNRLLPTLTASQKAWLSGYLAAVQTADAAAALETLPAEAPAASPAQPVSKEVTILFGSQTGNAQGLAENAAKTLTERGFQVTVSSMSDFKPNQLKKLKNLLIVVSTHGEGDPPDNALSFHEFLHGRRAPKLDDLRYSVLALGDTSYEFFCQTGKEFDQRLGELGGTRLHPRVDCDLDYDEPAAAWLDGVISSLNEGQEQGASAAPAQTAAPQAAGGVTVYSRKNPFRAEVLENLNLNGRGSNKETRHLELSLEGSGLTYEPGDALGIFPENDPELVDMLLKELKWDPNAAVAVDQGENLSLKEALTSYYEITVLTKKFIQQAAEIIENEKLRELAAPENADQLKAYIAGRDLIDFVRDFGPIAAAPQEFVSILRKIPPRLYSIASSFAANPDEVHLTIGAVRYNAHGRDRKGVCSVLCAERLQPGDTLPVFIQPNKNFKLPENPETPIIMVGPGTGVAPFRSFMQEREETGASGKSWMFFGDQHFVTDFLYQTEWQKWLSEGVLTKMDVAFSRDTEEKVYVQHRMLEHSKELFEWLEEGAAFYVCGDKNNMAKDVQNALLEIIEKEGGKSREEAEAYLAEMKKQKRYQRDVY

SEQ ID NO: 1022 - DNA, 1827 bp, Bacillus clausii KSM-K16
  CDS (1)..(1827): transl_table=11
gtgcagctccagacgacaaacagcccattcagccaagaacaaatagagcttttaaataagttgctgccaacgctaaccgctacgcagaaaagctggataagcggttatttggcagcaacagcaaacacggttcttagtgaagcagcgacaacggtaccagctgaacttaacgcaccgagcgaagctgcccaggaaaacaaagaagtgactgtgttatacggttcacaaacaggaaatagccaacagcttgctgaagaaattagccgcaaactggaagacaaagcgtatcatgtgacattggcatcgatgcatacatacaagccaaaaaacataaaagacgttacgaatttacttcttattgttagtacgcatggtgaaggcgaaccgccagataacgctattgctttccacgaatttctgcttgggcgcaaggcgccgaaattggcggatttgcatttttcagtgctcgctttaggggactcatcttatgaatttttctgtcaaacaggcaaagagttggaccaacgcttagaggagcttggaggaacgcgcttgtatcctcgtgttgattgtgacattgattttgacgaggatgcagctgaatggatggcaggtgttgttgctggccttgaaaaagcaacgggtaaatcgtcgtctgcgagttccacagctctgctatcaccagatgccacggctactgcttatagccgtacaaatccttatcaagcagaaatacttgaaaatatcaatttaaatggccgtggttcaaacaaggagacgcgccacttggagctttctcttgaagggtcgggatttacatttgagcctggcgactcggttggtatttttccggaaaatgacagtgaattggctgatcagttgattgccgaaatgggttggaacggtgatgaatcggtgccaattggcaagcaaggcgatgtgttgccattgcgggaggcgctaatccgtcattttgaaataacggttttaacaaagcctttgctcgaaaaagcgtcgctgctttccaaaaacaatgctttaaaggaattagtggcaactggcaatgaacagcagcttcgagcttacctagaaggacgggacattcttgatttggttagggatttcgctccatgggaaggaacagcaggagactttaccgctattctccgcaaaatcccgccacgtctgtattcgattgctagcagctaccgtgcaaatgaagacgaagtccatttaactgttggcgctgtccgctatgacgctcatgggcgtaaacgggcaggtgtttgctccgtacaatgcgctgagcgcaaagcgccaggggagacattgcccatttttattcagcgtaatccgaattttcgcttgcctgagaatgggagcacaccgattttaatggtcggtccaggaacaggagtagctccttttcgagcctttttggaagaacgggaagagacgggggcagaggggcccgcttggctattttttggagatcagcatttttcgactgactttctataccaaacggattggcagcgctggatgaaagaaggcgtattaacgaaaatggatgtcgctttctcccgtgaccaggacgaaaaagtctatgtgcagcacaaaatgttagaaaaagccgatgaagtgttccaatggctagaagatggcgctgttctttatatttgtggcgatgaaaaacaaatggcgaaagatgtccataaaacgctcgtttcgattatcgcccaacaaggcaaccgcagcgaagaagaagcagaagcctatctcagtcacttacagcaaaataaccgttaccagcgcgacgtgtattaa

SEQ ID NO: 1023 - protein, 608 aa, Bacillus clausii KSM-K16
MQLQTTNSPFSQEQIELLNKLLPTLTATQKSWISGYLAATANTVLSEAATTVPAELNAPSEAAQENKEVTVLYGSQTGNSQQLAEEISRKLEDKAYHVTLASMHTYKPKNIKDVTNLLLIVSTHGEGEPPDNAIAFHEFLLGRKAPKLADLHFSVLALGDSSYEFFCQTGKELDQRLEELGGTRLYPRVDCDIDFDEDAAEWMAGVVAGLEKATGKSSSASSTALLSPDATATAYSRTNPYQAEILENINLNGRGSNKETRHLELSLEGSGFTFEPGDSVGIFPENDSELADQLIAEMGWNGDESVPIGKQGDVLPLREALIRHFEITVLTKPLLEKASLLSKNNALKELVATGNEQQLRAYLEGRDILDLVRDFAPWEGTAGDFTAILRKIPPRLYSIASSYRANEDEVHLTVGAVRYDAHGRKRAGVCSVQCAERKAPGETLPIFIQRNPNFRLPENGSTPILMVGPGTGVAPFRAFLEEREETGAEGPAWLFFGDQHFSTDFLYQTDWQRWMKEGVLTKMDVAFSRDQDEKVYVQHKMLEKADEVFQWLEDGAVLYICGDEKQMAKDVHKTLVSIIAQQGNRSEEEAEAYLSHLQQNNRYQRDVY

SEQ ID NO: 1024 - DNA, 1881 bp, Staphylococcus aureus subsp. aureus COL
  CDS (1)..(1881): transl_table=11
ttgaaattaaatacatctaatagtccatttacagaaaaacaagtcacagagattaacaatctgctgcaaacattaacagagagccaacaacagtggcttagtggttttttactagctaatagtaacgatacgacaagtgatagtaatcaacaacaattagagacagaagtgtggcaacaatcacaaatatcagaagaacaagcaacttcaacaacgtatatgttacaaaataaagagccacatatcgaagctaatcagcggcatgttacagtgctatatggttctgaatcaggtaatgccatgcgtttagctgaaattttttcagaacgtttaagtgatatcggacatcaagttgttttgatgtcaatggatgaatatgatacgacaaacatcgcgcagttagaagatttatttattattacgtctactcatggtgaaggagaaccgcctgataatgcatgggatttctttgaatttttagaagacgataacgcacctaatttaaatcatgtgagatattcagtactagctttaggtgatcaaacatatgaatttttctgtcaagccggtaaagatgtagatgttttactagaaaatctaggcgctgagcgtatatgtaagcgtgtagattgtgatattgattatgaagaagacgcagaaaagtggatggcagacatcattaatattattgataccacatcagaaggtattcaaagtgaatcggtgataagtgaatcaattaagtctgccaaagaaaagaaatattctaaatcaaatccataccaagcagaagtattagcgaatatcaatttaaatggtaccgattcaaataaagaaacacgacatatagaatttttacttgatgattttagtgaatcatatgaaccaggagattgtatagtagcattaccgcaaaacgaccctgaattggttgaaaaactaatattcatgttaggttgggatccgcaatctccggtgccaattaatgatcatggtgatacagttcctattgttgaagcactaacatcacattttgaatttactaaattaacattgccattattgaaaaatgcagatatctattttgacaatgaagaattatctgaacgtattcaagatgagtcatgggcgcgtgaatatgttataaatcgggactttatagatttaataacagattttccaactatagaattacaacctgagaatatgtatcaaatccttagaaaattaccaccaagagagtattcgatttctagtagttttatggcaacgccagatgaagtgcatattaccgttggtacggttcgttatcaagcacatggacgtgagagaaaaggtgtatgctcggttcattttgctgagcgaattaaaccaggcgatatagtaccaatttatttgaagaaaaatccgaacttcaaatttccgatgaagcaagatataccggttattatgattggaccaggtactggaattgctccttttagagcatatttacaagaacgtgaagaacttggtatgactggaaaaacatggttgttctttggtgatcaacaccgtagttctgactttttatatgaagaagaaatagaagaatggcttgaaaatggaaacttaacacgcgtagatttagcattttcaagagaccaagaacacaaagaatatgtacagcatcgtataatggaagaaagtaaacgtttcaatgaatggattgagcaaggcgcagcaatctatatttgtggcgatgaaaaatgtatggcgaaagatgtccatcaagccattaaagatgtattggtaaaagaacgtcatatttctcaagaagaagcagagttattattgcgacaaatgaaacaacaacaacgctatcaacgtgatgtttattag

SEQ ID NO: 1025 - protein, 626 aa, Staphylococcus aureus subsp. aureus COL
MKLNTSNSPFTEKQVTEINNLLQTLTESQQQWLSGFLLANSNDTTSDSNQQQLETEVWQQSQISEEQATSTTYMLQNKEPHIEANQRHVTVLYGSESGNAMRLAEIFSERLSDIGHQVVLMSMDEYDTTNIAQLEDLFIITSTHGEGEPPDNAWDFFEFLEDDNAPNLNHVRYSVLALGDQTYEFFCQAGKDVDVLLENLGAERICKRVDCDIDYEEDAEKWMADIINIIDTTSEGIQSESVISESIKSAKEKKYSKSNPYQAEVLANINLNGTDSNKETRHIEFLLDDFSESYEPGDCIVALPQNDPELVEKLIFMLGWDPQSPVPINDHGDTVPIVEALTSHFEFTKLTLPLLKNADIYFDNEELSERIQDESWAREYVINRDFIDLITDFPTIELQPENMYQILRKLPPREYSISSSFMATPDEVHITVGTVRYQAHGRERKGVCSVHFAERIKPGDIVPIYLKKNPNFKFPMKQDIPVIMIGPGTGIAPFRAYLQEREELGMTGKTWLFFGDQHRSSDFLYEEEIEEWLENGNLTRVDLAFSRDQEHKEYVQHRIMEESKRFNEWIEQGAAIYICGDEKCMAKDVHQAIKDVLVKERHISQEEAELLLRQMKQQQRYQRDVY

SEQ ID NO: 1026 - DNA, 1845 bp, Staphylococcus epidermidis RP62A
  CDS (1)..(1845): transl_table=11
ttgaacttaagtgttaccaatagtccttttacggaagggcaagctaaacaaatcaatgaattgcttcacactttatcacctaaccaacaagtatggttaagtggctatctgatggcaaatcaacaatcaaatacatctacagattctgtagaacaacataacttagatgacaatacagaagcgatgctacatgaaaaggaaccttcagttgagccggaagctagatcgataacgattttatatggatctgagtctggtaatgcgcagggacttgcagaaatatttgaacaacgtttatctgatattggaaatgacgttacgctcaaatcaatggatgactttaaacctaagaatttgaagaaagtagaagatttatttattatcacatctacacatggcgaaggagatccaccagataacgctgttgaattacatgaatacatccacggacgtaaagcgccaaaattggatggggtgagattttcagtattagcattaggagatcaaacctatgaattcttctgtcaaactggtaaagattttgataaccgtttggctgaattaggggcagaaagactttatcatcgtactgattgcgatgttgattatgaagaagacgctgaaaagtggatggccaatgttattaatacgattgattcaacaccagctggtactgaaagtgaacaagttgttagcgaatctataaaatcagcaaaagaaaagaaatatagtaagtctaatccttacgatgctgaagtattgaccaatattaatttgaatggtagaggttcagacaaagagacgagacatattgagttattacttgataattttggtgaggaatatgaaccgggagattgcgtagttgtcttgcctcaaaatgatccagctatcgtagacttacttattagcacattaggttggagtccagaaacacaagttttaattaacgaggatggagatactttaaatcttgaagaggcattaacatcgcattttgaaattactaaattaacaaaaccgttaatagaaaatgctgcgatattttttgataatgaagagctttctgaaaaaattcaagataaagaatggattcaaaactacgttgagggaagggatttgattgacttattaaatgacttcgcaacgacagaactacaacctgaaaatttacatcaattattaagaaagttaccacctagagagtactcaatatctagtagttataaagcaacaccagatgaagttcacattactgttggagcagttagatatcaagcacacggtcgggaacgttcaggtgtttgttcagtacaatttgcagagagaatacaagagggcgatacaattcctatctatttaaaacgaaatccgaattttaagtttccgcaagatgaatcaacacctgtgattatgataggtcctgggacaggtgttgcaccgtttagatcctatatgcaagaacgagaggagctaggttttgaaggaaatacatggttattctttggagatcaacacttcactacagattttctgtatcaaacggaatggcaagaatggcttgaagatggaactttatcaaaattagatgttgctttttctagagatactgataaaaaagtgtatgtgcaacataaaattgcagaaaatagtgaacaatttaatcgatggattgaaaatggcgctattatttatgtatgtggtgatgaaagtaaaatggcaaaggatgttcatcaagcgattaaaaatgtgttaatcaaagagcaaaacctatctgaaacagatgcagaagaatacttaaaacaaatgaaaagagataaaagatatcaaagagacgtgtattaa

SEQ ID NO: 1027 - protein, 614 aa, Staphylococcus epidermidis RP62A
MNLSVTNSPFTEGQAKQINELLHTLSPNQQVWLSGYLMANQQSNTSTDSVEQHNLDDNTEAMLHEKEPSVEPEARSITILYGSESGNAQGLAEIFEQRLSDIGNDVTLKSMDDFKPKNLKKVEDLFIITSTHGEGDPPDNAVELHEYIHGRKAPKLDGVRFSVLALGDQTYEFFCQTGKDFDNRLAELGAERLYHRTDCDVDYEEDAEKWMANVINTIDSTPAGTESEQVVSESIKSAKEKKYSKSNPYDAEVLTNINLNGRGSDKETRHIELLLDNFGEEYEPGDCVVVLPQNDPAIVDLLISTLGWSPETQVLINEDGDTLNLEEALTSHFEITKLTKPLIENAAIFFDNEELSEKIQDKEWIQNYVEGRDLIDLLNDFATTELQPENLHQLLRKLPPREYSISSSYKATPDEVHITVGAVRYQAHGRERSGVCSVQFAERIQEGDTIPIYLKRNPNFKFPQDESTPVIMIGPGTGVAPFRSYMQEREELGFEGNTWLFFGDQHFTTDFLYQTEWQEWLEDGTLSKLDVAFSRDTDKKVYVQHKIAENSEQFNRWIENGAIIYVCGDESKMAKDVHQAIKNVLIKEQNLSETDAEEYLKQMKRDKRYQRDVY

SEQ ID NO: 1028 - DNA, 1839 bp, Colwellia psychrerythraea 34H
  CDS (1)..(1839): transl_table=11
atgttgccagagcagcgcttattaaatcaaaatacatcaaattcagcaaacaatagtagtgccttagatgcaaatcaattagcttcactacaacaaaccgttgctgattattcatcactacaacttgcttgggcaagcggttatctagcagcgaaaagcgaacaaggccataatgccctaatcgcaccggctgcgccagctattgctgccaagactttaactattttatatgcctcgcaaacaggtaatgctaaaggtgttgccagcaaacttgagaaaagcgcaaaagcagcaggcattaatgttgtacttaaaaacattgctgactataaagccaaaggcttaaaaaatgaaagtcacctgttaatagtagccagtactaatggtgaaggcgaagcaccagatgatgccattgagtttcatgaatatttattaggtaaaaaagcacctaaattacctaaccttagctatagcgttttagctttaggtgacagcagctatgaatttttctgtcaaacaggtaaagattttgacgagcgtttaaaagcattaggcgcaaaacaagtcacccctcgccttgactgtgatgttgattacgacagcgaatgtgaaagttggaccttaagtattgttgaatctttgaaagatgagcttacccaagcatcttcaggttctgcaaatgttgttgatttaccaacagcaggtgctgaaagtcagtattcaaagcaaaacccgtttgaagctgaattttctttaagtcaaaagattactggtcgagattctgctaaagatgttcgccatattgaaattgacttaggtgaatcaggtttaacttaccaagtaggtgatgccttaggtgtttggtttgaaaacgacgctgatttagtggctgatttaattgctaccttaagccttactggcgaagaaaaaatcaagttaaaagtaaatggcgcaaatcaggttttcacactaacagatgccttaactacccagttagaaattacacaaacagcaccagcatttgttgagttttgggcaaaaatttctggtgataaagcactgactgaaatagctgctgataaaaacacagctagagaatacgctggtgagcaccaaattatcgatgtggtaaaagcagcaaaaactgaaattgatcctcaattctttgttgaagcacttcgtaaaataaccccacgcttgtattcaattgcatcagcacaagctgaagttgaagaagaagttcacttaaccgttggtttagtaagttttgatgcaaatggcgaaccacgcactggtggcgcttcaagcttcttagcaaaccgcttagaagaaggtcaaaaagtacgtgtttttgttgaacacaatgacaatttccgtttacctcaatcggatgatactcctgtcattatgattggaccaggtaccggtgttgcaccatttagagctttcatgcaagaacgtgaagcgcgtgatgccaacggcgataactggatgttgtttggagatcaaactttcactcaagacttcttatatcaagtggaatggcaaaattatttaaaatccggtttgttaacacgcatggacgtagcgttttctcgcgaccaagctgagaaagtttatgtgcaagaccgattaaaagaacaagcaagtgatgtttttgcttggttagaacgtggcgcacacctatatatttgtggtgatgctaaccgtatggccaaagatgttcatcaaaccttggtagaaattatccaagagcacggtaaattaagtgcagaacaagcagaagactatttaaaatcacttagatctaataagcgttaccagaaggatgtttactaa

SEQ ID NO: 1029 - protein, 612 aa, Colwellia psychrerythraea 34H
MLPEQRLLNQNTSNSANNSSALDANQLASLQQTVADYSSLQLAWASGYLAAKSEQGHNALIAPAAPAIAAKTLTILYASQTGNAKGVASKLEKSAKAAGINVVLKNIADYKAKGLKNESHLLIVASTNGEGEAPDDAIEFHEYLLGKKAPKLPNLSYSVLALGDSSYEFFCQTGKDFDERLKALGAKQVTPRLDCDVDYDSECESWTLSIVESLKDELTQASSGSANVVDLPTAGAESQYSKQNPFEAEFSLSQKITGRDSAKDVRHIEIDLGESGLTYQVGDALGVWFENDADLVADLIATLSLTGEEKIKLKVNGANQVFTLTDALTTQLEITQTAPAFVEFWAKISGDKALTEIAADKNTAREYAGEHQIIDVVKAAKTEIDPQFFVEALRKITPRLYSIASAQAEVEEEVHLTVGLVSFDANGEPRTGGASSFLANRLEEGQKVRVFVEHNDNFRLPQSDDTPVIMIGPGTGVAPFRAFMQEREARDANGDNWMLFGDQTFTQDFLYQVEWQNYLKSGLLTRMDVAFSRDQAEKVYVQDRLKEQASDVFAWLERGAHLYICGDANRMAKDVHQTLVEIIQEHGKLSAEQAEDYLKSLRSNKRYQKDVY

SEQ ID NO: 1030 - DNA, 1881 bp, Staphylococcus aureus subsp. aureus NCTC 8325
  CDS (1)..(1881): transl_table=11
ttgaaattaaatacatctaatagtccatttacagaaaaacaagtcacagagattaacaatctgctgcaaacattaacagagagccaacaacagtggcttagtggttttttactagctaatagtaacgatacgacaagtgatagtaatcaacaacaattagagacagaagtgtggcaacaatcacaaatatcagaagaacaagcaacttcaacaacgtatatgttacaaaataaagagccacatatcgaagctaatcagcggcatgttacagtgctatatggttctgaatcaggtaatgccatgcgtttagctgaaattttttcagaacgtttaagtgatatcggacatcaagttgttttgatgtcaatggatgaatatgatacgacaaacatcgcgcagttagaagatttatttattattacgtctactcatggtgaaggagaaccgcctgataatgcatgggatttctttgaatttttagaagacgataacgcacctaatttaaatcatgtgagatattcagtactagctttaggtgatcaaacatatgaatttttctgtcaagccggtaaagatgtagatgttttactagaaaatctaggcgctgagcgtatatgtaagcgtgtagattgtgatattgattatgaagaagacgcagaaaagtggatggcagacatcattaatattattgataccacatcagaaggtattcaaagtgaatcggtgataagtgaatcaattaagtctgccaaagaaaagaaatattctaaatcaaatccataccaagcagaagtattagcgaatatcaatttaaatggtaccgattcaaataaagaaacacgacatatagaatttttacttgatgattttagtgaatcatatgaaccaggagattgtatagtagcattaccgcaaaacgaccctgaattggttgaaaaactaatatccatgttaggttgggatccgcaatctccggtgccaattaatgatcatggtgatacagttcctattgttgaagcactaacatcacattttgaatttactaaattaacattgccattattgaaaaatgcagatatctattttgacaatgaagaattatctgaacgtattcaagatgagtcatgggcgcgtgaatatgttataaatcgggactttatagatttaataacagattttccaactatagaattacaacctgagaatatgtatcaaatccttagaaaattaccaccaagagagtattcgatttctagtagttttatggcaacgccagatgaagtgcatattaccgttggtacggttcgttatcaagcacatggacgtgagagaaaaggtgtatgctcggttcattttgctgagcgaattaaaccaggcgatatagtaccaatttatttgaagaaaaatccgaacttcaaatttccgatgaagcaagatataccggttattatgattggaccaggtactggaattgctccttttagagcatatttacaagaacgtgaagaacttggtatgactggaaaaacatggttgttctttggtgatcaacaccgtagttctgactttttatatgaagaagaaatagaagaatggcttgaaaatggaaacttaacacgcgtagatttagcattttcaagagaccaagaacacaaagaatatgtacagcatcgtataatggaagaaagtaaacgtttcaatgaatggattgagcaaggcgcagcaatctatatttgtggcgatgaaaaatgtatggcgaaagatgtccatcaagccattaaagatgtattggtaaaagaacgtcatatttctcaagaagaagcagagttattattgcgacaaatgaaacaacaacaacgctatcaacgtgatgtttattag

SEQ ID NO: 1031 - protein, 626 aa, Staphylococcus aureus subsp. aureus NCTC 8325
MKLNTSNSPFTEKQVTEINNLLQTLTESQQQWLSGFLLANSNDTTSDSNQQQLETEVWQQSQISEEQATSTTYMLQNKEPHIEANQRHVTVLYGSESGNAMRLAEIFSERLSDIGHQVVLMSMDEYDTTNIAQLEDLFIITSTHGEGEPPDNAWDFFEFLEDDNAPNLNHVRYSVLALGDQTYEFFCQAGKDVDVLLENLGAERICKRVDCDIDYEEDAEKWMADIINIIDTTSEGIQSESVISESIKSAKEKKYSKSNPYQAEVLANINLNGTDSNKETRHIEFLLDDFSESYEPGDCIVALPQNDPELVEKLISMLGWDPQSPVPINDHGDTVPIVEALTSHFEFTKLTLPLLKNADIYFDNEELSERIQDESWAREYVINRDFIDLITDFPTIELQPENMYQILRKLPPREYSISSSFMATPDEVHITVGTVRYQAHGRERKGVCSVHFAERIKPGDIVPIYLKKNPNFKFPMKQDIPVIMIGPGTGIAPFRAYLQEREELGMTGKTWLFFGDQHRSSDFLYEEEIEEWLENGNLTRVDLAFSRDQEHKEYVQHRIMEESKRFNEWIEQGAAIYICGDEKCMAKDVHQAIKDVLVKERHISQEEAELLLRQMKQQQRYQRDVY

SEQ ID NO: 1032 - DNA, 1827 bp, Myxococcus xanthus DK 1622
  CDS (1)..(1827): transl_table=11
atgagcgcatcccctgccacccatgctcccccgttcatcaacgctctgctgggtgagaacaagagtgccctgctgctcaagctcgtggaggagatggacgcctccgccctgcactggctgagcggctacacggcgggactggccgtccgcgccccccagaccaccgttgtccccgtgacgcccgtacccgtggccgcccccgccggtcacttcaccatcatctacgggacgcagacgggtaacagccgcctcctggccgagcgcctcaagcaccaggtggagtccgccgggctcgccacgcggctgttccgggccagcgactatccggtgcgggagctggccaaggagaagctgctctgcgtggtcatcagcacccagggagatggcgacccgccggacgacgcacgcggtttcagtgagttcatcctcggcaagcgcgcgcctcgcatggaggggctgcgctacgccgtgctggggctgggagactccagctacccgcgcttctgcgaggtgggccggcggctcgacgcccgcttcgcggagttgggcgccagccggctgttggagcgtgccgattgcgatgtggacttcgagcccgtggccaagggttggctcgaccaggcctacaccctggcgcgcgaagcactgactccgcaggcgacggtgacggccacggtcgtgccgctgcgggagccgcacgccacgcccgcgttcaccaaggaagcgccctacacggcggaggtgctgctcaatcagcgcatcactgcacgcggcgcgctcaaggacgtgcggcacctggagctgtcgctcgcgggctccgggctggaatacgcccccggcgacgcgctgggcgtgtggccccacaatccgccggagctggtggcgtccttcctgtccgagctgcgcctcgacggagaagcggcggtcacccgagagggccgcacgctcccgctggcgcgctggctgagtgacgagttggaaatcaccaggctcaaccgccccttcctggagcgacaagccacgctgtccggcagcgcggcgctgcacgaagtgctcgaaccgggccgcaccgaggccttccgcgcactgctggcggggcatcaggtcatcgacgtactccgcgcccacaaggccacctgggacgccacggagctggtccagtccctgcgccggctgacgccccggttgtactcgattgcctccagccccaagcgcgtgggtgaagaggcgcacctcacggtggcggtggtggactacacggtgttcgacctgcggcacttcggcgcggcgtcgtaccacctggccacgcgcacggccggcaccgacacggtccgcatcttcatcgagccgaacgaacgcttccggctgccgcaggacggcgacaaggacgtgctgatgattggccctggcaccggcgtggcgcccttccgggccttcgtccaggagcgcgcggagaccggagcgaagggccgcaactggctcttcttcggtgagcaacacttccgcacccagttcctctaccagacggagtggcaggaggccctgaagaagcagacgctgcaccggctgtcactcgccttctcgcgggaccgcgctcagaaggtctacgtgcagcaccggctgcgtgagtccggacgtgacgtctacgaatggctcgaaggaggcgcccacctctacgtgtgcggcgacgcccagcgcatggccccggatgtccacgaggcactggtggacgtcgtctccacccacggcggcaagagccgcgaggacgcgcacgcctggctcgaatccctgcgcgagcagcggcgctacctgcgcgacgtctactga

SEQ ID NO: 1033 - protein, 608 aa, Myxococcus xanthus DK 1622
MSASPATHAPPFINALLGENKSALLLKLVEEMDASALHWLSGYTAGLAVRAPQTTVVPVTPVPVAAPAGHFTIIYGTQTGNSRLLAERLKHQVESAGLATRLFRASDYPVRELAKEKLLCVVISTQGDGDPPDDARGFSEFILGKRAPRMEGLRYAVLGLGDSSYPRFCEVGRRLDARFAELGASRLLERADCDVDFEPVAKGWLDQAYTLAREALTPQATVTATVVPLREPHATPAFTKEAPYTAEVLLNQRITARGALKDVRHLELSLAGSGLEYAPGDALGVWPHNPPELVASFLSELRLDGEAAVTREGRTLPLARWLSDELEITRLNRPFLERQATLSGSAALHEVLEPGRTEAFRALLAGHQVIDVLRAHKATWDATELVQSLRRLTPRLYSIASSPKRVGEEAHLTVAVVDYTVFDLRHFGAASYHLATRTAGTDTVRIFIEPNERFRLPQDGDKDVLMIGPGTGVAPFRAFVQERAETGAKGRNWLFFGEQHFRTQFLYQTEWQEALKKQTLHRLSLAFSRDRAQKVYVQHRLRESGRDVYEWLEGGAHLYVCGDAQRMAPDVHEALVDVVSTHGGKSREDAHAWLESLREQRRYLRDVY

SEQ ID NO: 1034 - DNA, 1770 bp, Rhodococcus sp. RHA1
  CDS (1)..(1770): transl_table=11
atgaagatgccctacatcccccaggacgccccgttcagcgaggaccagcgcgtgtggctcaccggcttcctcgccggcatgagctcgcgcctcgtcgtcggcggctccgacgcgcccgccgcggcggccggtgggcagttgcccgccatgcacgtgctgtacggcagccagaccgggaacgcggagggtgtcgcggaagacgctgcggccgcggcccgttcgcagggcttcgcgccggtcgtgagcgcgctcgacgacgtcgacacggacgccctcgccgccatgcaacgcgtcctggtcgtcacctccacctacggtgagggtgagatgcccgacaacgccgaactgttctggcaggcgctggccgcggagaccgcgccgcgactggagaacaccgacttcgccgtcctcgcgctcggcgacaccggctacgacgggtactgccaggccggcaagatgatcgacaccaggctcgagcagctcggtgcccgccgcgtcactccgcgcgtcgactgcgacgtcgactacgaggacactgccgccgcgtgggtcgccgacaccctccccctgttcgcggccgtcgagggcattcgcggcgagtcccccgtcgccgatgtcgccgagcccgagacgaagccggcccggaagcggtcgcagtggaaccgcaagaacccttacgcgtccacgctctccgtgaaccggcggctgtcgagcgagacgtccgcgaaggagatccggcactacgagttcgcgctcgccgacagcggtctcgagtacgaggccggtgacgcgctcggtgtgatgccgatcaacgatcccgcgctcgtcgacgctctggtgtcccggctgggcatcccggcggacgccgccgtcaccgggaaggagcggccgttcagcgacctcctgctgcacgggtacgagatctccacgccgagccacgaattcatcgacgagatcgagaagcgggcgggcgacgaagaactgagccacgtgctgcggcacggcgacaaggaagccctcgacgcctggttgtggggcaaggacgtgctcgacctgctgctcctcgaaccgtcggtgaccctgaccgcggacgagttcgtcgggttgctgaagccgttgcagcacagggcgtattccatctcgtccagcccgctcgccaaccccggcagcgtgcacctgaccgtcgccagcgtccgccacagctcggccggacgcgaccgcggcggcgtgtgctccacgttcctcgccgatcggatcgccgagggcggcagcggtggaatcttcgtgtcgaagaacaagtcgttccgcgtccccgcgaacgacgacgcaccgatgatcatggtcggccccggcaccggcatcgcgccgttccgcgcgttcctgcaggaacggcaggcgcggggcgcgtcgggacgcaactggctgttcttcggcgaccagcaccgcgcgtcggactacatctacgaggacgagatcggcgcgatgagcgacagcggtctcctcacccgactcgacctcgccttctcccgcgaccaggcggagaagatctacgtgcagaaccggatggtcgagaacggcgcggagttgttcgcctggctcgaggacggcggccacttctacgtctgtggcgacgccacccggatggcgaaggacgtcgaccgggccctgcacgaggtcatcgccacccatggcaccctttccaccgagcaggccgccgactacgtgaccaagctcaagaaggaaaagcgctacctgcgcgacgtgtactga

SEQ ID NO: 1035 - protein, 589 aa, Rhodococcus sp. RHA1
MKMPYIPQDAPFSEDQRVWLTGFLAGMSSRLVVGGSDAPAAAAGGQLPAMHVLYGSQTGNAEGVAEDAAAAARSQGFAPVVSALDDVDTDALAAMQRVLVVTSTYGEGEMPDNAELFWQALAAETAPRLENTDFAVLALGDTGYDGYCQAGKMIDTRLEQLGARRVTPRVDCDVDYEDTAAAWVADTLPLFAAVEGIRGESPVADVAEPETKPARKRSQWNRKNPYASTLSVNRRLSSETSAKEIRHYEFALADSGLEYEAGDALGVMPINDPALVDALVSRLGIPADAAVTGKERPFSDLLLHGYEISTPSHEFIDEIEKRAGDEELSHVLRHGDKEALDAWLWGKDVLDLLLLEPSVTLTADEFVGLLKPLQHRAYSISSSPLANPGSVHLTVASVRHSSAGRDRGGVCSTFLADRIAEGGSGGIFVSKNKSFRVPANDDAPMIMVGPGTGIAPFRAFLQERQARGASGRNWLFFGDQHRASDYIYEDEIGAMSDSGLLTRLDLAFSRDQAEKIYVQNRMVENGAELFAWLEDGGHFYVCGDATRMAKDVDRALHEVIATHGTLSTEQAADYVTKLKKEKRYLRDVY

SEQ ID NO: 1036 - DNA, 1839 bp, Xylella fastidiosa Ann-1
  CDS (1)..(1839): transl_table=11
atgactgcccccacctattcccttaccgcaagccccctccccgaggaccgtcgctccctgctcatggatctcgtcaaggacctagacacaccgtccctatggtgggtatccggctatgtcgctggactggcacaaagccaactcacatccacattaacagccgtaccagaagaagattcagggacccaagccaaacaacgcctcaccgtgctctacggcagccagaccggcaacgcacagcgcattgctgaacaacttgccgccgaagccgaagccgcaggactggcaaggcgcctaattcgagccgatgactacacccctcgtgaactaactgcagaacggctgctgtacatcgtcatcagtactcagggagaaggtgatccaccagatgactccatcggctttgtggaatttctgaatgagcgacgcgcacccaaattacccgaactgaaatacgccgtccttggccttggagactccagttacgctgacttctgcggcatcgcccgccgtctggacgcacgattgcaagcactcggtgcacaacgactgcaaccattaggcgaagccgatgtggatatcaatacagtcgccacaccatggctgaaacaagcgctgcaccatgcccgcgagcaacttaaaaacgccaccgccccactgaccaatgtcacaccgttacgcggcaattcagctctccgtggatccaatcagacgttccaagctgaactgttcaaaaaccaactgatcagcggacgcgactttaaaggtccagcgttccgaacacatggccaggcctcgaaacgggtccaccacctagagctgtcgctggaaggcagcagattacactacgaaccaggcgacgcactgggcgtacatcaccgtaatcccaatacgcttgtagatactgtccttacgacacttaaactttcagctcacaccgaagtaacacaagataagcaaactttgccgctgtccgagtggctcgccacccgacgcgaagtgaccagattgtcgcggccattcttggctgcgcatgccgaacgatccggtgctgaggaactgcgcgcgctactcaccccaacccagactgccggactagcgacgctactcaacgatcatcaactgatcgacgtattgcgacgctggccggcggattgggaccataccgcactggttgcagcattacgccccctcacaccacggctgtattcgattgcttccagccgcaagcgtgtcggcgaggaagtccacatcacgattgatgaactgcactatcaagcacacggccacgaacacattggtgcagcaagcagctttctggctggtttgacagaagcagataccctccctgtctacatccaacccaatgagcgcttccgtttaccggcggatgcaacgcgcgacatcatcatgattggctctggaactggagtagcaccattccgcgctttcgtccaagaacgcgcagaaagtggcgcaaccgggcgtaactggttgttcttcggcgcacaacacttcaattgcgactttctgtatcagaccgaatggcaacaagccttacaacgcggtgaactgcacgcattggatcttgcattctcccgtgaccacgctgaaaaaatctacgtacagcaccgcttattagcacaggggcaagaggtgtacacctggctccaaaatggcgcatatctgtatgtctgcggcgcaatcagtatgagtaaagacgtccatacaacactgctacaaatcctcgtcacacatggcaacctcaccaaagaagccgccgcagagacgttgattggaatgcaacgcgaaggacgctatgcacgtgatgtgtattaa

SEQ ID NO: 1037 - protein, 612 aa, Xylella fastidiosa Ann-1
MTAPTYSLTASPLPEDRRSLLMDLVKDLDTPSLWWVSGYVAGLAQSQLTSTLTAVPEEDSGTQAKQRLTVLYGSQTGNAQRIAEQLAAEAEAAGLARRLIRADDYTPRELTAERLLYIVISTQGEGDPPDDSIGFVEFLNERRAPKLPELKYAVLGLGDSSYADFCGIARRLDARLQALGAQRLQPLGEADVDINTVATPWLKQALHHAREQLKNATAPLTNVTPLRGNSALRGSNQTFQAELFKNQLISGRDFKGPAFRTHGQASKRVHHLELSLEGSRLHYEPGDALGVHHRNPNTLVDTVLTTLKLSAHTEVTQDKQTLPLSEWLATRREVTRLSRPFLAAHAERSGAEELRALLTPTQTAGLATLLNDHQLIDVLRRWPADWDHTALVAALRPLTPRLYSIASSRKRVGEEVHITIDELHYQAHGHEHIGAASSFLAGLTEADTLPVYIQPNERFRLPADATRDIIMIGSGTGVAPFRAFVQERAESGATGRNWLFFGAQHFNCDFLYQTEWQQALQRGELHALDLAFSRDHAEKIYVQHRLLAQGQEVYTWLQNGAYLYVCGAISMSKDVHTTLLQILVTHGNLTKEAAAETLIGMQREGRYARDVY

SEQ ID NO: 1038 - DNA, 1815 bp, Pseudoalteromonas tunicata D2
  CDS (1)..(1815): transl_table=11
atgttgttaagtcaactttcagcggtaacaagtccactgacacaagagcaagtacaaaaactgcaaggtttagtcgctgagctaaacccaattcaacaagcatgggtaagtggctacttagcagcaactgcaaactcggcggctcttggtggtttggcgatacctgcaacaactcaggctgccgaagccgcaacacttacaattttatatggttcacaaacaggcaacgctaaaggtgttgcctcaaagcttaaagaacaagcacaagcccgtggtttagcggttaatcttgttaacatggccgattacaaaccaaatagcctcaaaaaagaaaagtttcttactatcgttgtttcaacgtatggcgagggtgagccaccagaagatgccgaaaacctgcatgagttcttaggctctaaaaaagcccctaaattagatggcgtaaaggttgcggtattaggtttgggtgattcaagttatgaatttttctgccaaacggctatcgactttgaaacacgcttacaaaatttaggtgcaacggctattgttagccgtgccgatttagatgttgattacgactctcttgcagccgattggatcaacaccgcacttgatgcatttgagcctgatttaaaagcacaatcgagcaattcagcacaagtcattccaatgacaacatttggtagtaccgcgacaactagccaatatacgaaacaaaatccgtttaacgctgaacttgcgctggtacaaaaaattacaggccgtgattcaacaaaagatgtgcgccatgttgagatatcactcgaggactcaggcattacttacaccgccggtgactctttaggtgtgtattttttaaatgatgaagccttggttgatgaattattagtactgactggcaacgacgctgagacacaggtatccgttggcgatgaaacactaccacttcgtcaagcattaattgaaaagttagagcttactcagtcttacccaggctttgtagaaaaatacgcccttgcaactaacaatgctgagcttttagctttagctgccgacaaagctgcaatgcgtgagtttatcgaaccacgccagatttttgatattgtacgtcaatatccagcaacaattgcagcgcaaacgcttgcagattgcgcgcgcaaattacaagcacgcttgtattcaattgcatcaagccaatctgaagtggaagaagaagttcatttaactgttggcatagttgaatttgaagccttcggcagtcaacatttaggtggttgttctggttatttagcacaccgcgccgaggcaggctcgaaagtaaaggtatttattgagcataatgataatttccgcttaccagcaaacccagacacagccgtgatcatggttggcccaggtactggcatagccccttttcgtgcatttttacaagagcgcgatagccaaggtgcatcaggtaaaaactggttattttttggtaacccacactttacccaagactttttatatcaagttgaaattcaagcttatttaaaatcgggcttattaacacattgcgatgtcgcttttagccgcgatcaagctgaaaaagtatatgtacaagacaagttacgcttgcaaggtgcgcaagtatttgcatggcttgaacaaggcgcacatttttatatttgtggtgatgccaaccgcatggcaaaagatgttcaccaagccttaattgaaattatccaaacacatggcggccaaagtgcagaggaagcagagcaatatttaaaaactttgcgcagcgctaatcgctatcagaaagatgtgtactaa

SEQ ID NO: 1039 - protein, 604 aa, Pseudoalteromonas tunicata D2
MLLSQLSAVTSPLTQEQVQKLQGLVAELNPIQQAWVSGYLAATANSAALGGLAIPATTQAAEAATLTILYGSQTGNAKGVASKLKEQAQARGLAVNLVNMADYKPNSLKKEKFLTIVVSTYGEGEPPEDAENLHEFLGSKKAPKLDGVKVAVLGLGDSSYEFFCQTAIDFETRLQNLGATAIVSRADLDVDYDSLAADWINTALDAFEPDLKAQSSNSAQVIPMTTFGSTATTSQYTKQNPFNAELALVQKITGRDSTKDVRHVEISLEDSGITYTAGDSLGVYFLNDEALVDELLVLTGNDAETQVSVGDETLPLRQALIEKLELTQSYPGFVEKYALATNNAELLALAADKAAMREFIEPRQIFDIVRQYPATIAAQTLADCARKLQARLYSIASSQSEVEEEVHLTVGIVEFEAFGSQHLGGCSGYLAHRAEAGSKVKVFIEHNDNFRLPANPDTAVIMVGPGTGIAPFRAFLQERDSQGASGKNWLFFGNPHFTQDFLYQVEIQAYLKSGLLTHCDVAFSRDQAEKVYVQDKLRLQGAQVFAWLEQGAHFYICGDANRMAKDVHQALIEIIQTHGGQSAEEAEQYLKTLRSANRYQKDVY

SEQ ID NO: 1040 - DNA, 1818 bp, Photobacterium sp. SKA34
  CDS (1)..(1818): transl_table=11
atgttagtgaaggaattatcggctttagctagtccacttaatgatcagcaaatagatcaactgaagcaagcagcggcagaatcgtcgccacaacagcttgcgtggatcagtggctacttttggggattaagccaaacccagtctcaatcagctgcagatcctgcagtccaaaataatgtactggctgccgcaaaaccagccggtaaactcaccatcatttatgcctcgcaaaccggtaacgccaaaggtgttgctgaagcgttaaaagaagaagcacaagcggctgatattgctgctcaagtgttttctgccggcgactataaaggtaaaaacctcgctaaggaaacccacgtgattatcgtggcatcaacccatggcgaaggtgaagcacctgatgatgctattgaattacatgagtttttacaatctaagaaagcccctaaattggcagatcttaattatgctgtgattggtttaggtgattcaagctacgagttcttctgtcaaaccgcgaaagactttgatagctacttagctaaacttggtgggcagccaatgcttgaacgtttagattgtgacgttgactatgaagtgcctgctgctgaatggcgtgcacaagcattagttaaagccaaagaaaccttatcaacgggtgaagctgaagttgttcaactccctgtaggtcaaaagcctgcggctgtttctacttacaataaacagaacccttacaccgcgagtctattggtaagtcaaaaaataacaggccgtgattcaggtaaagatgttcgccatattgaaattgatttagaagattcaggcttaacgtatcaagcgggtgatgcactcggtgtgtggtttgaaaatgacccacaattagttgatgctattttagcgaaacttagcttagacgcggacagttctgttgacgttgatggtgctgcattaagtctacgtgatgcgttgatcagcaaatatgaaattactgcatcaaatccacagtttgtgaccaaatacgctgagttatcaggtagtaaaaagcttgaaaagctggtgtcggatcgtgacaagctacgtgagtactctgcgaaaacacaaattattgatgtcttagcagaaaagaaaacagcattaaccgcagagcaattaatcggtctacttcgtcgtttaacaccacgtttatactctattgcttcaagccaagaagaagtgggtgaagaagttcacttaaccgttggggtagttgaatttgagcaaggtgacgaacaacgccaaggtggcgcatcaagtttcttagctcagcgtttagaagaaggcgctgaagtgaaagtctttgttgaaactaacaataactttaagttaccagcggatgataatacccctgtgatcatgataggtccaggtactggtattgcaccattccgcgcctttgttcaagagcgtgataatcgtgaagcacaaggtaaaaactggttattctttggcgaccgtaccttcactgaagatttcttataccaagttgagtggcaaaaatacttaaaagatagggttgttaatcagattgatgtggcatttagtcgtgatcaagctgagaaagtttacgttcaacaccgcatcttagaacaagctgcacaagtatggcagtggctgcaagacggcgcgcatgtttatgtgtgcggtgatgctaaccaaatggcaaaagatgtccatcaagcgctgatgacagtgattgagcaacaagggaataaaacgcgcgagcaagctgagcagtatctaaatgatctgcgtaaagacaagcgctatcaaagggatgtgtactaa

SEQ ID NO: 1041 - protein, 605 aa, Photobacterium sp. SKA34
MLVKELSALASPLNDQQIDQLKQAAAESSPQQLAWISGYFWGLSQTQSQSAADPAVQNNVLAAAKPAGKLTIIYASQTGNAKGVAEALKEEAQAADIAAQVFSAGDYKGKNLAKETHVIIVASTHGEGEAPDDAIELHEFLQSKKAPKLADLNYAVIGLGDSSYEFFCQTAKDFDSYLAKLGGQPMLERLDCDVDYEVPAAEWRAQALVKAKETLSTGEAEVVQLPVGQKPAAVSTYNKQNPYTASLLVSQKITGRDSGKDVRHIEIDLEDSGLTYQAGDALGVWFENDPQLVDAILAKLSLDADSSVDVDGAALSLRDALISKYEITASNPQFVTKYAELSGSKKLEKLVSDRDKLREYSAKTQIIDVLAEKKTALTAEQLIGLLRRLTPRLYSIASSQEEVGEEVHLTVGVVEFEQGDEQRQGGASSFLAQRLEEGAEVKVFVETNNNFKLPADDNTPVIMIGPGTGIAPFRAFVQERDNREAQGKNWLFFGDRTFTEDFLYQVEWQKYLKDRVVNQIDVAFSRDQAEKVYVQHRILEQAAQVWQWLQDGAHVYVCGDANQMAKDVHQALMTVIEQQGNKTREQAEQYLNDLRKDKRYQRDVY

SEQ ID NO: 1042 - DNA, 1872 bp, Vibrio sp. Ex25
  CDS (1)..(1872): transl_table=11
atgtcttttcaaaagaatgagtattctcacaagaatgtgtctgaagataataatgggcaaggaggaaatcctccaatcgcaagccctctgaatgaccaacaaattagctcactccaacaaactgtctctgagttgtcttcacagcaacttgcttgggtcagtgggtatttttggggattagctcaaaatcaaccaaatacagcggtaacgccaattgcacaagcgacggcagccgtatcagcgaagcctgcaggtaagttgagtattatttttgcttcccaaactggcaacgctaaaggcgttgctgaagctctagaacaggaagcaaaagcagaaggaattgctgtcgaactttttgatgcaagtgattacaaaggtaaaaacttagccaaagaaacacatgtcattattgtggcatcgacgaatggcgaaggcgaagcaccagataacgctatagagctacacgagtttttgcaatctaagaaagctcctaagctgtcaaaccttcaatatggcgttattgctctgggtgactcgagctacgaattcttctgccaaaccggtaaagacttcgacgcttacctatcaaagttaggcgcgaccccatttatcgatcgtcttgattgcgatgtggattatgaagcaccagcagctgaatggcgtaagaatgcgttaggtaaggtaaaagatacgctttcttctggcactgaagcggatgtggttcaacttcctgtgggtcaggcggcgactgcgcactctccttacaataaacaaaacccatacacagcgatattactgaccagtcaaaaaatcacgggtcgtgattctggaaaggatgttcgtcatatagaaattgacttggaaggttcggggttaacgtatcagcctggtgatgcgctaggtgtgtggtttgaaaatagttcagaacttgctaatgccattcttggtaaggtcggtttgtctggggttgaaaccgttgatgttgatggcgaaagcttgtcaatccatagtgctctcgtgagtaaatatgaaatcacaacatctaaccctcagctcattacaaagtttgccgagttatccggtagcaagaagctacaaaagctggttgacgataaagataaacttcgcgagtactctgcaaatactcaaattgttgatgtattggcagagaagaaaaccaagttaaccgcagatgagttgattagtttgcttcgtcgtcttactcctcgcctttactctattgcatcaagccaagaagaggtcgatgaagaagtacacctaacggttgctttggttgagtacgaacaaaacgacgaaaaacgatatggtggtgcgtcgagcttcttagcacagcgtctcgaagagggagatgaagttaaagtatttgttgagcataacaacaactttaaactgccggaagatgatagcactccaattatcatggttggtccaggcacagggatcgcaccattccgtagctttattcaggaacgtgaaaaccgcgatgctgaaggcaaaaactggttgttctttggtgatcgtactttcactcaagacttcttataccaagttgaatggcaaaagtacctcaagtcaggagtactaagccgattggatgttgcttttagtcgtgaccaagtagaaaaagtttacgtacaacatcgcatcttagaaaacgccgctcaagtgtggcagtggatccaagaaggcgcttatatctatgtctgcggtgatgccactcgtatggcaaaagatgtgcacaacgcactggttatcgttgctgaacaagaaggcaagatgccgcgtgacgatgcggaacaatttattaatgacctacgtaaagcgaaacgttatcagagggatgtgtactaa

SEQ ID NO: 1043 - protein, 623 aa, Vibrio sp. Ex25
MSFQKNEYSHKNVSEDNNGQGGNPPIASPLNDQQISSLQQTVSELSSQQLAWVSGYFWGLAQNQPNTAVTPIAQATAAVSAKPAGKLSIIFASQTGNAKGVAEALEQEAKAEGIAVELFDASDYKGKNLAKETHVIIVASTNGEGEAPDNAIELHEFLQSKKAPKLSNLQYGVIALGDSSYEFFCQTGKDFDAYLSKLGATPFIDRLDCDVDYEAPAAEWRKNALGKVKDTLSSGTEADVVQLPVGQAATAHSPYNKQNPYTAILLTSQKITGRDSGKDVRHIEIDLEGSGLTYQPGDALGVWFENSSELANAILGKVGLSGVETVDVDGESLSIHSALVSKYEITTSNPQLITKFAELSGSKKLQKLVDDKDKLREYSANTQIVDVLAEKKTKLTADELISLLRRLTPRLYSIASSQEEVDEEVHLTVALVEYEQNDEKRYGGASSFLAQRLEEGDEVKVFVEHNNNFKLPEDDSTPIIMVGPGTGIAPFRSFIQERENRDAEGKNWLFFGDRTFTQDFLYQVEWQKYLKSGVLSRLDVAFSRDQVEKVYVQHRILENAAQVWQWIQEGAYIYVCGDATRMAKDVHNALVIVAEQEGKMPRDDAEQFINDLRKAKRYQRDVY

SEQ ID NO: 1044 - DNA, 1815 bp, Alteromonadales bacterium TW-7
  CDS (1)..(1815): transl_table=11
atgttgttaggtcaactaaatgctgcggcaagcccgctatcgcaagagcaagttcaaaagctgcaaggtttagtggctgagcttaatccaattcaacaggcgtgggtaagtggttacttagcagctaatgcaaatgcttcatcacttggtatgcctacggctggcacatcagtaacgggcgatgcagcagtattaactattttatatggctcacaaacgggtaatgcaaaaggtgttgcaacccaaatgaaagagcaagctgaatcgcgtggtttatcagccaaattagtgagtatgtctgattacaaaccaacggccctgaaaaaagaaaagtttttaaccgttgttgtatcgacttacggtgaaggtgaaccgcctgaagatggcgaaacgttgcacgcatttttagccactaaaaaggcccctaaactcgacggtgttaaaatagctgtcattggtctaggcgattctagctatgagtttttctgtcaaacagcaaaagactttgaagagcgtttaaataagttaggcgctgagtcagtttaccaacgcgctgatttagatgttgattacgaagaagaagctgcaacatggatacaaggcgcactggatgcatttgaaccagatttaaaagcgcaacagggtaacgcaggtggacaagccgcggtcatgccatttggtgcaccaacacctgcagccagccagtacacaaagcaaaatccatttgaagccgaattattagccgttcaaaaaattaccgggcgtgattcaacaaaagatgtacgccatgtagaaatttcgcttgaaggctctgatatcacttacacaccgggtgactcactgggtatatattttttaaatgatgaggcgttagttgatgaagtgctagaacttacccaaattgatggttctagtcgcgttaaagttgcgaatgaagaattgagcgtgcgtgatgcgcttatcgaaaaattagagctaacgcagtcatatccgggttttgttgaaaaatacgcaacagcaacaggcacacctgagctcttaaagcttttagaagataaagctgcaatgcgtgcttacattgagccacgccaaatatttgatgttattcgtcaaaatccagcaaaactagatgcacaaacattagttgattgcttacgtaagcttcaggctcgtttatattctatagcgtctagccaaagcgaagttgaagaggaagtgcatttaacggttggacttgttgagtttgatacttttgacagcgagcacttaggtggttgttctggttatttagcgcgtcgtgctgaagaaggctgcaaagtaaaagtatttagcgaacataatgacaacttccgtttaccggctaacgatgaaacacctattatcatggtgggtccgggtactggtattgcgccattccgtgcatttttacaagagcgtgactcgcgagaagcacaaggtaaaaactggttgttttttggtaacccacactttactcaagactttttataccaagtagaaattcaggggtatttaaaatcgggcttattgagcaaagtcgatgtggcatttagccgtgaccaagccgaaaaaatctatgtacaagataagcttcgcaaaaactcaaaagatatttttgagtggttagaatctggcgctcacttttatgtatgtggagacgcaaaccgcatggcaaaagatgtacatcaagcattggttgatatcattaaagaaaatacgggtaaaaatgatgaagacgcagagcaatatttaaaagacctgcgtagcgcaaaccgctatcagaaagacgtgtattaa

SEQ ID NO: 1045 - protein, 604 aa, Alteromonadales bacterium TW-7
MLLGQLNAAASPLSQEQVQKLQGLVAELNPIQQAWVSGYLAANANASSLGMPTAGTSVTGDAAVLTILYGSQTGNAKGVATQMKEQAESRGLSAKLVSMSDYKPTALKKEKFLTVVVSTYGEGEPPEDGETLHAFLATKKAPKLDGVKIAVIGLGDSSYEFFCQTAKDFEERLNKLGAESVYQRADLDVDYEEEAATWIQGALDAFEPDLKAQQGNAGGQAAVMPFGAPTPAASQYTKQNPFEAELLAVQKITGRDSTKDVRHVEISLEGSDITYTPGDSLGIYFLNDEALVDEVLELTQIDGSSRVKVANEELSVRDALIEKLELTQSYPGFVEKYATATGTPELLKLLEDKAAMRAYIEPRQIFDVIRQNPAKLDAQTLVDCLRKLQARLYSIASSQSEVEEEVHLTVGLVEFDTFDSEHLGGCSGYLARRAEEGCKVKVFSEHNDNFRLPANDETPIIMVGPGTGIAPFRAFLQERDSREAQGKNWLFFGNPHFTQDFLYQVEIQGYLKSGLLSKVDVAFSRDQAEKIYVQDKLRKNSKDIFEWLESGAHFYVCGDANRMAKDVHQALVDIIKENTGKNDEDAEQYLKDLRSANRYQKDVY

SEQ ID NO: 1046 - DNA, 1794 bp, Moritella sp. PE36
  CDS (1)..(1794): transl_table=11
atgctattaaaggaactatcatcattgacgagtccgttgagtggaccgcagttatcacaattgcaattagcacttaatgatttgtcaccaacgcaaaccgcgtgggtaagtgggtatttggcagggataagccaagcatctggaactcaagtacaggcacaaggcgcggtttctcaacctgctcaacgtgtcactattttatttggttcacaaaccggtaatgccaaaggcgtagcggaagaactttatcagcaagcgcaagcgcaaggtatcgcagcccgacttgtgaatatggcagattataaagccaaagaattgaaaacagaatcgcatttgctaattgtcgcgagtaccaatggtgagggcgaagcgccagatgatgctgttactttccatgagttcttagcctctaaaaaagcccctaaagtaccagagcttaaatacagtgtctgcgcattaggcgatacaagttatgagttctattgtcaaaccggtttggagtttgatgagcgcttagctgcactgggtgctgaagcggttgtcgcacgtgctgactgtgatgttgattatgatgatatggttgctgcgtggagcgaacaggctcttgccgcagttaaagcaacgctagaagaagcaacgacggcagtgccgattactgctgtggcgtcaaatcatgttgctaatacctatacaaaaaagaagccatttaaaaccgaactattagtgaatcaaaagatcactgggcgtttctctgctaaagatattcgtcatgttgaaattgcattagatgatagcggtattcgttatcaagctggcgatgcgttagggatctggtttaagaatgatcctgtgcttgtcgatgcgattttagaccaactggaattagatggtacagaaacggttaccgtcgcaaatgaaactgaaactttacgcgatgcactgattaatcgtttcgaattaacccagagttatccaagtttcgttcaagcttatgctgaactatctggttcgaagaaattagctaaattactcgatgataaagcagcattacgtaactattgttatggtcgtcaaatcttagatgtgattgatgaaaagaaagcaaaattaaccgcagaacaacttattagtggtttacgcaagataacgccacgtctttactccattgcttcaagtcctaatgaagcggaaggtgaagtgcatttgactgttgctgtggttgattatcagcaaaatggtgaacagcgtattggtggtgcttctggtttccttcaacgtctcgaagaaggcgctgagattgaggtttttgttgaacacaacgataacttccgtctaccaagtaacgatgacacacctgtgatcatgattggtcctggtaccgggatcgcaccattccgtgcctttgtacaagaacgtgacgtacgtgaagcagcaggtaataattggttattctttggtaaccagcacttcactgatgatttcctgtatcaaaccgaatggcagggctacttgaaatcgggactattgactaagatggatgtggcgttctcacgcgatcaagcagagaaagtttatgtgcaagaccgtttacgtgaaaatgcggcagagctgtatgcctggttagagcaaggcgctcatgtttatgtctgcggtgacggcgatagaatggcaaaagatgtcaatgaagcattgatcgagattgtagcagagcaaggtaaattagcgcgtagcgaagcagaagagtatgttgctgaactacgtcgaaataaacgttatcagagggatgtttactga

SEQ ID NO: 1047 - protein, 597 aa, Moritella sp. PE36
MLLKELSSLTSPLSGPQLSQLQLALNDLSPTQTAWVSGYLAGISQASGTQVQAQGAVSQPAQRVTILFGSQTGNAKGVAEELYQQAQAQGIAARLVNMADYKAKELKTESHLLIVASTNGEGEAPDDAVTFHEFLASKKAPKVPELKYSVCALGDTSYEFYCQTGLEFDERLAALGAEAVVARADCDVDYDDMVAAWSEQALAAVKATLEEATTAVPITAVASNHVANTYTKKKPFKTELLVNQKITGRFSAKDIRHVEIALDDSGIRYQAGDALGIWFKNDPVLVDAILDQLELDGTETVTVANETETLRDALINRFELTQSYPSFVQAYAELSGSKKLAKLLDDKAALRNYCYGRQILDVIDEKKAKLTAEQLISGLRKITPRLYSIASSPNEAEGEVHLTVAVVDYQQNGEQRIGGASGFLQRLEEGAEIEVFVEHNDNFRLPSNDDTPVIMIGPGTGIAPFRAFVQERDVREAAGNNWLFFGNQHFTDDFLYQTEWQGYLKSGLLTKMDVAFSRDQAEKVYVQDRLRENAAELYAWLEQGAHVYVCGDGDRMAKDVNEALIEIVAEQGKLARSEAEEYVAELRRNKRYQRDVY

SEQ ID NO: 1048 - DNA, 1794 bp, Verrucomicrobium spinosum DSM 4136
  CDS (1)..(1794): transl_table=11
gtgaacttcatccctgaaatgcttcccgagcactcgcccttctcccccgaccaacgtcggtccatcgaaagcctgatcgccagtttttcccccgcgcaacgtttttggctcggtggttacctctctgccggagaagcagtgcccgctgcggcggcacccgccacggcagtgaaactgaccattctgtacgggacggaatccgggaactccgagaagctcgccgatctctccgccaaggaggccaaaaaacacggcttccaggccaccgtgaaaaacatgtcggacatcgctccggcagacctggccaagatcgagaacctcctggtgatcgtgagcacgtggggcgacggggatcctccggaatccgccacctccttctacaaggcgctgatgggccagactctggcccttccgaagctgcactactccgtatgcgccctgggcgacacctcgtacgaacgcttctgccagactggcaaggatattgacgcccgcttggccggtttcggagccacccgcgtttcccctcgtcaggattgcgacgtggactatgaggaaaatcaccgcacctggctggaggcggcgcttgccgcccttcgtgccctcgcgccctctgcgcaggccccggtcgcggccggaggctcagcatccgcagcgcctgccagcgtcgcctacgggaagaagaaccccttcggtggggaactcctggaacgtgtgctgctgaatggcaaaggcacctccaaggaaacctggcactacgagatctctctggacggctccggcctggtctatgaacccggtgacgcactggcggtgatccccgtgaacgccccggacctggtgcagggcatcctgaaggccgccaagctcagcggtagcgaagatgtctccctcaacggctcgggcagcaagccgttgtccgacgctctgcgcgaagactttgacatcacggcgctgtcccgccctgtgctgaccaagctacaggcactgacgaagtccaaaaagctggccaccctgctgagcgaagatgccaaggacaagttcaaggattacctctggggacgctggatcgccgacgcgatcgcggactatgccccaaagggcctctccgctgcggacctggtttccatcttccggaagctgcccccgcgtctctactccatcgcctccagccctctcgcccaccctggcgaagtgcacctcaccgtcgcctcagtgcgttatgatgcgcatggcgtgagccgcaagggagttgcttccacttacctcgccgatctggtgaacaagggtgacaaggtggctgtgtacaaccaccagaacaaaaacttccgcctgcccgcctcctcggacgtgccggtgatcatggtcggccctggcacgggcgttgcccctttccgcgcgttcgtagagcaccgcggtgcccttggtcagggcggcaagtcctggctgttctttggcgaccagcgctacacctatgacttcctctaccaggtggagtggcaggaacacctgaagagcggtgccctctccaaactggatgtcgccttctcccgtgaccaacccgagaaggtgtatgtccagaaccgcatgctggagcgcagcaaggagctttatgcctggcttcaggacggtgcccacttctatgtctgcggtgatgccgcccgcatggccaacgatgtgcacgaggccctcatctccgtggtcgccacggagggcggcaaatcccgcgaggccgccgaggcctatgtggaggatttgaaaaagacgaagcgctaccagcgcgacgtgtactga

SEQ ID NO: 1049 - protein, 597 aa, Verrucomicrobium spinosum DSM 4136
MNFIPEMLPEHSPFSPDQRRSIESLIASFSPAQRFWLGGYLSAGEAVPAAAAPATAVKLTILYGTESGNSEKLADLSAKEAKKHGFQATVKNMSDIAPADLAKIENLLVIVSTWGDGDPPESATSFYKALMGQTLALPKLHYSVCALGDTSYERFCQTGKDIDARLAGFGATRVSPRQDCDVDYEENHRTWLEAALAALRALAPSAQAPVAAGGSASAAPASVAYGKKNPFGGELLERVLLNGKGTSKETWHYEISLDGSGLVYEPGDALAVIPVNAPDLVQGILKAAKLSGSEDVSLNGSGSKPLSDALREDFDITALSRPVLTKLQALTKSKKLATLLSEDAKDKFKDYLWGRWIADAIADYAPKGLSAADLVSIFRKLPPRLYSIASSPLAHPGEVHLTVASVRYDAHGVSRKGVASTYLADLVNKGDKVAVYNHQNKNFRLPASSDVPVIMVGPGTGVAPFRAFVEHRGALGQGGKSWLFFGDQRYTYDFLYQVEWQEHLKSGALSKLDVAFSRDQPEKVYVQNRMLERSKELYAWLQDGAHFYVCGDAARMANDVHEALISVVATEGGKSREAAEAYVEDLKKTKRYQRDVY

SEQ ID NO: 1050 - DNA, 2064 bp, Starmerella bombicola
  CDS (1)..(2064)
atggccgatattaattttatcgcttcggtcgttgttgcgcttgctgttgtctttgtggcatacaagtacttcaatggtggccccgacgtccagagcagtaaagcaggcaacagcacgccatttggcaattcaaaagctgacgaggatggcgattctcgcgactttgttgcgctcatggagaaaaacaacaagaacgtcatcgtgttctacgggtctcagactggaactgctgaggacctggcctcgaagctggctaaagagctcagctcaaagtatggcttgcgcactatgactgccgacccggaaaacttcgatttcgagaagctcgacacgttcccagagtcccatcttgctgtcttcctcatggcatcatatggtgatggagagcctactgacaacgcccaggacctctacagcttcttagggaacagtccatcgttcagccaggacggcgagacgctcgagaacttgaatttcgccgtgttcgggctgggcaacgtgctttatgagttttacaacaaagctggcaaggatatgcacaagtaccttaccgatcttggtgggcactcgattggtccttacggagaaggcgatgactccaagggtatgctagaggaggactatatggcttggaaggacgaattcctcgctgcgcttgtggccaaatggggcctgacggagcgcgaggctgtctacgagccttctatcagcgtcaaggagatagaagaggacgcgcatagccacgatgtgtatcttggagaacccaatctcaagcatctccaggcaagcaaggcgcaagagattcccaagggtccttacaacgcgtccaacccgatgctggccaaaattactgctgctcgtgagcttttcaccaacaccgacagacactgcatccacatggagttcgacaccactggtgcgcgttacacaacgggcgaccacctcgcattttggttccagaacaatgaagaggaagttcagcgattcgttaaagcgcttggcatcgccaatccgcagcagcccatcgccattagtgtgctcgataagacctcgactgtgcgtataccttcaccgacgacttatgaaacgataatccgccactttttggagatcaatggacccgtctcacgccaggttctttcatctattgcccctttcgcgccttctgaagaggtgaaaaaggccacacagcagctcggcagcaacaaagagttgttcgcaagccatgtggccgcgaagaaattcaacattgccaggctgcttctgcacctcagtgggggtcagccctggaagaacgtgcctttcagtttcgtaattgagacaattccccatcttcaacctcgctactactcaatctcgtcatcctcagtacagtctccgaacaccgtttctatcactgctgttgtcgagcgccaaactctgactggagtcgaccatgagcttcgcggcgtcgcgaccaatcaaattttggctcttagcgaggcccttgttgggcacccgagcatgacttataggcttcagcagccgcacgacttcactaactctttgagctctcaggatatccgtgttccggtccacatccgtcactcattgttcaagcttccgggtaagcccacagtccctatcatcatggttgggccgggcactggcgttgctccgttccgtgggttcgttcacgaacgcgcatcgcaaaaagctgcaggcaaagaggtaggtaaagccatgcttttcaccggctctcgtcacgcaaatgaggatttcctctaccgcgacgagtggaagcagttctcagatttcttggatttggaaaccgcattcagccgcgactcgagcaaaaaagtctatgtccagcacaagctgaaggagcgcgccaaggacgttttcgctcttctcaacgagggtgctgtattctatgtctgcggcgacgctggtggtatgtcgcacgatgtgcacagcgccctattggagattgttgctcaagagggcaacttgtccagtgaggacgcagacaagtttgttcgtaaaatgcgtagccgcaacaagtaccaagaggacgtttggtag

SEQ ID NO: 1051 - protein, 687 aa, Starmerella bombicola
MADINFIASVVVALAVVFVAYKYFNGGPDVQSSKAGNSTPFGNSKADEDGDSRDFVALMEKNNKNVIVFYGSQTGTAEDLASKLAKELSSKYGLRTMTADPENFDFEKLDTFPESHLAVFLMASYGDGEPTDNAQDLYSFLGNSPSFSQDGETLENLNFAVFGLGNVLYEFYNKAGKDMHKYLTDLGGHSIGPYGEGDDSKGMLEEDYMAWKDEFLAALVAKWGLTEREAVYEPSISVKEIEEDAHSHDVYLGEPNLKHLQASKAQEIPKGPYNASNPMLAKITAARELFTNTDRHCIHMEFDTTGARYTTGDHLAFWFQNNEEEVQRFVKALGIANPQQPIAISVLDKTSTVRIPSPTTYETIIRHFLEINGPVSRQVLSSIAPFAPSEEVKKATQQLGSNKELFASHVAAKKFNIARLLLHLSGGQPWKNVPFSFVIETIPHLQPRYYSISSSSVQSPNTVSITAVVERQTLTGVDHELRGVATNQILALSEALVGHPSMTYRLQQPHDFTNSLSSQDIRVPVHIRHSLFKLPGKPTVPIIMVGPGTGVAPFRGFVHERASQKAAGKEVGKAMLFTGSRHANEDFLYRDEWKQFSDFLDLETAFSRDSSKKVYVQHKLKERAKDVFALLNEGAVFYVCGDAGGMSHDVHSALLEIVAQEGNLSSEDADKFVRKMRSRNKYQEDVW

SEQ ID NO: 1052 - DNA, 1893 bp, Vibrio sp
  CDS (1)..(1893)
atgaatagggatgtcgtgataatgtcttttcaaaagaatgagtattctcacaagaatgtgtctgaagataataatgggcaaggaggaaatcctccaatcgcaagccctctgaatgaccaacaaattagctcactccaacaaactgtctctgagttgtcttcacagcaacttgcttgggtcagtgggtatttttggggattagctcaaaatcaaccaaatacagcggtaacgccaattgcacaagcgacggcagccgtatcagcgaagcctgcaggtaagttgagtattatttttgcttcccaaactggcaacgctaaaggcgttgctgaagctctagaacaggaagcaaaagcagaaggaattgctgtcgaactttttgatgcaagtgattacaaaggtaaaaacttagccaaagaaacacatgtcattattgtggcatcgacgaatggcgaaggcgaagcaccagataacgctatagagctacacgagtttttgcaatctaagaaagctcctaagctgtcaaaccttcaatatggcgttattgctctgggtgactcgagctacgaattcttctgccaaaccggtaaagacttcgacgcttacctatcaaagttaggcgcgaccccatttatcgatcgtcttgattgcgatgtggattatgaagcaccagcagctgaatggcgtaagaatgcgttaggtaaggtaaaagatacgctttcttctggcactgaagcggatgtggttcaacttcctgtgggtcaggcggcgactgcgcactctccttacaataaacaaaacccatacacagcgatattactgaccagtcaaaaaatcacgggtcgtgattctggaaaggatgttcgtcatatagaaattgacttggaaggttcggggttaacgtatcagcctggtgatgcgctaggtgtgtggtttgaaaatagttcagaacttgctaatgccattcttggtaaggtcggtttgtctggggttgaaaccgttgatgttgatggcgaaagcttgtcaatccatagtgctctcgtgagtaaatatgaaatcacaacatctaaccctcagctcattacaaagtttgccgagttatccggtagcaagaagctacaaaagctggttgacgataaagataaacttcgcgagtactctgcaaatactcaaattgttgatgtattggcagagaagaaaaccaagttaaccgcagatgagttgattagtttgcttcgtcgtcttactcctcgcctttactctattgcatcaagccaagaagaggtcgatgaagaagtacacctaacggttgctttggttgagtacgaacaaaacgacgaaaaacgatatggtggtgcgtcgagcttcttagcacagcgtctcgaagagggagatgaagttaaagtatttgttgagcataacaacaactttaaactgccggaagatgatagcactccaattatcatggttggtccaggcacagggatcgcaccattccgtagctttattcaggaacgtgaaaaccgcgatgctgaaggcaaaaactggttgttctttggtgatcgtactttcactcaagacttcttataccaagttgaatggcaaaagtacctcaagtcaggagtactaagccgattggatgttgcttttagtcgtgaccaagtagaaaaagtttacgtacaacatcgcatcttagaaaacgccgctcaagtgtggcagtggatccaagaaggcgcttatatctatgtctgcggtgatgccactcgtatggcaaaagatgtgcacaacgcactggttatcgttgctgaacaagaaggcaagatgccgcgtgacgatgcggaacaatttattaatgacctacgtaaagcgaaacgttatcagagggatgtgtactaa

SEQ ID NO: 1053 - protein, 630 aa, Vibrio sp
MNRDVVIMSFQKNEYSHKNVSEDNNGQGGNPPIASPLNDQQISSLQQTVSELSSQQLAWVSGYFWGLAQNQPNTAVTPIAQATAAVSAKPAGKLSIIFASQTGNAKGVAEALEQEAKAEGIAVELFDASDYKGKNLAKETHVIIVASTNGEGEAPDNAIELHEFLQSKKAPKLSNLQYGVIALGDSSYEFFCQTGKDFDAYLSKLGATPFIDRLDCDVDYEAPAAEWRKNALGKVKDTLSSGTEADVVQLPVGQAATAHSPYNKQNPYTAILLTSQKITGRDSGKDVRHIEIDLEGSGLTYQPGDALGVWFENSSELANAILGKVGLSGVETVDVDGESLSIHSALVSKYEITTSNPQLITKFAELSGSKKLQKLVDDKDKLREYSANTQIVDVLAEKKTKLTADELISLLRRLTPRLYSIASSQEEVDEEVHLTVALVEYEQNDEKRYGGASSFLAQRLEEGDEVKVFVEHNNNFKLPEDDSTPIIMVGPGTGIAPFRSFIQERENRDAEGKNWLFFGDRTFTQDFLYQVEWQKYLKSGVLSRLDVAFSRDQVEKVYVQHRILENAAQVWQWIQEGAYIYVCGDATRMAKDVHNALVIVAEQEGKMPRDDAEQFINDLRKAKRYQRDVY

SEQ ID NO: 1054 - DNA, 2160 bp, Pseudotsuga menziesii
  CDS (1)..(2160)
atgcagtctaattcgaacaccgtggagagtggcacccagggcttgggcaagagcttgctggagatatctcggcttgaccatgttttttcccttttcgtgaatggcaagggggatctagggggaatgatggagtcggcggtcgttttgagggagaattcggagctgttgatggtcttgactacttctctggccgtcttgattgcttgcgttttgctctttgtttggcggagaggaggatctgctccctcgaagctaccggagaagccgacgcctctggggagagtagaggaagaggaagaggaggaggatgattcggggaaaaagaaagtaacggttttctttgggactcagaccgggacggctgaaggatttgccaaggctctggttgaggaagccaaagctaggtatgacaaggctgtctttaaagtagtggatctggatgattatgcagcagatgatgaacagtatgaagaaaagttaaagaaggaaaaattagcattttttatgctcgcaacgtatggagatggagagccaactgacaatgcagcaaggttttataagtggttttctgagacggaaaaagagagagggccttggctttccaaccttccgtacggggtatttggtttaggcaatagacagtatgagcatttcaataaggttgcttgcacagtagatgaagcattaaatgagcaaggtgggaaacgtcttgttccagtgggccttggtgatgatgatcagtgcattgaagatgactttactgcttggcgagagcaggtttggcctgagctagatcagttactgcgcgacgaagatgatcagccttctagtgctacaccttatacagcggctatacctcagtaccgggtagaaatccatgatcctccagttccgctttacgaagaaacttatgcaacgcagaatggtcaagcctttattgatatccatcacccttgccgagcaaatgtagcggtgcaaagggaacttcatacgccattgtctgaccgttcttgcatccatttagaatttgatatctcaggcactggcctaacgtacgagactggagatcatgttggtgtctatgcagaaaacttaagcgataccgtggaagaagctgcaaaattgttaggctacccactagacacaataatttcagtacatagtgacaaagaagatggtacgcctcttggtggaagctctttgctaccaccattccctggtccatgtaccctgcagactgctcttgctcgttatgcagatttgttgaatcctccgcgaaaggctgccttggttgcattggcgagtcatgcatctgatccagctgaagcagagaggttgaagttcctttcatcaccagccggaaaggatgagtactcccaatggattactgtgagtcaaagaagtcttttagaagtaatggcagaatttccatcagcaaaaccacctcttggtgtcttctttgcagctgttgccccgcgtctgcaacctcgatattattctatttcttcctctcccaggtatgcatccaatagaatacatgtcacatgtgctctggtttatgggcccagtccaactggcagaattcacaaaggtgtttgttccaattggatgaagaattcagtgccttccgagaaaagccagtattgtagctgggcaccagtctttgttagacagtcaaatttcaaattgccatcggatccttcagttcctattgttatggtgggccctggaactggtttagcaccttttagaggctttttgcaggaaagagctgcaattcaaaaatctggagagaagcttgggccagctgttcttttctttggatgcaggaatcgccaaatggattacatttatgaagatgaactgaagagctatgtggaaaatggtgtattgactgagcttgttcttgctttctctcgcgaaggagcaaccaaagagtatgtgcagcacaagattacagagaagggatcctatatctggaatctgattgctcaaggtggctatctctatgtatgtggtgatgccaagggcatggctagggatgtgcacaggacactacatagtatagtccaagagcaggaatccgtggatagcaccagcgcagaggctacagtgaagaaattacagacagaaggaagatatttacgagatgtatggtaa

SEQ ID NO: 1055 - protein, 719 aa, Pseudotsuga menziesii
MQSNSNTVESGTQGLGKSLLEISRLDHVFSLFVNGKGDLGGMMESAVVLRENSELLMVLTTSLAVLIACVLLFVWRRGGSAPSKLPEKPTPLGRVEEEEEEEDDSGKKKVTVFFGTQTGTAEGFAKALVEEAKARYDKAVFKVVDLDDYAADDEQYEEKLKKEKLAFFMLATYGDGEPTDNAARFYKWFSETEKERGPWLSNLPYGVFGLGNRQYEHFNKVACTVDEALNEQGGKRLVPVGLGDDDQCIEDDFTAWREQVWPELDQLLRDEDDQPSSATPYTAAIPQYRVEIHDPPVPLYEETYATQNGQAFIDIHHPCRANVAVQRELHTPLSDRSCIHLEFDISGTGLTYETGDHVGVYAENLSDTVEEAAKLLGYPLDTIISVHSDKEDGTPLGGSSLLPPFPGPCTLQTALARYADLLNPPRKAALVALASHASDPAEAERLKFLSSPAGKDEYSQWITVSQRSLLEVMAEFPSAKPPLGVFFAAVAPRLQPRYYSISSSPRYASNRIHVTCALVYGPSPTGRIHKGVCSNWMKNSVPSEKSQYCSWAPVFVRQSNFKLPSDPSVPIVMVGPGTGLAPFRGFLQERAAIQKSGEKLGPAVLFFGCRNRQMDYIYEDELKSYVENGVLTELVLAFSREGATKEYVQHKITEKGSYIWNLIAQGGYLYVCGDAKGMARDVHRTLHSIVQEQESVDSTSAEATVKKLQTEGRYLRDVW

SEQ ID NO: 1056 - DNA, 1833 bp, Blochmannia floridanus
  CDS (1)..(1833): transl_table=11
ttgagtataatgggtttattaagttctgaacaattaaatcaattaaaattagtattagatactttatctaaaaatcaattaatttggttgtctggatatttgttgggtttagttaattctcagacatctacagatatcggggtgactgcatctggtgttagtgcaggattagaattaaaaccggatctaatcgataatacaattattgtgatatctgcatctcaaactggaaatgctaggaatatagcaaaacagttgtatagtgatctagtagaagcaggtttaagagctgttttatttagtgctggagagtataaatttaaaaaaatttctgaaataagtttgttaatttttattacatctactcatggagaaggtgaacctccagaagaagcattagcattatataagtatttattttctgaaaaagctttgagaatggaaaagactagttttattgtgcttagtttaggtgataggtcttatgaatattttgcaaaagccggtaaggattttgacaaaagatttgaggatcttggtgcaaatcggttatatgatcgagtagatttagatgtggattttcaaagtgaagttgataaatggaaagaaaaagtcgtttctttatgtaaatcgaagatagtttctattgtttcaaaagataaatgtatcaatattcaaaataatattgtttttaagaaaaagaatcctgtaactagttattgtaaggaatttccattaatagcatatttattaaatagacaaaaaataactagttgtaattctttaaaagatgtacatcatttagagtttgatatttctggttccggtttgtgttatcaaccaggagatgcattaggaatatggtatgaaaatgattataatcttgtatatgagttattagagttattaaatttaacgggtcgagaatccgtgcaaatcaaaaatcaatcgatgtgtcttgatgaagcgttggttaagtattgtgatttaacccaaaatactcctgttgttgtaaaaagtatagctaccatttcacaagataagattttattaaatttattgcaaaatcaaaatcaattaaatagtttttgttcaacgacaccaatagttgaaatgttttaccaaatatctatgactaagcagttatcttctcaagagttaattcagattttaagaccaatgagacctaggttttattctattgcttctgcacaatcagaggtaggagaagaaatacatattactgttagtgttgtacgttacactattaatgggcgaattagatctggtggtgctagtagttatttagttgatcgtgtgcaagatcatgacgaaatacgtatttttgtagaatctaatgataattttagattaccaaaagatcctaatgtttctataattatgattggagcaggaactggtattgctccatttagatcttttatgcaacaacgagcattagataaagcattagggaaaaattggcttttttttggaaatttaaaatttaccgatgattttctgtatcaaattgaatggaaaacttattttaaatcagggatattaaataaaattgatacggcttggtctagagatcaagattataaagtttatgttcaggataaattattgagtaatggtttggaattgtgggattggattcaaaaaggagcatatatttatgtatgtggtgatgcaaaatatatggctcgagatgtggaacaagcgttagttactgtagtatctatacatggaaatatgaatatggatcaatcaaatgatttttggaatgagatgcgagtccaacatcgttatcagagggatatatattaa

SEQ ID NO: 1057 - protein, 610 aa, Blochmannia floridanus
MSIMGLLSSEQLNQLKLVLDTLSKNQLIWLSGYLLGLVNSQTSTDIGVTASGVSAGLELKPDLIDNTIIVISASQTGNARNIAKQLYSDLVEAGLRAVLFSAGEYKFKKISEISLLIFITSTHGEGEPPEEALALYKYLFSEKALRMEKTSFIVLSLGDRSYEYFAKAGKDFDKRFEDLGANRLYDRVDLDVDFQSEVDKWKEKVVSLCKSKIVSIVSKDKCINIQNNIVFKKKNPVTSYCKEFPLIAYLLNRQKITSCNSLKDVHHLEFDISGSGLCYQPGDALGIWYENDYNLVYELLELLNLTGRESVQIKNQSMCLDEALVKYCDLTQNTPVVVKSIATISQDKILLNLLQNQNQLNSFCSTTPIVEMFYQISMTKQLSSQELIQILRPMRPRFYSIASAQSEVGEEIHITVSVVRYTINGRIRSGGASSYLVDRVQDHDEIRIFVESNDNFRLPKDPNVSIIMIGAGTGIAPFRSFMQQRALDKALGKNWLFFGNLKFTDDFLYQIEWKTYFKSGILNKIDTAWSRDQDYKVYVQDKLLSNGLELWDWIQKGAYIYVCGDAKYMARDVEQALVTVVSIHGNMNMDQSNDFWNEMRVQHRYQRDIY

SEQ ID NO: 1058 - DNA, 1806 bp, Buchnera aphidicola subsp
  CDS (1)..(1806): transl_table=11
atgaaaaatcaaaacaagtttgatcccgtgtttccattaagttcagaacaattaaataatttaaaagaacttgaaagaacttgcactaatattcaaagtgcttggttgtcaggttatttttggaaaattgctaatcaaacatcaaatataacgtcttttcaaacaaatgaatcagaaaaaaacgatccagttattacgattatttccgcttcccaaactggtaatgcaaaattattgtctaaacgtctttatgaatattttaataaaaataataaaataagtcgtcttattgatgctatggattataaattcaaaaaaataaaagatgaaaagatattaattttaattatttcaactcaaggtgagggtgaaccaccagaagaagcattatctttttataaatttataatgtcaaaaaatgcacctaatttaaataacttatattatagtgtttttggattaggagatacatcctataatttattttgtcaagctggaaaagattttgataaaagatttaaagagttaggtggtaattctttattagatagatttgatgcagatattgaatatgaagataattataataaatggtctcaggatttattacaatctattaatagtaaagaaaaaatttataaatcttctgtgtcatatatagatcaagaaaatacattgatactttcgaaaaatcattatacaaaaaaaaatcctgctgaaggtattatattaacaaatcaaaaaattactggtcgtaattctaagaaagatgttcatcatattgaaattgatattagtaatttgaacattaagtattcacctggtgatgcattgggtgtatggtataaaaatgacagtaatttagtgaaaaatatattagaattactctctattaatatttctgaaacaattacaattaaaaatgatgttattacaatttttgatgctttacaaaatcatttcgaattaacgaataatactaaaaatattattaaaagttatgcaaatttttcgaaaaacaaatttttaaaagatatcatatctaatgattctgatttagaaaattataccattaacactcctttaattaaaatgatacatgatcatccattaaaattatcctctcaacaattaattggtttacttcgcccactaacacctagattatattccatttcttcttcacaagaagaaattgacaatgaaattcatatcacagtaggagtagtaaaaaaattaatttcaggtcatgtatatttaggaggggcctctggttatctttcacaatctttaaaatctgatgatataataaaaatttttattcaaaccaatgataattttcgattacctattaataaaaacactccaataataatgattagttcaggaacaggcattgctccatttcgtgcttttatgcagcaaagagacaatgataatgctgatggaaaaaattggcttttttttggaaatcctaattttactgaagattttttatatcaagtagaatggcaaaaatatataaaaaagggattaatcaccaatatgaatttagcttggtcgcaagatcaaaaaaataaaatatacgtacaagatcgaataagagaaaattcacaagaaatatggtcttggatagaagaaggagctcaaatatatgtttgtggaaacgcttctaaaatggcaaaagatgttgaaaaagcattattagatattattagtcataacgctcatttaaatcttgaagaatctcaagaatttttaaataatctgcgtttaaataaacgttataaaagagatgtgtattaa

SEQ ID NO: 1059 - protein, 601 aa, Buchnera aphidicola subsp
MKNQNKFDPVFPLSSEQLNNLKELERTCTNIQSAWLSGYFWKIANQTSNITSFQTNESEKNDPVITIISASQTGNAKLLSKRLYEYFNKNNKISRLIDAMDYKFKKIKDEKILILIISTQGEGEPPEEALSFYKFIMSKNAPNLNNLYYSVFGLGDTSYNLFCQAGKDFDKRFKELGGNSLLDRFDADIEYEDNYNKWSQDLLQSINSKEKIYKSSVSYIDQENTLILSKNHYTKKNPAEGIILTNQKITGRNSKKDVHHIEIDISNLNIKYSPGDALGVWYKNDSNLVKNILELLSINISETITIKNDVITIFDALQNHFELTNNTKNIIKSYANFSKNKFLKDIISNDSDLENYTINTPLIKMIHDHPLKLSSQQLIGLLRPLTPRLYSISSSQEEIDNEIHITVGVVKKLISGHVYLGGASGYLSQSLKSDDIIKIFIQTNDNFRLPINKNTPIIMISSGTGIAPFRAFMQQRDNDNADGKNWLFFGNPNFTEDFLYQVEWQKYIKKGLITNMNLAWSQDQKNKIYVQDRIRENSQEIWSWIEEGAQIYVCGNASKMAKDVEKALLDIISHNAHLNLEESQEFLNNLRLNKRYKRDVY

SEQ ID NO: 1060 - DNA, 1809 bp, Buchnera aphidicola subsp
  CDS (1)..(1809): transl_table=11
atgaaaaataaaaatccctttaatattttttttccccttagtttagataaaatagaaaatttagaaaaaattaaaaaaaattgttctagtattcaatatgcttggctttcaggttatttttggaatttagctaatcaaactccttctcgattaatatgtgaaaaaaatgaattttttcgaaaagataatgaagagaaaataattactattatatctgcttctcaaactggaaatgctagacagcttgctaaacgttttaataaatatttaaaaaatgaaaataagaaaactaatttaattgatgctgctgattataatttcaaaaaaattaaaaatgaaaggtttttaattctaattatttctactcaaggagaaggtgaacctccagaagaagcactatctttttataaatttattatgtcaaaaaaagctccgagattagagaatttacactatagtgtatttggattaggagatgtttcttataatttattttgtcaagcaggaaaagattttgataaaagattcagcgaattaggaggaaaaagtttacttcatagactagattcagatattgaatatgaatcaaattatatacaatggtcagaagagttgttacttgctataaacaaaatagatgtttctacttgttctgtgttcaaaaaaaatgataaaaaaaattttattgataagttaaattatacaaagtataaacctgctgttgctacagttttattaaatcaaaaaattaccggtcgaaattcaactaaagatgttcatcatattgagttagatataacgaattcaaatattgtttatacacctggtgatgcgttaggtgtatggtatcaaaatagtagtcaattaataaaacaaatattaaaactactttctataagaatatctgataaagttaaagttaaagataaaataattactatttttgaagctttgaaaaaaaattttgaattaactacaaatactaagcatattattcaaaaatatactgatgttacacaaaataaatttttgaaaaaaattatatctgataataaaaaattaaacaactatgtaaaaaaaacacctttgttaaagatgatatatgatcatcctaaaaaactgtcttctcaacaattaattagtattttacgacctttaaaacctagattatattctatttcttcatctcaatctgaaatgaatgatgaagttcatattacagtcggagtagtgaagaaacaaatttctggtactatacatttaggaggttcttctagttatttatcacaatttttaaaaattgatgattctgtaaaaatttttgttgaagaaaagagtaattttcgtttacctgaaaataaagatgtacctattattatgattggatcaggaactggtatcgctccatttcgtgcttttatacaacaacgagataatgataaagctacaggaaaaaattggatattttttggtaatcctaattttactgaagattttttatatcaattagaatggcaaaaatatttgaaaaaaaaacttcttactaaaatgagtttagcttggtcacgagatcaaaaggaaaaaatatatgtacaagataaaataagagaaaatggaaaagaattatgggaatgggtcaatcaaggggcacaaatctacgtttgtggtaatgcatctaaaatggcaaaagacgttgaaaaagaattgttagatgtttttagtaagaatggttcaatggatattgaagaatctagtgagtttttaaataacttgagaataacaagacgttatcaaagagatgtatactaa

SEQ ID NO: 1061 - protein, 602 aa, Buchnera aphidicola subsp
MKNKNPFNIFFPLSLDKIENLEKIKKNCSSIQYAWLSGYFWNLANQTPSRLICEKNEFFRKDNEEKIITIISASQTGNARQLAKRFNKYLKNENKKTNLIDAADYNFKKIKNERFLILIISTQGEGEPPEEALSFYKFIMSKKAPRLENLHYSVFGLGDVSYNLFCQAGKDFDKRFSELGGKSLLHRLDSDIEYESNYIQWSEELLLAINKIDVSTCSVFKKNDKKNFIDKLNYTKYKPAVATVLLNQKITGRNSTKDVHHIELDITNSNIVYTPGDALGVWYQNSSQLIKQILKLLSIRISDKVKVKDKIITIFEALKKNFELTTNTKHIIQKYTDVTQNKFLKKIISDNKKLNNYVKKTPLLKMIYDHPKKLSSQQLISILRPLKPRLYSISSSQSEMNDEVHITVGVVKKQISGTIHLGGSSSYLSQFLKIDDSVKIFVEEKSNFRLPENKDVPIIMIGSGTGIAPFRAFIQQRDNDKATGKNWIFFGNPNFTEDFLYQLEWQKYLKKKLLTKMSLAWSRDQKEKIYVQDKIRENGKELWEWVNQGAQIYVCGNASKMAKDVEKELLDVFSKNGSMDIEESSEFLNNLRITRRYQRDVY

SEQ ID NO: 1062 - DNA, 1800 bp, Escherichia coli O157
  CDS (1)..(1800): transl_table=11
atgacgacacaggtcccaccttccgcgttgcttccgttgaacccggagcaactggcacgccttcaggcggccacgaccgatttaactcccacccagcttgcctgggtttctggctatttctggggcgtgctcaatcagcagcctgctgcgcttgcagcgacgccagcgccagccgcagaaatgccgggtataactattatctctgcttcgcaaaccggcaatgcgcgccgggttgctgaagcattacgcgatgatttattgacggcaaaactgaacgttaagctggtgaacgcgggcgactataaattcaaacaaatcgccagcgaaaaactgcttatcgtggtgacgtcaacgcaaggagaaggggaaccgccggaagaagccgtcgcgctgcataagttcctgttctccaaaaaagcgccgaagctggaaaataccgcttttgccgtgtttagcctcggcgatagttcttatgaatttttctgccagtccgggaaagatttcgacagcaagctggcggaactgggcggtgaacgcctgctcgaccgtgtcgacgccgacgttgaataccaggctgctgccagcgagtggcgcgcccgcgtggttgatgcgcttaaatcgcgtgcgcctgtcgcggcaccttcgcaatccgtcgctactggcgtggtaaatgaaatccacaccagcccgtacagcaaagacgcgccgctggtagcgagcctttcggttaaccagaaaattaccgggcgtaactctgaaaaagacgttcgccatatcgaaattgacttaggtgactcgggcctgcgttaccagccgggtgacgcgctgggtgtctggtatcagaacgatccggcactggtgaaagaacttgtcgaactgctgtggctgaaaggcgatgaacctgtcaccgtcgagggcaaaacgttgcctctgaacgaagcgctacagtggcacttcgaactgaccgtcaacaccgccaatattgttgagaactatgccacgcttacccgcagcgaaacgctgttgccgctggtgggcgataaagcgaagttacagcattacgccgcgactacgccgattgtcgacatggtgcgcttctctccggcgcaactggacgccgaagcgctgattaatctgctgcgcccgctgacgccgcgtctgtattccatcgcctcctcgcaggaggaagtcgagaacgaagtacacgtcaccgttggtgtggtgcgttacgacgtggaaggccgcgcccgtgccggtggtgcctccagcttcctcgcggaccgcgtggaagaagagggcgaagttcgcgtatttatcgaacataacgataacttccgcctgcccgctaacccggaaaccccggtgattatgattggcccaggcaccggcatcgcgccgttccgcgcctttatgcagcagcgcgccgctgacgaagcgccgggtaaaaactggctgttctttggcaacccgcactttacggaagatttcctctaccaggtggagtggcagcgttacgtcaaagagggcgtgctgacgcgtatcgatcttgcctggtcgcgcgatcaaaaagaaaaagtttacgtacaagacaaactgcgcgaacagggcgcggagctgtggcgctggatcaatgacggtgcccacatttatgtctgcggcgacgctaatcgcatggcgaaagacgttgagcaggcacttctggaagtgattgccgaatttggtggcatggacaccgaagcggcggatgaatttttaagtgagctgcgcgtagagcgccgttatcagcgagatgtctactaa

SEQ ID NO: 1063 - protein, 599 aa, Escherichia coli O157
MTTQVPPSALLPLNPEQLARLQAATTDLTPTQLAWVSGYFWGVLNQQPAALAATPAPAAEMPGITIISASQTGNARRVAEALRDDLLTAKLNVKLVNAGDYKFKQIASEKLLIVVTSTQGEGEPPEEAVALHKFLFSKKAPKLENTAFAVFSLGDSSYEFFCQSGKDFDSKLAELGGERLLDRVDADVEYQAAASEWRARVVDALKSRAPVAAPSQSVATGVVNEIHTSPYSKDAPLVASLSVNQKITGRNSEKDVRHIEIDLGDSGLRYQPGDALGVWYQNDPALVKELVELLWLKGDEPVTVEGKTLPLNEALQWHFELTVNTANIVENYATLTRSETLLPLVGDKAKLQHYAATTPIVDMVRFSPAQLDAEALINLLRPLTPRLYSIASSQEEVENEVHVTVGVVRYDVEGRARAGGASSFLADRVEEEGEVRVFIEHNDNFRLPANPETPVIMIGPGTGIAPFRAFMQQRAADEAPGKNWLFFGNPHFTEDFLYQVEWQRYVKEGVLTRIDLAWSRDQKEKVYVQDKLREQGAELWRWINDGAHIYVCGDANRMAKDVEQALLEVIAEFGGMDTEAADEFLSELRVERRYQRDVY

SEQ ID NO: 1064 - DNA, 1800 bp, Escherichia coli O6
  CDS (1)..(1800): transl_table=11
atgacgacacaggtcccaccttccgcgttgcttccgttgaacccggagcaactggcacgccttcaggcggccacgaccgatttaactcctacccagcttgcctgggtttctggctatttctggggcgtgctcaaccagcagcctgctgcgcttgcagcgacgccagcgcccgccgcagaaatgccgggtataactattatctccgcctcgcaaaccggcaatgcgcgccgggttgctgaagcattacgcgatgatttattagcggcaaaactgaacgttaagctggtgaacgcgggtgactataaattcaaacaaatcgccagcgaaaaactgcttatcgtggtgacgtcaacgcaaggggaaggggaaccgccggaagaagccgtcgcgctgcataagttcctgttctccaaaaaagcgccaaagctggaaaacaccgcgtttgccgtgtttagcctcggcgatagctcttatgaatttttctgccagtccgggaaagattttgacagtaagctggcggaactgggcggtgaacgcctgctagaccgtgtcgatgccgatgttgaataccaggctgctgccagcgagtggcgcgcccgcgtggttgatgcgcttaaatcgcgtgcgcctgtcgcggcgccttcgcaatccgtcgctactggcgcggtaaatgaaatccacaccagcccgtatagcaaagacgcgccgctggcggccagcctttcggttaaccagaaaattaccgggcgtaactctgaaaaagacgttcgtcacattgaaattgacttaggtgactctggcctgcgttaccagccgggtgacgcgctgggcgtctggtatcagaacgatccggcactggtgaaagaacttgtcgaactgctgtggctgaaaggcgatgaacctgtcaccgtcgagggcaaaacgttgcctctgaacgaagcgctacagtggcacttcgaactgaccgtcaacaccgccaacattgttgagaactatgccacgcttacccgcagcgaaacgctgctgccgctggtgggcgataaagcgaaattacagcattacgccgcgacgacgccgattgtcgacatggtgcgtttctctccggcgcaactggatgccgaagcgctgattaatctgctgcgcccgctgaccccgcgcctgtattccatcgcctcctcgcaggcggaagtcgagaacgaagtgcacgttaccgttggtgtggtgcgttacgacgtggaaggccgtgcccgtgccggtggtgcctccagcttcctcgcagatcgtgtggaagaagagggtgaagtccgcgtctttatcgaacataacgacaacttccgcctgccaaccaatccggaaaccccggtgatcatgattggccctggcaccggcatcgcgccgttccgtgcctttatgcagcagcgtgctgccgacgaagcgccgggtaaaaactggctattctttggcaacccacactttacggaagatttcctctaccaggtggaatggcagcgttacgtcaaagaaggcgtgctgacgcgcatcgatctcgcctggtcgcgcgatcaaaaagaaaaaatttacgtacaagacaaactgcgcgaacagggcgcagagctgtggcgctggatcaatgacggtgcccacatttatgtctgcggcgacgctaatcgcatggcgaaagacgttgagcaggcacttctggaagtgattgccgaatttggtggcatggacaccgaagcggcggatgaatttttaagtgagctgcgcgtagagcgccgttatcagcgagatgtctactaa

SEQ ID NO: 1065 - protein, 599 aa, Escherichia coli O6
MTTQVPPSALLPLNPEQLARLQAATTDLTPTQLAWVSGYFWGVLNQQPAALAATPAPAAEMPGITIISASQTGNARRVAEALRDDLLAAKLNVKLVNAGDYKFKQIASEKLLIVVTSTQGEGEPPEEAVALHKFLFSKKAPKLENTAFAVFSLGDSSYEFFCQSGKDFDSKLAELGGERLLDRVDADVEYQAAASEWRARVVDALKSRAPVAAPSQSVATGAVNEIHTSPYSKDAPLAASLSVNQKITGRNSEKDVRHIEIDLGDSGLRYQPGDALGVWYQNDPALVKELVELLWLKGDEPVTVEGKTLPLNEALQWHFELTVNTANIVENYATLTRSETLLPLVGDKAKLQHYAATTPIVDMVRFSPAQLDAEALINLLRPLTPRLYSIASSQAEVENEVHVTVGVVRYDVEGRARAGGASSFLADRVEEEGEVRVFIEHNDNFRLPTNPETPVIMIGPGTGIAPFRAFMQQRAADEAPGKNWLFFGNPHFTEDFLYQVEWQRYVKEGVLTRIDLAWSRDQKEKIYVQDKLREQGAELWRWINDGAHIYVCGDANRMAKDVEQALLEVIAEFGGMDTEAADEFLSELRVERRYQRDVY

SEQ ID NO: 1066 - DNA, 1830 bp, Erwinia carotovora subsp
  CDS (1)..(1830): transl_table=11
atgactactccggtttcccccacttcgttgcttccgttgagtgcggaacaattaacgcgtttacaggcggcaaccggtgatttctcatcgacgcagctggcctggctatccggctatttctgggggctgatacaacagcctgggaacgtgcaacctggtgcaacgatcgacgcggcgaccaccgcttctgcggtaacggtgccggtacaaaccatcacgctgatttccgcctcgcagaccggcaacgcgcgtcgagtcgcggaacaattgcgtgacgacctgctggcggccaagctgcccgtcaatctggtcaatgcgggtgattacaaattcaagcaaatcgggcaggaaaaactgctgctgatcgtggcgtcgacgcagggtgaaggggagcctgcggaagaggcggtggcgctgcataagtttctgctttccaaaaaagcgccggagctgaaagacaccgcgtttgcggtgtttgggctgggtgatacctcttatgaattcttcagtaaggcgggtaaagattttgatggtcgtctggctgagttaggcgcggaacgcttgctggatcgcgttgatgccgatgtggattatcaggcgcttgccgcacaatggcgacgtcaactggttgatattttgcaggcgcgggtgccggttcagggcaacgcggtggcacagcttgccgctcagggcgcactggatgaaattaccagcagcccgtacagcaaatcctcgccgttgcaggccacgtttgccgtgaatcagaaagtaaccggacgtggttcagaaaaagacgtgcgccatatcgagatcgatctgggggattccggtttacgttatcagccgggtgacgcgctgggtgtttggttcgataacgatccggcgctggtacaggaattgctggagctgctgtggctgaaaggcgatgaatccgtcagcgttgacggtaaggcgctgccactgtcgcaggcgctgaaaagtcactttgagctgacgcaaaatactgcgcctatcgtcgagaaatatgctgcgttgtcgcgcaatgagacgctgttgtcgctgctggctgataagcctgcgcttcagcagtttgcgcagcggacgccgctggttgatatggtgcgacaagcgccagtagaactgacggcggaacagctgcttggcctgctgcgtccgttgacgccacgtctttactccattgcttcatcacaggcagaagccgaaagcgaagtgcatatcaccgttggcgtggtgcgctatgaatatgaaggccgcgcacgtgccggtggtgcctccagctatctggctgacaggctgagtgaagacgatgaaatccgcgtctttatcgagcataacgataacttccgcctgcctgctaattcggaaactccggtcattatgattgggccaggaaccgggattgcgccattccgcgcctttatgcaacagcgcgatgccgatggggcagaagggaaaaactggctattctttggtaacccacactttacggaagactttctgtatcaagttgaatggcagcgctatgtgaaagaagggttgttgacgcacatcgatctggcgtggtcgcgcgatcaggcacacaaaatctatgtacaggacaaactgcgggaaaaaggcgcggaagtctggcgctggattcaggacggtgcgcacctgtacgtgtgtggcgatgctaaccgtatggcgaaagacgtcgagcgagcactgctggatgtgatagttgagcatggcggcatggacagtgaacaagccgacgagtttttaagcgatctgcgccttgagcgccgttatcagcgagatgtgtactaa

SEQ ID NO: 1067 - protein, 609 aa, Erwinia carotovora subsp
MTTPVSPTSLLPLSAEQLTRLQAATGDFSSTQLAWLSGYFWGLIQQPGNVQPGATIDAATTASAVTVPVQTITLISASQTGNARRVAEQLRDDLLAAKLPVNLVNAGDYKFKQIGQEKLLLIVASTQGEGEPAEEAVALHKFLLSKKAPELKDTAFAVFGLGDTSYEFFSKAGKDFDGRLAELGAERLLDRVDADVDYQALAAQWRRQLVDILQARVPVQGNAVAQLAAQGALDEITSSPYSKSSPLQATFAVNQKVTGRGSEKDVRHIEIDLGDSGLRYQPGDALGVWFDNDPALVQELLELLWLKGDESVSVDGKALPLSQALKSHFELTQNTAPIVEKYAALSRNETLLSLLADKPALQQFAQRTPLVDMVRQAPVELTAEQLLGLLRPLTPRLYSIASSQAEAESEVHITVGVVRYEYEGRARAGGASSYLADRLSEDDEIRVFIEHNDNFRLPANSETPVIMIGPGTGIAPFRAFMQQRDADGAEGKNWLFFGNPHFTEDFLYQVEWQRYVKEGLLTHIDLAWSRDQAHKIYVQDKLREKGAEVWRWIQDGAHLYVCGDANRMAKDVERALLDVIVEHGGMDSEQADEFLSDLRLERRYQRDVY

SEQ ID NO: 1068 - DNA, 1800 bp, Klebsiella pneumoniae subsp
  CDS (1)..(1800): transl_table=11
atgacgacacaggccccaccttccaacttgctgccgctcaacccggagcaactggcgcgccttcaggcggccaccactgacttcacgcccactcagctcgcctgggtatctggctatttctggggcgtgctgaatcagcagtccggcgcggcggtagccgcccccgccccggccgccgaggtaccgacgatcacgctgatttccgcctcgcaaaccggcaacgcccgccgcgtcgccgaagcgctgcgtgacgatctgctggcggcgaagctgaacgtgaagctggtgaatgcaggcgattataaattcaaacaaattgctgcggaaaaactgctggtggtagtgacgtccacccagggggaaggagagccgccggaagaagcggtcgcattgcataagttcctgttctctaagaaagcgccgaagctggacgggactgcgttcgccgtctttggtctcggcgatacctcttatgaatttttctgccagtccggcaaagatttcgacaacaagctggccgagctcggcgcggaacgtctgctcgatcgcgttgatgccgacgttgaatatcaggccgcggccgctgaatggcgcgcgcgcgtggttgaggcgctgaaggcccgtgcgccggtcgctgcgcccgctcagctggccaccagcggcgcggtgaacgatattcacaccagcccatataccaaagaagcgcccctgacggcgaccctgtcggtcaatcagaaaatcaccggccgcaattcagaaaaagatgtgcgccatatcgaaatagacctcggtgattccggtctgcgctatcagccgggcgacgccctgggcgtctggtaccagaacgatcctcagctggtgaaagagctggtggagctgctgtggctgaaaggcgacgagccggtgaccgttgagggtaaaactctgccgctgtcggaagccctgcagtggcattttgagctgacggttaacaccgcgactatcgttgaaaactacgccaccctgacgcgcagcgaatcgctgctgccgctggtgggcgacaaagctcagttgcagcagtatgccgccgcgacgccgatcgtcgatatggtccgtttctctccagcgcagctggacgctgaggcgttaatcggtctgctgcgtccgctgacgccgcgcctgtattctattgcttcctcacaggcggaagtggagagcgaggtgcatgtcaccgtgggcgtggtgcgctatgaaattgaaggccgcgcccgggctggcggcgcctccagcttcctcgccgaccgcgtggaagaggatggcgaagtccgtgtctttatcgaacacaacgacaacttccgtctgccagccaacccggagaccccggtgatcatgattggcccgggcaccggtattgcgccgttccgcgcctttatgcagcagcgcgctgcggacggagcgcaaggcaagaactggttgttcttcggcaacccgcacttcaccgaagatttcctctatcaggtggagtggcagagctatgtgaaggaaggtctgctgacccgtatcgatctggcctggtcccgcgatcaacaacaaaaaatctatgtgcaggacaaactgcgcgagcagggggccgagctgtggcgctggatcaatgacggcgcccacatttatgtctgcggcgacgccaatcgtatggcgaaggacgtggaaaacaccttactggaagtgattgccgaatacggcgcgatggacgccgaagcggcggacgaatttttaagtgagctgcgcgttgagcgccgttatcagcgagatgtctactaa

SEQ ID NO: 1069 - protein, 599 aa, Klebsiella pneumoniae subsp
MTTQAPPSNLLPLNPEQLARLQAATTDFTPTQLAWVSGYFWGVLNQQSGAAVAAPAPAAEVPTITLISASQTGNARRVAEALRDDLLAAKLNVKLVNAGDYKFKQIAAEKLLVVVTSTQGEGEPPEEAVALHKFLFSKKAPKLDGTAFAVFGLGDTSYEFFCQSGKDFDNKLAELGAERLLDRVDADVEYQAAAAEWRARVVEALKARAPVAAPAQLATSGAVNDIHTSPYTKEAPLTATLSVNQKITGRNSEKDVRHIEIDLGDSGLRYQPGDALGVWYQNDPQLVKELVELLWLKGDEPVTVEGKTLPLSEALQWHFELTVNTATIVENYATLTRSESLLPLVGDKAQLQQYAAATPIVDMVRFSPAQLDAEALIGLLRPLTPRLYSIASSQAEVESEVHVTVGVVRYEIEGRARAGGASSFLADRVEEDGEVRVFIEHNDNFRLPANPETPVIMIGPGTGIAPFRAFMQQRAADGAQGKNWLFFGNPHFTEDFLYQVEWQSYVKEGLLTRIDLAWSRDQQQKIYVQDKLREQGAELWRWINDGAHIYVCGDANRMAKDVENTLLEVIAEYGAMDAEAADEFLSELRVERRYQRDVY

SEQ ID NO: 1070 - DNA, 1794 bp, Mannheimia succiniciproducens
  CDS (1)..(1794): transl_table=11
atgtcaaacacaacaaaccctttaccgccggaaacggaacagttgctggcaaagttaaatccaatccaactggcgtggctttccggttatgcctgggctaaggcacagggtgaggatgcaggtacaaatgtgacaaataaaaatgcggcttcaacccttgtaactgaagataaacctttaaatgtgacagtgctgtccgcatcgcaaaccggcaatgccaatggggtggcgaatcagttggcggaacgtttaaaagcggaaggcgtcaatgtaacccgcaaagcgctgaaagagtataaagccaaaaccattggcgatgaacagtttgtcctattggttacctcaacacagggcgaaggcgaagcgccggaagaaggcgtgccgctttataaattgttgcatggtaaaaaagcaccgaatttagccaaccttgagtttgcagtattaggtttaggcgatacttcatatcctaatttctgccaggcgggaaaagatttcgacaaacgttttgaagaactcggtgcgaaacgcttactggcacgtgccgacgcggatcttgatttcaaatcgaccgccgataaatggatccaggatgtggttgaggcggttaaagccaaatccgccgtttcggcttccgttgtcgcatctgttgtaagcgcaagctcggcgcaaagtgcggttaattacagcaaagaaaatccatatacggcgaaacttatcaccaatcagaaaattaccgcccgcgattcggcaaaagatgtgcgccatttcgaatttgatttatccggttccggtttgcaatacaaagcgggtgatgcactgggggtatgggcggaaaatgatcccgatttaattaacgaagtactggggttattgaaaatccaacctgacgaatccgttcaattaaacggcaaaagcttggatattcatggcgcacttttaagccgtctggaattaacgcaaaacaccccggcttttgtgaaaggctatgctcaattagcaaataacaaaaagttaaccgcattagtgagtagcgataaaaaactggcggattatgtaaatgacacaccgattgttgacgtattgcacgactttccggccaaaattagtgcgcagcaatttgctgatttattacgtccgttaacgccgcgcttatattccatttcctcttcgccggaagaagtgggcgaagaagtgcatttaagtgtcggcgtggtacgtttcgaacatgaagggcgggcgagaacaggcgttgcttccggctttttagcggatcgcgtggaagaagacggcgaagtgaaaatctttgtggaaccgaatgataatttccgcctgccgcaggataaatcgaaaccgatcattatgattggttcgggaacaggtattgcgccgttccgtgcattcctgcaacaacgccaggcagaggaggccgagggcaaaaactggctgattttcggtaatcagcattttgcgacggatttcctatatcaggcggaatggcaacaattcgtcaaggacggctatctgcataaatacgattttgcgtggtcgcgggatcaggcggagaaaatttatgtgcaggataaaattcgtgaaaaatccaccgcactttggcaatggctgcaggagggcgcacatgtttatgtatgcggcgatgcctctaaaatggcaaaagacgtggaaaacgctttgctggaagtgatcgcacgggaaggcaaattaacgccggaggatgcggaagaatatttaaatgacttgcgcgaagataaacgctatcaacgtgatgtgtattag

SEQ ID NO: 1071 - protein, 597 aa, Mannheimia succiniciproducens
MSNTTNPLPPETEQLLAKLNPIQLAWLSGYAWAKAQGEDAGTNVTNKNAASTLVTEDKPLNVTVLSASQTGNANGVANQLAERLKAEGVNVTRKALKEYKAKTIGDEQFVLLVTSTQGEGEAPEEGVPLYKLLHGKKAPNLANLEFAVLGLGDTSYPNFCQAGKDFDKRFEELGAKRLLARADADLDFKSTADKWIQDVVEAVKAKSAVSASVVASVVSASSAQSAVNYSKENPYTAKLITNQKITARDSAKDVRHFEFDLSGSGLQYKAGDALGVWAENDPDLINEVLGLLKIQPDESVQLNGKSLDIHGALLSRLELTQNTPAFVKGYAQLANNKKLTALVSSDKKLADYVNDTPIVDVLHDFPAKISAQQFADLLRPLTPRLYSISSSPEEVGEEVHLSVGVVRFEHEGRARTGVASGFLADRVEEDGEVKIFVEPNDNFRLPQDKSKPIIMIGSGTGIAPFRAFLQQRQAEEAEGKNWLIFGNQHFATDFLYQAEWQQFVKDGYLHKYDFAWSRDQAEKIYVQDKIREKSTALWQWLQEGAHVYVCGDASKMAKDVENALLEVIAREGKLTPEDAEEYLNDLREDKRYQRDVY

SEQ ID NO: 1072 - DNA, 1815 bp, Neisseria meningitidis serogroup A
  CDS (1)..(1815): transl_table=11
atgagtgaacacgatatgcagaacacaaatccgccattaccgcctatgccgcccgaaatcacgcagctcctgtcggggctggacgcggcacaatgggcgtggctgtccggctacgcttgggcaaaagcaggaaacggggcatctgcaggactgcccgcgcttcagacggcattgccgacggcagaacctttttccgtaaccgtcctttccgcctcgcaaaccggcaatgcgaaatccgttgccgacaaagcggcggacagcctggaagccgccggcatccaagtcagtcgcgccgaactgaaagactataaggcgaaaaacatcgccggcgaacgccgcctgctgctggttacctccacccaaggcgaaggcgaaccgccggaagaagccgtcgtgctgcacaaactgctgaacggcaaaaaagccccgaaattggacaaactccaatttgccgtactgggtttgggcgacagctcctatccgaatttctgccgggcgggcaaagatttcgacaaacgttttgaagaattgggcgcaaaacgcctgctcgaacgcgttgatgcggatttggactttgccgccgccgcagacggatggacagataatatcgccgcactcttaaaagaagaagccgcaaaaaaccgggcaacgcccgcgccgcagacaacgccccccgccggccttcagacggcaccggatggcaggtactgcaaggcagacccctttcccgccgccctgctggccaatcagaaaatcaccgcccgccaatccgataaagacgtgcgccacatcgaaatcgatttgagcggttcggatttgcactacctcccgggcgacgcgctcggcgtttggtttgacaacgatccggcactggtcagggaaatcctagacctgctcggcatcgatcaggcaacggaaatacaggcgggcggaaaaaccctgccggttgcctccgcactgttatcccattttgaactcacgcaaaacacccccgcctttgtcaaaggctatgccccgttcgccgatgatgacgaactcgaccgtattgctgccgacaacgccgttttgcaaggctttgtgcaaagcacgccgattgccgatgtgctgcaccgcttcccggcaaaactgacagcggaacaattcgccggcctactgcgcccgcttgcgccgcgcctgtattcgatttcctcgtcgcaggcggaagtgggggacgaagtgcacctgaccgtcggcgcggtgcgtttcgaacacgaagggcgcgccagggcgggcggcgcatcgggtttccttgccgaccggctggaagaggacggcacggtgcgcgtgtttgtggaacgcaacgacggcttcaggctgcccgaagacagccgcaagccgattgtgatgatcggctcgggcaccggcgtcgcaccgttccgcgctttcgtccaacaacgtgccgcagaaaatgcggaaggcaaaaactggctgtttttcggcaatccgcattttgcccgtgattttctctatcaaaccgaatggcagcagtttgccaaagacggcttcctgcacagatacgatttcgcctggtcgcgcgatcaggaagaaaaaatctatgtgcaggacaaaatccgcgaacaggcggaaggactttggcaatggctgcaggaaggcgcgcatatctatgtgtgcggcgatgcggcaaaaatggcaaaagacgtggaagccgccttgctggatgtgattatcggggcaggacatttggacgaagagggcgcagaagaatatttggatatgctgcgcgaagaaaaacgctatcagcgtgatgtttattga

SEQ ID NO: 1073 - protein, 604 aa, Neisseria meningitidis serogroup A
MSEHDMQNTNPPLPPMPPEITQLLSGLDAAQWAWLSGYAWAKAGNGASAGLPALQTALPTAEPFSVTVLSASQTGNAKSVADKAADSLEAAGIQVSRAELKDYKAKNIAGERRLLLVTSTQGEGEPPEEAVVLHKLLNGKKAPKLDKLQFAVLGLGDSSYPNFCRAGKDFDKRFEELGAKRLLERVDADLDFAAAADGWTDNIAALLKEEAAKNRATPAPQTTPPAGLQTAPDGRYCKADPFPAALLANQKITARQSDKDVRHIEIDLSGSDLHYLPGDALGVWFDNDPALVREILDLLGIDQATEIQAGGKTLPVASALLSHFELTQNTPAFVKGYAPFADDDELDRIAADNAVLQGFVQSTPIADVLHRFPAKLTAEQFAGLLRPLAPRLYSISSSQAEVGDEVHLTVGAVRFEHEGRARAGGASGFLADRLEEDGTVRVFVERNDGFRLPEDSRKPIVMIGSGTGVAPFRAFVQQRAAENAEGKNWLFFGNPHFARDFLYQTEWQQFAKDGFLHRYDFAWSRDQEEKIYVQDKIREQAEGLWQWLQEGAHIYVCGDAAKMAKDVEAALLDVIIGAGHLDEEGAEEYLDMLREEKRYQRDVY

SEQ ID NO: 1074 - DNA, 1815 bp, Neisseria meningitidis serogroup B
  CDS (1)..(1815): transl_table=11
atgagtgaacacgatatgcagaacacaaatccgccattaccgcctctgccgcccgaaatcacgcagctcctgtcggggctggacgcggcacaatgggcgtggctgtccggctacgcttgggcaaaagcaggaaacggggcatctgcaggactgcccgcgcttcagacggcattgccggcggcagaacctttttccgtaaccgtcctttccgcctcgcaaaccggcaatgcgaaatccgttgccgacaaagcggcggacagcctggaagccgccggcatccaagtcagtcgcgccgaactgaaagactataaggcgaaaaacatcgccggcgaacgccgcctgctgctggttacctccacccaaggcgaaggcgaaccgccgaaagaagccgtcgtgctgcacaaactgctgaacggcaaaaaagccccgaaattggacaaactccaatttgccgtactgggtttgggcgacagttcctatccgaatttctgtcaggcaggtaaagatttcgaccggcgttttgaagaattgggcgcaaaacggctgctcgaacgcgttgatgcggatttggactttaccgcctccgcaaacgcctggacagataatatcgccgcactcttaaaagaagaagccgcaaaaaaccgggcaacgcccgcgccgcagacaacgccccccgccggccttcagacggcaccggatggcaggtactgcaaggcagccccctttcccgccgccctgctggccaatcagaaaatcaccgcccgccaatccgataaagacgtgcgccacatcgaaatcgatttgagcggttcggatttgcactacctcccgggcgacgcgctcggcgtttggtttgacaacgatccggcactggtcagggaaatcctagacctgctcggcatcgatccggcaacggaaatacaggcgggcggaaagatgatgccggttgcgcgcgcactttcatctcatttcgaactcacgcaaaacactccggctttcgtcaaaggctatgccgcgttcgcccattatgaagaactcgataaaatcattgccgataacgccgttttgcaggatttcgtgcaaaacacgcctattgtcgatgtgctgcaccgcttcccggcaagcctgacggcagaacaattcatccgtttactgcgtccgcttgcaccccgtttgtattcgatttcttcagcacaggcggaagtgggcgatgaagtgcatttaactgtcggcgtggttcgttttgaacacgaaggccgcgccagaacgggcggcgcatcgggtttccttgccgaccggctggaagaggacggcacggtgcgcgtgtttgtggaacgcaacgacggcttcaggctgcccgaagacagccgcaagccgattgtgatgatcggctcgggcaccggcgtcgcaccgttccgcgctttcgtccaacaacgtgccgcagaaaatgcggaaggcaaaaactggctgattttcggcaatccgcattttgcccgtgattttctctatcaaaccgaatggcagcagtttgccaaagacggcttcctgcacaggtacgatttcgcctggtcccgcgatcaggaagaaaaaatctatgtgcaggacaaaatccgcgaacaggcggaaggactttggcaatggctgcaggaaggcgcgcatatctatgtgtgcggcgatgcggcaaaaatggcaaaagacgtggaagccgccttgctggatgtgattatcggggcaggacatttggacgaagagggcgcagaagaatatttggatatgctgcgcgaagaaaaacgctatcagcgtgatgtttattga

SEQ ID NO: 1075 - protein, 604 aa, Neisseria meningitidis serogroup B
MSEHDMQNTNPPLPPLPPEITQLLSGLDAAQWAWLSGYAWAKAGNGASAGLPALQTALPAAEPFSVTVLSASQTGNAKSVADKAADSLEAAGIQVSRAELKDYKAKNIAGERRLLLVTSTQGEGEPPKEAVVLHKLLNGKKAPKLDKLQFAVLGLGDSSYPNFCQAGKDFDRRFEELGAKRLLERVDADLDFTASANAWTDNIAALLKEEAAKNRATPAPQTTPPAGLQTAPDGRYCKAAPFPAALLANQKITARQSDKDVRHIEIDLSGSDLHYLPGDALGVWFDNDPALVREILDLLGIDPATEIQAGGKMMPVARALSSHFELTQNTPAFVKGYAAFAHYEELDKIIADNAVLQDFVQNTPIVDVLHRFPASLTAEQFIRLLRPLAPRLYSISSAQAEVGDEVHLTVGVVRFEHEGRARTGGASGFLADRLEEDGTVRVFVERNDGFRLPEDSRKPIVMIGSGTGVAPFRAFVQQRAAENAEGKNWLIFGNPHFARDFLYQTEWQQFAKDGFLHRYDFAWSRDQEEKIYVQDKIREQAEGLWQWLQEGAHIYVCGDAAKMAKDVEAALLDVIIGAGHLDEEGAEEYLDMLREEKRYQRDVY

SEQ ID NO: 1076 - DNA, 1815 bp, Neisseria meningitidis serogroup C
  CDS (1)..(1815): transl_table=11
atgagtgaacacgatatgcagaacacaaatccgccattaccgcctctgccgcccgaaatcacgcagctcctgtcggggctggacgcggcacaatgggcgtggctgtccggctacgcttgggcaaaagcaggaaacggggcatccgcagggctgcccgcgcttcagacggcattgccggcggcagaacctttttccgtaaccgtcctttccgcctcgcaaaccggcaatgcgaaatccgttgccgacaaagcgtcggacagcctggaagccgccggcatccaagtcaggcgcgccgaactgaaagactataaggcgaaaaacatcgccgacgaacgccgcctgctgctggttacgtccacccagggcgaaggcgaaccgccggaagaagccgtcgtgctgcacaaactgctgaacggcaaaaaagccccgaaattggacaaactccaatttgctgtactgggtttgggcgacagttcctatccgaatttctgccgggcgggcaaagatttcgaccggcgttttgaagaattgggcgcaaaacgcctgctcgaacgcgttgatgcggatttggactttgccgccgccgcagacggatggacaggccgcattgtcgcgcgcttaaaagaagaagccgcaaaaaaccgggcaacgcccgcgccgcagacaacgccccccgccggccttcagacggcaccggatggcaggtactgcaaggcagacccctttcccgccgccctgctggccaatcagaaaatcaccgcccgccaatccgataaagacgtgcgccacatcgaaatcgatttgagcggttcggatttgcactacctcccgggcgacgcgctcggcgtttggtttgacaacgatccggcactggtcagggaaatcctagacctgctcggcatcgatccggcaacggaaatacaggcgggcggaaaaaccctgccggttgcctccgcactgttatcccattttgaactcacgcaaaacacccccgcctttgtcaaaggctatgccccgttcgccgatgatgacgaactcgaccgtattgctgccgacaacgccgttttgcaaggctttgtgcaaagcacgccgattgccgatgtgctgcaccgcttcccggcaaaactgacggcggaacaattcgccggcctactgcgcccgcttgcgccgcgcctgtattcgatttcctcgtcgcaggcggaagtgggggacgaagtgcacctgaccgtcggcgcggtgcgtttcgaacacgaagggcgcgccagggcgggcggcgcatcgggtttccttgccgaccggctggaagaggacggcacggtgcgcgtgtttgtggaacgcaacgacggcttcaggctgcccgaagacagccgcaagccgattgtgatgatcggctcgggcaccggcgtcgcaccgttccgcgccttcgtccaacaacgtgccgcagaaaatgcggaaggcaaaaactggctgattttcggcaatccgcattttgcccgtgattttctctatcaaaccgaatggcagcagtttgccaaagacggtttcctgcacaggtacgatttcgcctggtcccgcgatcaggaagaaaaaatctatgtgcaggacaaaatccgcgaacaggcggaaggactttggcaatggctgcaggaaggcgcgcatatctatgtgtgcggcgatgcggcaaaaatggcaaaagacgtggaagccgccttgctggatgtgattatcggggcaggacatttggacgaagagggcgcagaagaatatttggatatgctgcgcgaagaaaaacgctatcagcgtgatgtttattga

SEQ ID NO: 1077 - protein, 604 aa, Neisseria meningitidis serogroup C
MSEHDMQNTNPPLPPLPPEITQLLSGLDAAQWAWLSGYAWAKAGNGASAGLPALQTALPAAEPFSVTVLSASQTGNAKSVADKASDSLEAAGIQVRRAELKDYKAKNIADERRLLLVTSTQGEGEPPEEAVVLHKLLNGKKAPKLDKLQFAVLGLGDSSYPNFCRAGKDFDRRFEELGAKRLLERVDADLDFAAAADGWTGRIVARLKEEAAKNRATPAPQTTPPAGLQTAPDGRYCKADPFPAALLANQKITARQSDKDVRHIEIDLSGSDLHYLPGDALGVWFDNDPALVREILDLLGIDPATEIQAGGKTLPVASALLSHFELTQNTPAFVKGYAPFADDDELDRIAADNAVLQGFVQSTPIADVLHRFPAKLTAEQFAGLLRPLAPRLYSISSSQAEVGDEVHLTVGAVRFEHEGRARAGGASGFLADRLEEDGTVRVFVERNDGFRLPEDSRKPIVMIGSGTGVAPFRAFVQQRAAENAEGKNWLIFGNPHFARDFLYQTEWQQFAKDGFLHRYDFAWSRDQEEKIYVQDKIREQAEGLWQWLQEGAHIYVCGDAAKMAKDVEAALLDVIIGAGHLDEEGAEEYLDMLREEKRYQRDVY

SEQ ID NO: 1078 - DNA, 1803 bp, Photorhabdus luminescens subsp
  CDS (1)..(1803): transl_table=11
atgagcataaaaccaccttcaatttcacttcttccggtttcacctgaacagctagtgcgtttgcaatcggagattggggatttttcaccaactcaattagcctggttgtctggttatttttggggaatggtgaatcaacaaccacaggttcaggctgtggttccggcggttccggcacaggagacgattacattaatttcagcttcacaaaccggtaatgctcgtcgtttagctgagcagctccgtgaggatttgttggcacagaaactcaatgtcaatctattcaatgccggtgattataaattcaaacaaattgctcaagaaaagatactgataattattgcttctacccaaggtgaaggagaacctgctgaggaagcggttgcattgtataaatatctctattctaaaaaggtgccgaagctgaatgatacggtatttgcggtttttggtctgggtgatacctcttatgagcgattttgccaggctggaaaagatttcgataatcgtctgaatgaattaggcgctcaacggcttctggagcgtgtagatggtgatgtcgaatatcagcaggttgcggatcagtggcgtaaacaattaactggaatcctgaaacagcgtattccaactgagacaggaactgagattacttctgcacaggacagatcggtaaatgaagttttttcaacttcttatactaaacaggcaccattgactgcggctttagctacttgccagaaaataacgggtcgtggttctgataaagatgttcgccatattgaaattgatctgggtgattcaggtttgcgttatcagccaggtgatgctttgggtgtttggtttgaaaatgatccggagctggtggatgaagtgttgaatttgctctggttgcagggaacagaacaagttgaggttaatggtcagaaattgtcattgagagaagcgctgatcagccatgttgagctaacccaaaataccagtgtgattgtggaaaaatacgccgttctcgcgaaagatgaaaaattactttctttgattgctgataaacaagcattacaacaatacgctcacaacaagccgattgccgatatgataagggaagcggcttctcaaccagaggcgcagcaatttattgatttgctacggcctttgacaccaagactttattcaatttcttcttctcaggcagaaatggaaaatgaagttcatcttacagttggtgtggttcgttatgaaattgacggacgggcccgcactggcggtgcatccggctatctggcagatcgcttacaggaaaatagtgatattcgtatttttattgagcataacgataattttcgtctgcctgccgatccacgcacgcctgtcatcatgattgggccgggaaccggaattgcaccatttcgggcatttatgcagcaaagggaagctgatggcgctgaagggaaaaattggctgttctttggtaatccacattttactgaagattttctctatcaagtggagtggcagcgttatgtcaaagatggcctgttaacccgtattgatctggcatggtcccgtgatcagcagcataaaatttatgtccaagacaaactgcgtgagcagggtgaagcggtatggtgctggattaaggaaggtgcacatctgtatgtgtgtggtgatgcaaaccgcatggcaaaagatgtggaacatgcgttattggatattattgctgagcatggcggcatggataccgaacaggcagatgaattcttaagtgaactgcgctttgagcgccgttatcagagggatgtgtactaa

SEQ ID NO: 1079 - protein, 600 aa, Photorhabdus luminescens subsp
MSIKPPSISLLPVSPEQLVRLQSEIGDFSPTQLAWLSGYFWGMVNQQPQVQAVVPAVPAQETITLISASQTGNARRLAEQLREDLLAQKLNVNLFNAGDYKFKQIAQEKILIIIASTQGEGEPAEEAVALYKYLYSKKVPKLNDTVFAVFGLGDTSYERFCQAGKDFDNRLNELGAQRLLERVDGDVEYQQVADQWRKQLTGILKQRIPTETGTEITSAQDRSVNEVFSTSYTKQAPLTAALATCQKITGRGSDKDVRHIEIDLGDSGLRYQPGDALGVWFENDPELVDEVLNLLWLQGTEQVEVNGQKLSLREALISHVELTQNTSVIVEKYAVLAKDEKLLSLIADKQALQQYAHNKPIADMIREAASQPEAQQFIDLLRPLTPRLYSISSSQAEMENEVHLTVGVVRYEIDGRARTGGASGYLADRLQENSDIRIFIEHNDNFRLPADPRTPVIMIGPGTGIAPFRAFMQQREADGAEGKNWLFFGNPHFTEDFLYQVEWQRYVKDGLLTRIDLAWSRDQQHKIYVQDKLREQGEAVWCWIKEGAHLYVCGDANRMAKDVEHALLDIIAEHGGMDTEQADEFLSELRFERRYQRDVY

SEQ ID NO: 1080 - DNA, 1818 bp, Photobacterium profundum
  CDS (1)..(1818): transl_table=11
atgttacttaaggaattatcggctgtagccagcccactcaatgatcaacaaatagatcagttacaacaagccgcggcagaatcatcaccacagcagcttgcatggataagtggttacttctgggggctaagtcaaactcaggcttcaactcatcttcaatctgtatcacagcccggcgttgttgccgctgcacaacctgctggtaaattaaccattatctatgcgtcacaaacgggtaatgctaaaggggttgccattgcgttaaaggaagaggcgactgctgcgggtattgctgttgagttagtatcagctggtgattacaaaggtaaaaacttcgcgaaagaaacccatgtcattcttattgcttctacccatggtgaaggcgaagcacctgatgatgcgatcgacttacatgaattcttacagtcgaagaaagcccctaaactgcctaacctgcaatatgccgttattggcttgggtgattcaagttatgagttcttctgccaaacggcgaaagactttgatagttacttaagcaagcttggcgctcaaccgatgttagagcgcttagattgtgatgttgactatgatgcacctgcagcggaatggcgagtgaaggcgttagccaaagccaaagagacattatcaacgggtgatgccgatgttgtgccgctgcctattactcaatctcaacaggccgtgtcgcaatactccaagcagaatccatatgaagcgacactgctgactagccagaagatcactggtcgtcattcaggtaaagatgttcgccatattgaaattgatttagaaggttcaggcttaacctatcaagcgggtgatgcgctaggcgtgtggtatgaaaatgatcctgaattagcgttagccattgttgctaaagtgggattaagcggtgaagagctgattgatgttgatggtgaacatatccaactcgtaacggctttagtcagtcaatatgaaattacttccgcaaacccacagttggtgactaaatttgccgcgctttctgagagtaaaaagttagaaaagctggtagcagataaaaataagcttcgtgaatactcgggcaatactcaaatcattgatgtgttagctgaaaagaaaacccaattaagtgctgaacaacttattagtttattacgtcgtttaacgcctcgtttatattctatttcttctagtcaggaagaggtgggtgaagaagttcacttaactgttggcgttgttgaattcgaaaaaggtgaagaaagccgtcaaggtggcgcttctagcttcttatctcatcgtctggaagaaggcgcagcggtgaaagtttttgttgaagaaaacaataattttaaactgcctgcagatgataatactccggtcattatgattggtcctggtaccggtatcgcccccttccgtgcatttgtacaagaacgagacaaccgagaagctgaaggcaaaaattggttattctttggtgaccgtacatttactgatgatttcttgtatcaagtcgaatggcaaaagtacctgaaatcaggcgtggtacagcaacttgatgtggcattcagtcgtgaccaagttgagaaagtatacgtacaacaccgtgtgttagaacatgccgagcaggtatggcaatggttacaagaaggtgcgcatgtttatgtttgtggtgatatgaaccatatggcgaaagatgtacacgacgcgttactgaccgtgattgaacagcaagggaagcaaagccgtgagcaggctgaacaatatttaaatgagctacgtaagagcaagcgttatcaaaaggatgtgtactaa

SEQ ID NO: 1081 - protein, 605 aa, Photobacterium profundum
MLLKELSAVASPLNDQQIDQLQQAAAESSPQQLAWISGYFWGLSQTQASTHLQSVSQPGVVAAAQPAGKLTIIYASQTGNAKGVAIALKEEATAAGIAVELVSAGDYKGKNFAKETHVILIASTHGEGEAPDDAIDLHEFLQSKKAPKLPNLQYAVIGLGDSSYEFFCQTAKDFDSYLSKLGAQPMLERLDCDVDYDAPAAEWRVKALAKAKETLSTGDADVVPLPITQSQQAVSQYSKQNPYEATLLTSQKITGRHSGKDVRHIEIDLEGSGLTYQAGDALGVWYENDPELALAIVAKVGLSGEELIDVDGEHIQLVTALVSQYEITSANPQLVTKFAALSESKKLEKLVADKNKLREYSGNTQIIDVLAEKKTQLSAEQLISLLRRLTPRLYSISSSQEEVGEEVHLTVGVVEFEKGEESRQGGASSFLSHRLEEGAAVKVFVEENNNFKLPADDNTPVIMIGPGTGIAPFRAFVQERDNREAEGKNWLFFGDRTFTDDFLYQVEWQKYLKSGVVQQLDVAFSRDQVEKVYVQHRVLEHAEQVWQWLQEGAHVYVCGDMNHMAKDVHDALLTVIEQQGKQSREQAEQYLNELRKSKRYQKDVY

SEQ ID NO: 1082 - DNA, 1800 bp, Salmonella arizonae
  CDS (1)..(1800): transl_table=11
atgacgacacaggctccactgacagggttgcttccgcttaatccgcagcaactggcgcgcctccaggccgcgacaactgactttactcccgaacagcttgcctgggtctccggctatttttggggagttttgaatccgcgttcaggcgctgacgccgtagcgcgtgcgccagagagggggagccttgggattacgcttatctccgcttcgcaaaccggcaatgcgcgtcgtgtggctgaagctctgcgtgatgatctgctggcagtcaaccttaacgtgaatctggtgaatgccggcgactacaaattcaaacagatcgcctgtgaaaaactgctggtggtggtgacgtcaacccaaggggaaggcgagccgccggaagaggccgtcgcgctgcataagttcctgttctccaaaaaagcgccaaggcttaacaacaccgctttcgctgtttttagcctgggcgatacgtcatatgaatttttctgtcaggccggtaaagattttgacaataagctggcggaacttggtggtgaacgcttgctggatcgcgtggacgccgacgtggaataccagacggtcgccgcacaatggcgcgcgcgcatagttgacgtcttaaaatcccgcacgccagtgacgacgcctgtaccgtccgttgtcagcggcgcggtaaacgagatccacaccagcccctacaccaaagaagcgcctctgcgcgcctcgctctcggtgaatcagaaaatcactggccgtaactcggaaaaagacgttcgtcatatcgagattgatttaggcgattccggtctatgttatcagccgggcgatgcgctgggtgtctggtatcagaacgatcccgcactggtcaaagagatcgtggaactgttgtggctgaaaggcgatgaacctgttgccgttgacggtaaactactgccgctaacggaagcgctacagtggcatttcgaactgacggtcaacaccgcaggtattgttgaaaattatgccacgctgacgcgtagtgagtttctattgccgttagttggtgacaaagcgcagttacagcactacgccgccgccacgccaattgccgatatgttgcgcttctccccgtcacagttggatgctgacgcgttagtcggcctgctgcgtccgctaacgccgcgtttgtactctattgcgtcgtcacaggcggaggtcgagaatgaagttcatctcaccgtaggcgtcgtacgttatgacattgaagggcgagcacgggcaggcggcgcttccagcttcctggccgatcgcgtggacgacgagggcgaagtacgcgtgttcatcgaacataacgacaacttccgtctgccgacgaatccggaaacgccgatcatcatgattggttctggcacgggcattgccccgtttcgcgcctttatacaacagcgcgccgcagacgaagcgtcgggtaagaactggctgtttttcggtaatccgcattttaccgaagattttctctaccaggtggagtggcagcgctacgtgaaagagggcttgttaagccgtatcgatctcgcctggtcgcgcgatcaaaaagaaaaaatatacgtccaggacaagttacgtgaacggggcgccgagctgtggcgctggatcaatgacggcgcgcatatttatgtctgtggcgatgcgaatcgcatggcgaaagacgttgagcaggcgttattggaagtaatagttgaattcggcggcatggacctcgaatcggcagacgaatatttaagtgagctgcgcgtagcgcgccgttatcagcgagatgtctactaa

SEQ ID NO: 1083 - protein, 599 aa, Salmonella arizonae
MTTQAPLTGLLPLNPQQLARLQAATTDFTPEQLAWVSGYFWGVLNPRSGADAVARAPERGSLGITLISASQTGNARRVAEALRDDLLAVNLNVNLVNAGDYKFKQIACEKLLVVVTSTQGEGEPPEEAVALHKFLFSKKAPRLNNTAFAVFSLGDTSYEFFCQAGKDFDNKLAELGGERLLDRVDADVEYQTVAAQWRARIVDVLKSRTPVTTPVPSVVSGAVNEIHTSPYTKEAPLRASLSVNQKITGRNSEKDVRHIEIDLGDSGLCYQPGDALGVWYQNDPALVKEIVELLWLKGDEPVAVDGKLLPLTEALQWHFELTVNTAGIVENYATLTRSEFLLPLVGDKAQLQHYAAATPIADMLRFSPSQLDADALVGLLRPLTPRLYSIASSQAEVENEVHLTVGVVRYDIEGRARAGGASSFLADRVDDEGEVRVFIEHNDNFRLPTNPETPIIMIGSGTGIAPFRAFIQQRAADEASGKNWLFFGNPHFTEDFLYQVEWQRYVKEGLLSRIDLAWSRDQKEKIYVQDKLRERGAELWRWINDGAHIYVCGDANRMAKDVEQALLEVIVEFGGMDLESADEYLSELRVARRYQRDVY

SEQ ID NO: 1084 - DNA, 1800 bp, Salmonella choleraesuis
  CDS (1)..(1800): transl_table=11
atgacgacaccggctccactgactgggttgcttccgcttaatccggagcaactggcgcgccttcaggccgcgacaaccgaccttactcccgaacagcttgcctgggtctccggctatttttggggcgtactgaacccgcgctcaggcgctgttgccgtcacgcctgttcctgagcggaagatgccgggggttacgcttatctccgcttcgcaaaccggcaatgcgcgtcgtgtggcggaagcgctgcgtgatgatctgctggcggccaaccttaatgtgacactggtgaacgccggcgactacaaattcaaacagattgccagtgaaaaactgttggtgatagtgacgtccacccagggagaaggcgagccgccggaagaggccgtcgcgctgcataaattcctgttctccaaaaaagcgccgaaactggaaaacaccgcttttgccgtgtttagcctcggcgacacctcttatgaatttttctgccagtccggaaaagatttcgacagcaaactggcggaactgggcggtgaacgtctgctcgaccgtgtcgatgctgacgttgaatatcaggcagctgccagcgaatggcgcgcccgcgtggttgatgtgctgaagtctcgcgcacctgtcgcggcaccttcgcaatccgtcgctactggcgcggtaaacgacatccacaccagcccctatactaaagacgcgccgctgatcgcgaccctctccgtgaatcagaaaatcaccggtcgcaactcggaaaaagatgtgcgtcatattgagattgatttaggcgactccggcctgcgctatcagccgggcgatgcgctgggcgtctggtatcagaacgatccggctctggtgaaggagctggttgagttgctgtggctgaaaggcgatgagccggtgacggttgatggtaaaaccctgccgctcgccgaagcgctggagtggcacttcgagctgacggtgaataccgccaacattgttgagaactacgcgaccctgacgcgcagtgagtcgctgttgccattagtgggcgacaaagcgcagctccagcactacgccgcgaccacgcccattgttgatatggtgcgtttctctccggcgcagctcgacgctgaagcattaatcggcctgctgcgtccgctgacgccgcgtctgtactccatcgcctccgcgcaggcggaagtcgaaagcgaagtacacgtaaccgtcggcgtcgtgcgctacgatattgaaggccgcgcccgcgcgggtggtgcttccagcttcctcgccgaccgcgtggaagaagagggcgaagtgcgtgtgtttattgaacacaacgacaacttccgcctgccagctaacccgcagacgccggtcattatgattggccccggcaccggcatcgcgccgttccgcgcctttatgcaacagcgtgcggcggaaggggcggaaggcaagaactggctgttcttcggtaacccgcacttcaccgaagacttcctttatcaggttgaatggcagcgttacgtgaaagaaggcatgctgaaccggatcgatctggcctggtcccgcgatcaaaaagaaaaaatctacgtacaagacaaactgcgcgaacagggcgcggagctgtggcgctggattaatgacggtgcccacatttatgtctgcggcgacgccaggcgcatggccgcagatgtcgaaaaagcgttgctggaagtgattgctgagttcggtgcaatggacatcgaagcggcggatgaatttttaagtgagctgcgcgtagagcgccgttatcagcgagatgtctactaa

SEQ ID NO: 1085 - protein, 599 aa, Salmonella choleraesuis
MTTPAPLTGLLPLNPEQLARLQAATTDLTPEQLAWVSGYFWGVLNPRSGAVAVTPVPERKMPGVTLISASQTGNARRVAEALRDDLLAANLNVTLVNAGDYKFKQIASEKLLVIVTSTQGEGEPPEEAVALHKFLFSKKAPKLENTAFAVFSLGDTSYEFFCQSGKDFDSKLAELGGERLLDRVDADVEYQAAASEWRARVVDVLKSRAPVAAPSQSVATGAVNDIHTSPYTKDAPLIATLSVNQKITGRNSEKDVRHIEIDLGDSGLRYQPGDALGVWYQNDPALVKELVELLWLKGDEPVTVDGKTLPLAEALEWHFELTVNTANIVENYATLTRSESLLPLVGDKAQLQHYAATTPIVDMVRFSPAQLDAEALIGLLRPLTPRLYSIASAQAEVESEVHVTVGVVRYDIEGRARAGGASSFLADRVEEEGEVRVFIEHNDNFRLPANPQTPVIMIGPGTGIAPFRAFMQQRAAEGAEGKNWLFFGNPHFTEDFLYQVEWQRYVKEGMLNRIDLAWSRDQKEKIYVQDKLREQGAELWRWINDGAHIYVCGDARRMAADVEKALLEVIAEFGAMDIEAADEFLSELRVERRYQRDVY

SEQ ID NO: 1086 - DNA, 1800 bp, Salmonella paratyphi A
  CDS (1)..(1800): transl_table=11
atgacgacaccggctccactgactgggttgcttccgcttaatccggagcaactggcgcgccttcaggccgcgacaaccgaccttactcccgaacagcttgcctgggtctccggctatttttggggcgtactgaacccgcgctcaggcgctgttgccgtcacgcctgctcctgaggggaagatgccgggagttacgcttatctccgcttcgcaaaccggcaatgcgcgtcgtgtggcggaagcgctgcgtgatgatctgctggcggccaaccttaatgtgacactggtgaacgccggcgattacaaattcaaacagattgccagtgaaaaactgctggtgatagtgacgtccacccagggagaaggcgagccgccggaagaggccgtcgcgctgcataagttcctgttctcgaaaaaagcgctgaaactggaaaacaccgcttttgccgtgtttagcctcggcgacacctcttatgaatttttctgccagtccggaaaagatttcgacagcaaactggcggaactgggcggtgaacgcctgctcgaccgtgtcgatgctgacgttgaatatcaggcagctgccagcgaatggcgcgcccgcgtggttgatgttctgaagtcccgcgcacctgtcgcggcaccttcgcaatccgtcgctactggcgcggtaaacgacatccacaccagcccctataccaaagacgcgccgctgaccgcgaccctctccgtgaatcagaaaatcaccggtcgcaactcggaaaaagacgttcgtcatattgagattgatttaggcgactccggtctgcgttaccagccgggcgatgcgctgggcgtctggtatcagaacgatccggctctggtgaaggaactggttgagttgctgtggctgaaaggcgatgagccggtgacggttgatggtaaaaccctgccgctcgccgaagcgctggagtggcacttcgagctgacggtgaataccgccaacattgttgagaactacgcgaccctgacgcgcagtgagtcgctgttgccattagtgggcgacaaagcgcagctccagcactacgccgcgaccacgcccattgttgatatggtgcgtttctctccggcgcagctggatgctcaggcgctaatcggcctgctgcgtccgctgacgccgcgtctgtactccatcgcctccgcgcaggcggaagtggagagcgaagtgcatatcaccgttggcgtggttcgttatgacattgaaggccgcgcccgcgccggtggcgcttccagcttcctcgccggccgcgtggaagaagagggcgaagtgcgcgtgtttattgaacacaacgataatttccgcctgccagcgaatccgcagactccggtgattatgattggcccaggtacgggtatcgcgccgttccgcgcctttatgcagcaacgcgccgccgacggtgcggaaggcaagaactggctgttcttcggtaacccgcacttcaccgaagacttcctttatcaggttgaatggcagcgttacgtgaaagaaggcgtgctgaaccggatcgatctggcctggtcccgcgatcaaaaagaaaaaatctacgtacaagacaaactgcgcgaacagggcgcggagctgtggcgctggatcaatgacggtgcccacatttatgtctgcggcgacgccaggtgcatggccgtagatgtcgaaaaagcattgctggaagtgatcgctgaattcggtgcaatggacatcgaatcggcagatgaatatttaagtgagctgcgcgtagagcgccgttatcagcgagatgtctactaa

SEQ ID NO: 1087 - protein, 599 aa, Salmonella paratyphi A
MTTPAPLTGLLPLNPEQLARLQAATTDLTPEQLAWVSGYFWGVLNPRSGAVAVTPAPEGKMPGVTLISASQTGNARRVAEALRDDLLAANLNVTLVNAGDYKFKQIASEKLLVIVTSTQGEGEPPEEAVALHKFLFSKKALKLENTAFAVFSLGDTSYEFFCQSGKDFDSKLAELGGERLLDRVDADVEYQAAASEWRARVVDVLKSRAPVAAPSQSVATGAVNDIHTSPYTKDAPLTATLSVNQKITGRNSEKDVRHIEIDLGDSGLRYQPGDALGVWYQNDPALVKELVELLWLKGDEPVTVDGKTLPLAEALEWHFELTVNTANIVENYATLTRSESLLPLVGDKAQLQHYAATTPIVDMVRFSPAQLDAQALIGLLRPLTPRLYSIASAQAEVESEVHITVGVVRYDIEGRARAGGASSFLAGRVEEEGEVRVFIEHNDNFRLPANPQTPVIMIGPGTGIAPFRAFMQQRAADGAEGKNWLFFGNPHFTEDFLYQVEWQRYVKEGVLNRIDLAWSRDQKEKIYVQDKLREQGAELWRWINDGAHIYVCGDARCMAVDVEKALLEVIAEFGAMDIESADEYLSELRVERRYQRDVY

SEQ ID NO: 1088 - DNA, 1800 bp, Salmonella paratyphi B
  CDS (1)..(1800): transl_table=11
atgacgacaccggctccactgactgggttgcttccgcttaatccggagcaactggcgcgccttcaggccgcgacaaccgaccttactcccgaacagcttgcctgggtctccggctatttttggggcgtactgaacccgcgctcaggcgctgttgccgtcacgcctgctcctgaggggaagatgccgggggttacgcttatctccgcttcgcaaaccggcaatgcgcgtcgtgtggcggaagcgctgcgtgatgatctgctggcggccaaccttaatgtgacactggtgaacgccggcgactacaaattcaaacagattgccagtgaaaaactgctggtgatagtgacgtccacccagggagaaggcgagccgccggaagaggccgtcgcgctgcataagttcctgttctcgaaaaaagcgccgaaactggaaaacaccgcttttgccgtgtttagcctcggcgacacctcttatgaatttttctgccagtccggaaaagatttcgacagcaaactggcggaactgggcggtgaacgcctgctcgaccgtgtcgatgctgacgttgaatatcaggcagctgccagcgaatggcgcgcccgcgtggttgatgttctgaagtcccgcgcacctgtcgcggcaccttcgcaatccgtcgctactggctcggtaaacgacatccacaccagcccctataccaaagacgcgccgctggccgcgaccctctccgtgaatcagaaaatcaccggtcgcaactcggaaaaagatgtgcgccatattgagattgatttaggcgactccggtctgcgttaccagccgggcgatgcgctgggcgtctggtatcagaacgatccggctctggtgaaggagctggttgagttgctgtggctgaagggcgatgagccggtgacggttgacggtaaaaccctgccgctcgccgaagcgctggagtggcacttcgagctgacggtgaataccgccaacattgttgagaactacgcgaccctgacgcgcagtgagtcgctgttgccattagtgggcgacaaagcgcagctccagcattacgccgcgaccacgcccattgttgatatggtgcgtttctctctggcacagctggatgctcaggcgctaatcgacctgctgcgtccgctaacgccgcgtctgtactccatcgcctccgcacaggctgaagtggagagcgaagtgcatatcaccgttggcgtggtttgttatgacattgaaggccgcgcccgcgccggtggcgcttccagcttcctcgccgaccgcgtggaagaagagggcgaagttcgcgtctttattgagcataacgataacttccgcctgccagctaacccggaaacgccggtcattatgattggccccggtaccggcatcgcgccgttccgcgcctttatgcaacagcgcgcggcggaaggggtggaaggtaagaactggttgttcttcggcaacccgcactttaccgaagatttcctctatcaggtggagtggcagcgctacgtgaaagagggggggttaagccgtatcgatctcgcctggtcacgcgatcaaaaagaaaaaatttacgtacaagacaagctgcgtgaacagggcgccgagctgtggcgctggatcaatgatggcgcgcatatttatgtctgcggcgatgccaggcgcatggccgcagatgtcgaaaaagcattgctggaagtgatcgctgaattcggcggtatggacctcgaatcggcagatgaatatttaagtgagctgcgcgtcgagcgccgttatcagcgagatgtctactaa

SEQ ID NO: 1089 - protein, 599 aa, Salmonella paratyphi B
MTTPAPLTGLLPLNPEQLARLQAATTDLTPEQLAWVSGYFWGVLNPRSGAVAVTPAPEGKMPGVTLISASQTGNARRVAEALRDDLLAANLNVTLVNAGDYKFKQIASEKLLVIVTSTQGEGEPPEEAVALHKFLFSKKAPKLENTAFAVFSLGDTSYEFFCQSGKDFDSKLAELGGERLLDRVDADVEYQAAASEWRARVVDVLKSRAPVAAPSQSVATGSVNDIHTSPYTKDAPLAATLSVNQKITGRNSEKDVRHIEIDLGDSGLRYQPGDALGVWYQNDPALVKELVELLWLKGDEPVTVDGKTLPLAEALEWHFELTVNTANIVENYATLTRSESLLPLVGDKAQLQHYAATTPIVDMVRFSLAQLDAQALIDLLRPLTPRLYSIASAQAEVESEVHITVGVVCYDIEGRARAGGASSFLADRVEEEGEVRVFIEHNDNFRLPANPETPVIMIGPGTGIAPFRAFMQQRAAEGVEGKNWLFFGNPHFTEDFLYQVEWQRYVKEGGLSRIDLAWSRDQKEKIYVQDKLREQGAELWRWINDGAHIYVCGDARRMAADVEKALLEVIAEFGGMDLESADEYLSELRVERRYQRDVY

SEQ ID NO: 1090 - DNA, 1800 bp, Salmonella typhi
  CDS (1)..(1800): transl_table=11
atgacgacaccggctccactgactgggttgcttccgcttaatccggagcaactggcgcgccttcaggccgcgacaaccgaccttactcccgaacagcttgcctgggtctccggctttttttggggcgtactgaacccgcgctcaggcgctgttgccgtcacgcctgctcctgatgggaagatgccgggagttacgcttatctccgcttcgcaaaccggcaatgcgcgtcgtgtggcggaagcgctgcgtgatgatctgctggcggccaaccttaatgtgactctggtgaacgccggcgactacaaattcaaacagattgccagtgaaaaactgttggtgatagtgacgtccacccagggagaaggcgagccgccggaagaggctgtcgcgctgcataagttcctgttctcgaaaaaagcgccgaaactagaaaacaccgcttttgccgtgtttagcctcggcgacacctcttatgaatttttctgccagtccggaaaagatttcgacagcaaactggcggaactgggcggtgagcgtctgctcgaccgtgtcgatgctgacgttgaatatcaggcagctgccagcgaatggcgcgcctgcgtggttgatgttctgaagtcccgtgcacctgtcgcggtaccttcgcaatccgtcgctactggcgcggtaaacgacatccacaccagcccctataccaaagacgcgccgctgaccgcgaccctctccgtgaatcagaaaatcaccggtcgcaactcggaaaaagacgttcgtcatattgagattgatttaggcgactccggtctgcgttaccagccgggcgatgcgctgggcgtctggtatcagaacgatccggctctggtgaaggaactggttgagttgctgtggctgaaaggcgatgagccggtgatggttgatggtaaaaccctgccgctcgccgaagcgctggagtggcacttcgagctgacggtgaataccgccaacattgttgagaactacgcgaccctgacgcgcagtgagtcgctgttgccattagtgggtgacaaagcgcagctccagcattacgccgcgaccacgccgatcgttgatatggtgcgtttctctccggcgcagctggatgctcaggcgctaatcgacctgctgcgcccgctgacgccgcgtctgtactccatcgcctccgcacaggctgaagtggagagtgaagtgcatatcaccgttggcgtggttcgctatgatatcgaaggccgcgcccgcgcgggtggcgcttccagcttcctcgccgaccgcgtggaagaagagggcgaagttcgcgtctttattgagcataacgataacttccgcctgccagcgaacccgcaaacgccggtgatcatgattggccccggcaccggcatcgcgccgttccgcgcctttatgcaacagcgtgccgccgatggcgcggaaggcaagaactggctgttcttcggcaacccgcactttaccgaagatttcctctatcaggtggagtggcagcgctacgtgaaagagggactgttaagccgtatcgatctcgcctggtcccgcgatcaaaaagaaaaaatttacgtacaagacaagctgcgtgaacagggcgcggagctgtggcgctggatcaatgatggcgcccacatttatgtctgcggcgacgccaggcgcatggccgcagatgtcgaaaaagcattgctggaagtgatcgctgaattcggcggtatggacctcgaatcggcagatgaatatttaagtgagctgcgcgtagagcgccgttatcagcgagatgtctactaa

SEQ ID NO: 1091 - protein, 599 aa, Salmonella typhi
MTTPAPLTGLLPLNPEQLARLQAATTDLTPEQLAWVSGFFWGVLNPRSGAVAVTPAPDGKMPGVTLISASQTGNARRVAEALRDDLLAANLNVTLVNAGDYKFKQIASEKLLVIVTSTQGEGEPPEEAVALHKFLFSKKAPKLENTAFAVFSLGDTSYEFFCQSGKDFDSKLAELGGERLLDRVDADVEYQAAASEWRACVVDVLKSRAPVAVPSQSVATGAVNDIHTSPYTKDAPLTATLSVNQKITGRNSEKDVRHIEIDLGDSGLRYQPGDALGVWYQNDPALVKELVELLWLKGDEPVMVDGKTLPLAEALEWHFELTVNTANIVENYATLTRSESLLPLVGDKAQLQHYAATTPIVDMVRFSPAQLDAQALIDLLRPLTPRLYSIASAQAEVESEVHITVGVVRYDIEGRARAGGASSFLADRVEEEGEVRVFIEHNDNFRLPANPQTPVIMIGPGTGIAPFRAFMQQRAADGAEGKNWLFFGNPHFTEDFLYQVEWQRYVKEGLLSRIDLAWSRDQKEKIYVQDKLREQGAELWRWINDGAHIYVCGDARRMAADVEKALLEVIAEFGGMDLESADEYLSELRVERRYQRDVY

SEQ ID NO: 1092 - DNA, 1800 bp, Salmonella typhimurium
  CDS (1)..(1800): transl_table=11
atgacgacaccggctccactgactgggttgcttccgcttaatccggagcaactggcgcgccttcaggccgcgacaaccgaccttactcccgaacagcttgcctgggtctccggctatttttggggcgtactgaacccgcgctcaggcgctgttgccgtcacgcctgttcctgagcggaagatgccgcgggttacgcttatctccgcttcgcaaaccggcaatgcgcgtcgtgtggcggaagcgctgcgtgatgatctgctggcggccaaccttaatgtgacactggtgaacgccggcgactacaaattcaaacagattgccagtgaaaaactgttggtgatagtgacgtccacccagggagaaggcgagccgccggaagaggccgtcgcgctgcataaattcctgttctccaaaaaagcgccgaaactggaaaacaccgcttttgccgtgtttagcctcggcgacacctcttatgaatttttctgccagtccggaaaagatttcgacagcaaactggcggaactgggcggtgaacgtctgctcgaccgtgtcgatgctgacgttgaatatcaggcagctgccagcgaatggcgcgcccgcgtggttgatgttctgaagtctcgcgcacctgtcgcggctccttcgcaatccgtcgctactggcgcggtaaacgacatccacaccagcccctatactaaagacgcgccgctgatcgcgaccctctccgtgaatcagaaaatcaccggtcgcaactcggaaaaagatgtgcgtcatattgagattgatttaggcgactccggcctgcgctatcagccgggcgatgcgctgggcgtctggtatcagaacgatccggctctggtgaaggagctggttgagttgctgtggctgaagggcgatgagccggtgacggttgacggtaaaaccctgccgctcgccgaagcgctggagtggcacttcgagctgacggtgaataccgccaacattgttgagaactacgcgaccctgacgcgcagtgagtcgctgttgccattagtgggcgacaaagcgcagctccagcattacgccgcgaccacgcccattgttgatatggtgcgtttctctccggcacagctggatgctcaggcgctaatcgacctgctgcgtccgctaacgccgcgtctgtactccatcgcctccgcacaggctgaagtggagagcgaagtgcatatcaccgttggcgtggttcgttatgacattgaaggccgcgcccgggccggtggcgcttccagcttcctcgccgaccgcgtggaagaagagggcgaagttcgcgtctttattgagcataacgataacttccgcctgccagctaacccggaaacgccggtgatcatgattggccccggtaccggcatcgcgccgttccgctcctttatgcaacagcgcgcggcggaaggggtggaaggtaagaactggttgttcttcggcaacccgcactttaccgaagatttcctctatcaggtggagtggcagcgctacgtgaaagagggggtgttaagccgtatcgatctcgcctggtcacgcgatcaaaaagaaaaaatttacgtacaagacaagctgcgtgaacagggcgccgagctgtggcgctggatcaatgatggcgcgcatatttatgtctgcggcgacgccaggcgcatggccgcagatgtcgaaaaagcattgctggaagtgatcgctgaattcggcggtatggacctcgaatcggcagatgaatatttaagtgagctgcgcgtagagcgccgttatcagcgagatgtctactaa

SEQ ID NO: 1093 - protein, 599 aa, Salmonella typhimurium
MTTPAPLTGLLPLNPEQLARLQAATTDLTPEQLAWVSGYFWGVLNPRSGAVAVTPVPERKMPRVTLISASQTGNARRVAEALRDDLLAANLNVTLVNAGDYKFKQIASEKLLVIVTSTQGEGEPPEEAVALHKFLFSKKAPKLENTAFAVFSLGDTSYEFFCQSGKDFDSKLAELGGERLLDRVDADVEYQAAASEWRARVVDVLKSRAPVAAPSQSVATGAVNDIHTSPYTKDAPLIATLSVNQKITGRNSEKDVRHIEIDLGDSGLRYQPGDALGVWYQNDPALVKELVELLWLKGDEPVTVDGKTLPLAEALEWHFELTVNTANIVENYATLTRSESLLPLVGDKAQLQHYAATTPIVDMVRFSPAQLDAQALIDLLRPLTPRLYSIASAQAEVESEVHITVGVVRYDIEGRARAGGASSFLADRVEEEGEVRVFIEHNDNFRLPANPETPVIMIGPGTGIAPFRSFMQQRAAEGVEGKNWLFFGNPHFTEDFLYQVEWQRYVKEGVLSRIDLAWSRDQKEKIYVQDKLREQGAELWRWINDGAHIYVCGDARRMAADVEKALLEVIAEFGGMDLESADEYLSELRVERRYQRDVY

SEQ ID NO: 1094 - DNA, 1824 bp, Shewanella oneidensis
  CDS (1)..(1824): transl_table=11
atgttgttaaaagaactttcatcactggcttcacccctgtcgcaatcacaggtcgataagctgaaacaactcaccgctgaattaaattccgtgcaacttgcttgggtgagcggctatttagctgcaacggccaatacgagtgggagtgctatccaagtcgccgcatccgtgaccgaggcacaagcagcgcaaacggtgaccattctctatggcagtcaaacgggcaatggccgtggtatcgccaaagccttagccgaaaaggcaaagacacagggttatagcgtaaatttagcctccatgggtgaatacaacgtgcgccagcttaagcaagaaaccttattgttgctggtggtgagtacccatggtgaaggtgaagcgccggatgatgcgattgaattacataagtttttagcaacaaagcgtgcgcctcaattaaacaatttgcactactcggtgttggcactgggcgattcgagctatgagtttttctgccaaaccggtaaagactttgatgcgcggctttcagcattaggtgctaaagccttattgccgttggttgagtgtgatgtggactatgaggctgcggccggacagtggcacgccgatgttctaacggcggttaagccactgatccaaacaacggctaacgtggtggcgttgaatgaaattaattcaacttcggcgcaagttgccagcgagagcgaatttactaagcaaaacccttaccgtgccgaagtgttggtgagccaaaagatcaccgggcgtgattcagacagagatgtgcgccatgttgaaattgatttaggtgagtcaggcttacactatgaggtcggtgatgctctgggtgtgtggttcagcaatagcgaaatcttagtcggcgaaattttagcgggcctagggttagcggccgatgcaaaagtgactgtcggcagtgagtcaatcagcctcaaacaagccttaatcgacaagaaagagctgacgcagttgtatcctggtttagtcaaagcttgggccgagttgtcagcgagcagtgagcttctcgccctgagtgaggataaagaacagctgcgccagtttattctaaatcatcaatttgttgatttagtgactaactacaagttacctgctgaggcaaatttggatgcgaataaactgcttgaactattacgcccgttaacgcccagactctattctattgcctctagccagaccgaagtcgataccgaagtgcatttaaccgtggccttggtggaagatgaacatcaagggcaaacgcgttttggcggtgcttctcatttcttagcctcggcgcaggaaggcgctgaagtaaaagtgtatgttgaaccgaacaagcatttccgtttacctgaaaaccctgatacgcccgtcatcatgattggccctggcacaggggttgccccattccgcgcctttatgcaggagcgtgtggcacagggtgcgaagggcgatagttggttattcttcggcaacccgcattttgagcaggacttcctgtatcaaaccgagtggcaacagtatctgaaaaacggcgatttaacccgtatcgatgtggcattttcgcgggatcaagcccataagatttacgtgcagcaccgcatcaaagagcaggggcaagccctgtggcaatggctgcaaaacggcgcgcatctttatatttgtggtgatgccgagcgtatggctaaagacgtacaccaagccttactagcggttgcggtggagtttggcggactgtcgagcgaggcggcagaagaatacttcgagaccttacgcagtcataaacgttaccaaaaagacgtgtactaa

SEQ ID NO: 1095 - protein, 607 aa, Shewanella oneidensis
MLLKELSSLASPLSQSQVDKLKQLTAELNSVQLAWVSGYLAATANTSGSAIQVAASVTEAQAAQTVTILYGSQTGNGRGIAKALAEKAKTQGYSVNLASMGEYNVRQLKQETLLLLVVSTHGEGEAPDDAIELHKFLATKRAPQLNNLHYSVLALGDSSYEFFCQTGKDFDARLSALGAKALLPLVECDVDYEAAAGQWHADVLTAVKPLIQTTANVVALNEINSTSAQVASESEFTKQNPYRAEVLVSQKITGRDSDRDVRHVEIDLGESGLHYEVGDALGVWFSNSEILVGEILAGLGLAADAKVTVGSESISLKQALIDKKELTQLYPGLVKAWAELSASSELLALSEDKEQLRQFILNHQFVDLVTNYKLPAEANLDANKLLELLRPLTPRLYSIASSQTEVDTEVHLTVALVEDEHQGQTRFGGASHFLASAQEGAEVKVYVEPNKHFRLPENPDTPVIMIGPGTGVAPFRAFMQERVAQGAKGDSWLFFGNPHFEQDFLYQTEWQQYLKNGDLTRIDVAFSRDQAHKIYVQHRIKEQGQALWQWLQNGAHLYICGDAERMAKDVHQALLAVAVEFGGLSSEAAEEYFETLRSHKRYQKDVY

SEQ ID NO: 1096 - DNA, 1815 bp, Shewanella sp
  CDS (1)..(1815): transl_table=11
atgttgttaaaagaactttcatcactggcttcacccctgtcgcaaccgcaggtcgaaaagctgaaacaactcaccgctgaattaaacgcggtgcaacttgcttgggtgagcggttatttagccgcaacggccaatgcgtcgggtaatctagcccagctcgcgcccgtgtccgatgcaccggcggcgcagacagtgaccattctctatggcagccaaaccggcaatggtcgtggtattgccaaagccttggccgagaaggcaaaagcgcagggctatagcgtgaatctagcctctatgggtgaatacaatgtgcgccagcttaaacaagaaaccttgttattgctggtggtcagtacccatggtgagggggaagcgccggatgatgcgattgaattacataagtttttagcatcgaaacgcgcacctcaattaaacaacttacattactctgtgttggcgctgggcgattcaagctatgagtttttctgccagacaggtaaagacttcgatgctcgtctgtcggcattaggcgccaaagcgctgctgcctctggttgagtgtgatgtggactatgaggctgcggccggacagtggcacgccgatgtactcaccgccgtgaagccactgattcaaaccacggctaacgtggtggcgctcaatgataccggctcggcacaagttgccagcgaaagcgaatttactaagcaaaacccttacagtgctgaggtgttggtgagccagaagatcactggacgcggttcagaccgagacgtacgccacgttgaaatcgatttaggcgagtcaggcttacgctacgaagtgggtgatgcccttggggtgtggtttagcaacaatgaaactttggtcgatgagattttagcgggcttagggttagcggccgatgccactgtgaccgtcggtaatgagtcaatcaacctcaaacaagccttaatcgagaagaaagagctgacacagttatatcctggtttagtcaaagcctgggccgagttgtccgcaagccctgagctgcttgctattagcgaagataaagaacaggttcgccagtttatcttacatcatcaatttgcagacttagtggcgaactatcagctcaaggccgatgctaatctggatgcaaacaagttagtggagctattacgcccattaacgccaagactctactccatcgcttcgagccagagtgaagtcgataccgaagtgcatctgacagtggccttggtggaggatgagcaccaagggcaagcccgttttggcggcgcatcgcatttcttagcctcggcagaggaaggcgccgaagtaaaagtgtatgttgaaccgaacaagcatttccgtttacctgaagatccacaaacgcctgtcatcatgattggcccaggcactggtgttgcgccgtttcgcgcctttatgcaggaacgcgtggcgcaaggcgctgagggcgatagctggttattcttcggtaatcctcactttgagcaggacttcctgtatcaaaccgagtggcaacagtatctgaaaaacggcgatttaacccgtatcgatgtggcattttcgcgcgatcaggctcataagatttacgtgcagcaccgcattaaagagcagggacaaaccctgtggcaatggctgcaaaatggcgcgcatctttatatttgtggtgatgccgagcgtatggctaaagacgtacatcaagccctattagcggttgcggtggagtttggcggactgtcgagcgaggcggcggaagaatatttcgagactctgcgcagtcataaacgttaccaaaaagacgtgtactaa

SEQ ID NO: 1097 - protein, 604 aa, Shewanella sp
MLLKELSSLASPLSQPQVEKLKQLTAELNAVQLAWVSGYLAATANASGNLAQLAPVSDAPAAQTVTILYGSQTGNGRGIAKALAEKAKAQGYSVNLASMGEYNVRQLKQETLLLLVVSTHGEGEAPDDAIELHKFLASKRAPQLNNLHYSVLALGDSSYEFFCQTGKDFDARLSALGAKALLPLVECDVDYEAAAGQWHADVLTAVKPLIQTTANVVALNDTGSAQVASESEFTKQNPYSAEVLVSQKITGRGSDRDVRHVEIDLGESGLRYEVGDALGVWFSNNETLVDEILAGLGLAADATVTVGNESINLKQALIEKKELTQLYPGLVKAWAELSASPELLAISEDKEQVRQFILHHQFADLVANYQLKADANLDANKLVELLRPLTPRLYSIASSQSEVDTEVHLTVALVEDEHQGQARFGGASHFLASAEEGAEVKVYVEPNKHFRLPEDPQTPVIMIGPGTGVAPFRAFMQERVAQGAEGDSWLFFGNPHFEQDFLYQTEWQQYLKNGDLTRIDVAFSRDQAHKIYVQHRIKEQGQTLWQWLQNGAHLYICGDAERMAKDVHQALLAVAVEFGGLSSEAAEEYFETLRSHKRYQKDVY

SEQ ID NO: 1098 - DNA, 1815 bp, Shewanella sp
  CDS (1)..(1815): transl_table=11
atgttgttaaaagaactttcatcactggcttcacccctgtcgcaaccgcaggtcgaaaagctgaaacaactcaccgctgaattaaatgccgtgcaacttgcttgggtgagcggttatttagccgcaacggccaatgcgtcgggcaatctggcccagcttgcgcccgtgtccgatgctcaggcggcgcagacagtgaccattctctatggcagccaaaccggcaatggccgtggtattgccaaagccttggccgagaaggcaaaagcgcagggctatagtgtgaatctagcttctatgggtgaatacaatgtgcgtcagcttaagcaagaaaccttgttattgctggtggtcagtacccatggtgagggtgaagcgccggatgatgcgattgaattacataagtttttagcatcgaaacgcgcacctcaattaaacaacttacattactctgtgttggcgctgggcgattcaagctatgagtttttctgccagacaggtaaagacttcgatgcccgtctttcggcattaggcgccaaagcgctgctgcctctggttgagtgtgatgtggactatgaggctgcggccggacagtggcacgccgatgtactctccgccgtgaagccactcattcaaaccacggctaacgtggtggcgctcaatgataccagctcggcactcgctgccagcgagagcgaatttactaagcaaaacccttacagtgcagaagtgttggtgagccagaagatcactggacgtggttcagaccgagacgtgcgccacgttgaaatcgatttaggcgagtcaggcttacgctatgaagtcggtgatgcccttggagtatggtttagcaacaatgaaactttggttgatgagattttagcgggcttagggttagccgccgatactaaggtgactgtcgctaatgaatccatcagcctcaaacaagccttaatcgagaagaaagagctgacacagttatatcctggtttagtcaaagcctgggccgagttgtccgcaagcccagagctgcttgccctgagcgaagataaagaacaggttcgccagtttatcttacatcatcaatttgcagacttagtggcgaactatcagctcaaggccgatgctaatctcgatgcaaacaagttagtggaattattacgcccattaacgccaagactctactccatcgcctcgagccagagtgaagtcgataccgaagtgcatctcaccgtggctttggtagaagatgagcaccaaggacaagcccgttttggcggtgcatcgcatttcttagcctcggcagaggaaggcgccgaagtaaaagtgtatgttgaaccgaacaagcatttccgtttacctgaagatccacaaacgccagtcatcatgattggccctggcacaggggttgcgccgtttcgcgcctttatgcaggaacgcgtggcacaaggcgctgagggcgatagctggttattcttcggtaatcctcattttgagcaggacttcctgtatcaaaccgagtggcaacagtatctgaaaaacggcgatttaacccgtatcgatgtggcattttcgcgggatcaggcccataaaatttacgtgcagcaccgcattaaagagcagggacaaaccctgtggcaatggctgcaaaatggcgcacatctctatatttgtggtgatgccgaacgtatggctaaagacgtacaccaagccctattaggggttgcggtggagtttggcggactgtcgagcgaggcggcggaagaatatttcgagaccctgcgcagtcataaacgttaccaaaaagacgtgtactaa

SEQ ID NO: 1099 - protein, 604 aa, Shewanella sp
MLLKELSSLASPLSQPQVEKLKQLTAELNAVQLAWVSGYLAATANASGNLAQLAPVSDAQAAQTVTILYGSQTGNGRGIAKALAEKAKAQGYSVNLASMGEYNVRQLKQETLLLLVVSTHGEGEAPDDAIELHKFLASKRAPQLNNLHYSVLALGDSSYEFFCQTGKDFDARLSALGAKALLPLVECDVDYEAAAGQWHADVLSAVKPLIQTTANVVALNDTSSALAASESEFTKQNPYSAEVLVSQKITGRGSDRDVRHVEIDLGESGLRYEVGDALGVWFSNNETLVDEILAGLGLAADTKVTVANESISLKQALIEKKELTQLYPGLVKAWAELSASPELLALSEDKEQVRQFILHHQFADLVANYQLKADANLDANKLVELLRPLTPRLYSIASSQSEVDTEVHLTVALVEDEHQGQARFGGASHFLASAEEGAEVKVYVEPNKHFRLPEDPQTPVIMIGPGTGVAPFRAFMQERVAQGAEGDSWLFFGNPHFEQDFLYQTEWQQYLKNGDLTRIDVAFSRDQAHKIYVQHRIKEQGQTLWQWLQNGAHLYICGDAERMAKDVHQALLGVAVEFGGLSSEAAEEYFETLRSHKRYQKDVY

SEQ ID NO: 1100 - DNA, 1815 bp, Shewanella sp
  CDS (1)..(1815): transl_table=11
atgttgttaaaagaactttcatcactggcttcacccctgtcgcaaccgcaggtcgaaaagctgaaacaactcaccgctgaattaaatgccgtgcaacttgcttgggtgagcggttatttagccgcaacggccaatgcacctggcaatctggcacagcttgcgcccgtgtccgatgctcaggcggcgcagacagtgaccattctctatggcagccaaaccggtaatggccgtggcattgccaaagccttggccgagaaggcaaaagcgcagggctatagcgtgaatttagcctctatgggtgaatacaatgtgcgtcagcttaagcaagaaaccttgttattgctggtggtcagtacccatggtgaaggtgaagcgccggatgatgcgattgaattacataagtttttagcatcgaaacgtgcccctcaattaagcaacttacattactctgtgttggcgctgggcgattcaagctatgagtttttctgccagacaggtaaagacttcgatgcccgtctttcggcattaggcgccaaagcgctgctgcctctggttgagtgtgatgtggactatgaggctgcggccggacagtggcacgccgatgtactcaccgctgtgaagccactgattcaaaccacggctaacgtggtggcgctcaatgataccagctcggcactcgctgccagcgagagcgaatttactaagcaaaacccttacagtgccgaagtgttggtgagccagaagatcaccggacgtggttcagaccgagacgtgcgacacgttgaaatcgatttaggcgagtcagggctgtgttacgaagtcggtgatgcccttggggtgtggtttagcaacaatgaaactttggtcgatgagattttagcgggcttagggttagccgccgatactaaggtgactgttggtaatgagtccatcagtctcaaacaagccttgctcgagaagaaagagctgacacagttatatcctggtttagtcaaagcgtgggccgagttatctgcaagcccagagctgcttgccctgagcggagataaagaacaggttcgccagtttatcttacaccatcaatttgcagacttagtggcgaattatcagctcaaggccgatgctaatctcgatgcaaacaagttagtggaattattacgcccattaacgccaagactctactccatcgcctcgagccagagtgaagtcgataccgaagtgcatctcaccgtggctttagtggaagatgagcaccaaggacaagcccgttttggtggcgcatcgcatttcttagcctcggcagaggaaggcgccgaagtaaaagtgtatgttgaaccgaataagcatttccgtttacctgaagatccacaaacgccagtcatcatgattggccctggcacaggggttgcgccgtttcgcgcctttatgcaggaacgcgtggcgcaaggcgctgagggcgatagctggttattctttggtaatcctcactttgagcaggacttcctgtatcaaaccgagtggcaacagtatctgaaaaacggcgatttaacccgtatcgatgtggcattttcgcgggatcaggcccataagatttacgtgcagcaccgcattaaagagcagggacaaaccctgtggcaatggctgcaaaatggtgcgcatctctatatttgtggtgatgccgaacgtatggctaaagacgtacaccaagccctattagcgattgcggtggagtttggcggactgtcgagcgaggcggcggaagaatatttcgagaccctgcgcagtcataaacgttaccaaaaagacgtgtactaa

SEQ ID NO: 1101 - protein, 604 aa, Shewanella sp
MLLKELSSLASPLSQPQVEKLKQLTAELNAVQLAWVSGYLAATANAPGNLAQLAPVSDAQAAQTVTILYGSQTGNGRGIAKALAEKAKAQGYSVNLASMGEYNVRQLKQETLLLLVVSTHGEGEAPDDAIELHKFLASKRAPQLSNLHYSVLALGDSSYEFFCQTGKDFDARLSALGAKALLPLVECDVDYEAAAGQWHADVLTAVKPLIQTTANVVALNDTSSALAASESEFTKQNPYSAEVLVSQKITGRGSDRDVRHVEIDLGESGLCYEVGDALGVWFSNNETLVDEILAGLGLAADTKVTVGNESISLKQALLEKKELTQLYPGLVKAWAELSASPELLALSGDKEQVRQFILHHQFADLVANYQLKADANLDANKLVELLRPLTPRLYSIASSQSEVDTEVHLTVALVEDEHQGQARFGGASHFLASAEEGAEVKVYVEPNKHFRLPEDPQTPVIMIGPGTGVAPFRAFMQERVAQGAEGDSWLFFGNPHFEQDFLYQTEWQQYLKNGDLTRIDVAFSRDQAHKIYVQHRIKEQGQTLWQWLQNGAHLYICGDAERMAKDVHQALLAIAVEFGGLSSEAAEEYFETLRSHKRYQKDVY

SEQ ID NO: 1102 - DNA, 1845 bp, Vibrio cholerae
  CDS (1)..(1845): transl_table=11
atgaatagggaagtcgtgacgatgtctacaggaaacactttacccccggcgctagcggcactcgctagtccgttaaatgatgcacagctcaatcaactccaacaaaccgtaacccaactgaatgctcagcaattagcttgggtcagtggttatttctggggattgagtcaatccaatgcattgagcgttccacacatttccgctgggcagactgcgtctgctgcttcgggtaagctgacgatcattttcgcttcgcaaacgggaaatgcgaaaggcgttgctcaggcgttattgaaagaagcgcaagctgcaggcattcaggcccagttatttgacgcgagcgattacaaaggcaaagacttagccaaagaaacccatgtaatttttgtcgcctcaaccaatggtgaaggtgaagcgccggataatgcactggcactgcatgagtttctcaaatccaaaaaagcccccaagctgcctaatcttaaatatggcgtcttaggattgggggattccagttatcagtttttctgccaaaccggcaaagactttgatcagtttttagaaaaccttggggcgcaacgtctggttgagcgcttagatgcggatgtcgattatcaggctgcagcgaccgagtggcgcaagcaagtcctgtctattttgaaagatgagctgacaggagccgcggcagtgacgagcgtggctactttcgcagtgagccagacagctgagagtcactacagtaaagagcaaccttacacggcgagcttatcgacgagccaaaaaattactggccgtgattcaggcaaagatgtacgccacatcgaaattgatttggccgattctggcatcacataccaaccgggtgatgcattaggtgtgtggtatgaaaaccgtccacagctggttaatgccctactcgatagcgtaggactttctggtcatgaagaagtacaagtggatggcgaaacgctttctctgcattcggcactgactcatcattatgaaattactgcagctaatccgcagttggtggcgcaatttgctgagcttgcacaaagcgaaaagctcacctctttagcccaagataaagaggcactgcgtgaatacgcgacgcgtacgcaagtgattgatgtgttgcgcgaagaaaaagtcaccctttccgcgattcaactgttatcacttctccgtcgtttaacgccgcgtctttattcgattgcctctagtcaaagcgaggtgggggaagaggtgcatctgacggttggggtggtcgagtatgagtatgagggagagcaacgcttgggtggtgcatccagcttcttagctcatcaattagaagagggcgctccggttaaagtcttcgtcgaacacaataacaacttcaaattgccgagtgatgataatgcgccgctgatcatggttggcccaggaaccggaattgcccctttccgtagcttcatccaagagcgcgaaaaccgtggtgcagcaggaaaaaactggctgttgtttggtgaccgcacttttacccaagatttcctctaccaagtcgagtggcaaaagtacctgaagtctggtgtgttaaatcgcttagatgtggcttttagtcgcgaccagcacgaaaaggtgtatgtgcagcatcgccttttagaacaagcagagttggtatggcaatggttacaagaaggcgcttacttctacgtatgtggtgatgcatcacgcatggcgaaggatgtgcaccaagcattaattactgttgtcgagcaacaaggtggcttgaatcgtgagcaagctgaagagtatgtgagtgaactgcgtaaagcaaaacgttatcaaagggatgtctactaa

SEQ ID NO: 1103 - protein, 614 aa, Vibrio cholerae
MNREVVTMSTGNTLPPALAALASPLNDAQLNQLQQTVTQLNAQQLAWVSGYFWGLSQSNALSVPHISAGQTASAASGKLTIIFASQTGNAKGVAQALLKEAQAAGIQAQLFDASDYKGKDLAKETHVIFVASTNGEGEAPDNALALHEFLKSKKAPKLPNLKYGVLGLGDSSYQFFCQTGKDFDQFLENLGAQRLVERLDADVDYQAAATEWRKQVLSILKDELTGAAAVTSVATFAVSQTAESHYSKEQPYTASLSTSQKITGRDSGKDVRHIEIDLADSGITYQPGDALGVWYENRPQLVNALLDSVGLSGHEEVQVDGETLSLHSALTHHYEITAANPQLVAQFAELAQSEKLTSLAQDKEALREYATRTQVIDVLREEKVTLSAIQLLSLLRRLTPRLYSIASSQSEVGEEVHLTVGVVEYEYEGEQRLGGASSFLAHQLEEGAPVKVFVEHNNNFKLPSDDNAPLIMVGPGTGIAPFRSFIQERENRGAAGKNWLLFGDRTFTQDFLYQVEWQKYLKSGVLNRLDVAFSRDQHEKVYVQHRLLEQAELVWQWLQEGAYFYVCGDASRMAKDVHQALITVVEQQGGLNREQAEEYVSELRKAKRYQRDVY

SEQ ID NO: 1104 - DNA, 1872 bp, Vibrio parahaemolyticus
  CDS (1)..(1872): transl_table=11
atgtcttttcaaaagaatgagtattctcacaagaatgtgtctgaagataataatgggcaaggcggaaatcctccgatcgcaagccctctgaatgaccaacaatttaattcactccaacaaactgtctctgagttgtcttcgcagcaacttgcttgggtcagtgggtacttttggggtttagctcaacatcaaccaagtgcggcggcaacaccaatcgcccaagcagctgccgcagtatcagcaaagcctgccggtaagttgaccatcatttttgcttctcaaaccggtaacgcaaaaggtgttgctgaagcgttggaacaagaagcaaaagcagaaggaattgcagtagagctgtttgacgcaagcgactacaaaggcaaaaacttagccaaagaaacgcacgtcatcattgttgcttctaccaacggtgaaggtgaagcgccagacaatgccattgagctgcacgagttcttacaatctaagaaagcgcctaagctatcaaaccttcaatatggtgtgattgcattgggtgattctagttatgagttcttctgccaaactggtaaagactttgacacttacttagcaaaactgggcgcgacgtcttttattgagcgtattgactgcgatgttgattacgaagcggcagcggaagaatggcgcaagaatgcgctaggtaaagttaaagagacactatcttctggcaatgaagcggaaattgttcaacttcctgtaggacaagcggcagcttcacattctcagtacaacaaacaaaatccatacacagcgacgttactcaccagccaaaagatcacgggtcgagactcgggtaaagatgttcgccatatcgaaatcgatctagatggttcgggtctgacataccaaccaggtgatgctttgggtgtgtggtacgaaaacagctctgagcttgctagtgacattctaggtaaagttggcttgtctggtgttgaaacagttgacgttgatggcgaaagcttatcgattcacagtgctttagtaagtaagttcgagatcacgacatctaacccacagctagtggctaagtttgccgagttatctggcagcaagaaactacaaaaactggcggaagataaagacaagcttcgtgagtactcagccaacactcaaattgttgatgtattcgcagagaagaaaaccaaactgaccgcagatgagttggttggtttattgcgccgtttgacgcctcgtctttactctattgcttctagccaagctgaagtggatgaagaagtgcaccttaccgtcgggttggttgaatatgaccacaatgatgaaaaacgttacggtggtgcatcgagcttcttagctcaacgcctagaagaaggcggtgacgtaaaagtatttgtcgagcataacaataacttcaaactgccagaggatgatactacaccgatcatcatggttgggccgggcactggtattgcgccattccgcagctttattcaagagcgtgaaaaccgcgatgctgaaggtaaaaactggttgttctttggtgatcgcacgttcacacaggatttcttgtaccaagttgaatggcaaaaataccttaagtcgggagtgttaagccgcttagatgttgctttcagtcgtgaccaagtagaaaaagtttatgtacagcaccgcattttagaaaacgccgcgcaagtatggcagtggattcaagatggtgcttacatctatgtatgtggtgatgcgactcgtatggcgaaagacgtacatgacgcattggtcattgttgcggagcaagaaggcaagatgccgcgtgacgatgcagaacaatttattaatgatttacgtaaagcgaaacgttatcagagggatgtgtactaa

SEQ ID NO: 1105 - protein, 623 aa, Vibrio parahaemolyticus
MSFQKNEYSHKNVSEDNNGQGGNPPIASPLNDQQFNSLQQTVSELSSQQLAWVSGYFWGLAQHQPSAAATPIAQAAAAVSAKPAGKLTIIFASQTGNAKGVAEALEQEAKAEGIAVELFDASDYKGKNLAKETHVIIVASTNGEGEAPDNAIELHEFLQSKKAPKLSNLQYGVIALGDSSYEFFCQTGKDFDTYLAKLGATSFIERIDCDVDYEAAAEEWRKNALGKVKETLSSGNEAEIVQLPVGQAAASHSQYNKQNPYTATLLTSQKITGRDSGKDVRHIEIDLDGSGLTYQPGDALGVWYENSSELASDILGKVGLSGVETVDVDGESLSIHSALVSKFEITTSNPQLVAKFAELSGSKKLQKLAEDKDKLREYSANTQIVDVFAEKKTKLTADELVGLLRRLTPRLYSIASSQAEVDEEVHLTVGLVEYDHNDEKRYGGASSFLAQRLEEGGDVKVFVEHNNNFKLPEDDTTPIIMVGPGTGIAPFRSFIQERENRDAEGKNWLFFGDRTFTQDFLYQVEWQKYLKSGVLSRLDVAFSRDQVEKVYVQHRILENAAQVWQWIQDGAYIYVCGDATRMAKDVHDALVIVAEQEGKMPRDDAEQFINDLRKAKRYQRDVY

SEQ ID NO: 1106 - DNA, 1851 bp, Vibrio vulnificus
  CDS (1)..(1851): transl_table=11
atgtcttctcaaaagaaagtgtcatcaggaaacactactccatcaggattggctggcttagctagcccactcaacgatcaacaaattaatctattacagcagatttcagatttatcaccgcagcaattggcttgggtgagtggctacttttggggattgtcgcaaagtgccgcgccatccgctgtcacgcctatcgctcaagcggtttcggctgtggccgctaaacccgcaggaaaactgacgattatctttgcttctcaaacaggcaacgccaaaggggttgctgaagcgctagagcaagaggcaaaagcagaaggtattgctgttcagctatttgatgcgagcgattacaaaggtaaaaacttagccaatgaaactcatgtcattattgtcgcgtccaccaatggtgaaggtgaagcgccagataacgctatcgagctgcacgagtttctccagtcaaagaaagcccccaaattaccaaacctgcaatacggtgtgattggtttaggggattcaagctatgaattcttctgtcagacgggcaaagatttcgattcgtatcttgccaagcttggtgcgacgccattcatcgaacgtgtcgattgcgatgtcgactatgatgcatccgcagcgcagtggcgaaaacaggcgctagaaaaagtaaaagatgctttgtctgcgggagttgaagctgacgtggttcaattgccagtcgcgcaattggctgcggggcatgctctctatactaagcaaaaaccttatgctgcgacgctgctgaccagccaaaaaatcacaggccgagattcaggtaaagacgttcgtcacgttgaaattgacctagcaggctccggaatcacttatcagccgggagatgccttaggggtgtggtttgagaatagtggtgagttagccaatcaagtgctagccaaagtgggattgtctggggtggaaagcgttgatgtggacggtgaaagcctctctattcacagtgctttggtgagtaagtttgaaattacttcttctaatcctcaacaagtcgaaaagtttgcccagctttccggtagcaaaaagctgctaaaactggtggaagagaaagacaagctgcgtgagtacgcaggtaatactcagcttgtggacctgttagcggaaaagcaaaccaaacttacggcagaggagttggtggggctactgcgtcgccttactccaaggctttactccattgcctcgagccaaacggaagtggatgaagaagttcatctcaccgttggtttggttgaatacgatgttaaaggtgagaaacgttttggaggcgcttctggttatttagcgcaacgtctagaagaaggtgagcaagtaaaagtatttgtagagaacaacaataacttcaagttgccagcagacgataacgtcccagtcatcatggttgggcctggtacgggtattgcacctttccgcagtttcatccaagagcgtgataaccgcggtgcagaaggcaaaaactggttgttctttggtgatcgtacctttacgcaagatttcctctaccaggttgaatggcagaagtatctgaaatccggcctgctgacgaaactcgatgtcgcttttagtcgtgaccaagcagagaaagtctatgtgcagcaacgcatcttagaaaatgcagcgcaagtatggcagtggattcaagaaggcgcttatctctacgtctgtggtgatgcgaaccgaatggcaaaagatgttcatcaagcctttgtcgcagtcgcagagcaagagggcaagatgtcacgcgatgacgcagaagaatttattaacgacttacgtaaagcaaaacgttatcaaagggatgtgtactaa

SEQ ID NO: 1107 - protein, 616 aa, Vibrio vulnificus
MSSQKKVSSGNTTPSGLAGLASPLNDQQINLLQQISDLSPQQLAWVSGYFWGLSQSAAPSAVTPIAQAVSAVAAKPAGKLTIIFASQTGNAKGVAEALEQEAKAEGIAVQLFDASDYKGKNLANETHVIIVASTNGEGEAPDNAIELHEFLQSKKAPKLPNLQYGVIGLGDSSYEFFCQTGKDFDSYLAKLGATPFIERVDCDVDYDASAAQWRKQALEKVKDALSAGVEADVVQLPVAQLAAGHALYTKQKPYAATLLTSQKITGRDSGKDVRHVEIDLAGSGITYQPGDALGVWFENSGELANQVLAKVGLSGVESVDVDGESLSIHSALVSKFEITSSNPQQVEKFAQLSGSKKLLKLVEEKDKLREYAGNTQLVDLLAEKQTKLTAEELVGLLRRLTPRLYSIASSQTEVDEEVHLTVGLVEYDVKGEKRFGGASGYLAQRLEEGEQVKVFVENNNNFKLPADDNVPVIMVGPGTGIAPFRSFIQERDNRGAEGKNWLFFGDRTFTQDFLYQVEWQKYLKSGLLTKLDVAFSRDQAEKVYVQQRILENAAQVWQWIQEGAYLYVCGDANRMAKDVHQAFVAVAEQEGKMSRDDAEEFINDLRKAKRYQRDVY

SEQ ID NO: 1108 - DNA, 1872 bp, Vibrio vulnificus; identical to SEQ ID NO: 1000
  CDS (22)..(1872): transl_table=11

SEQ ID NO: 1109 - protein, 616 aa, Vibrio vulnificus
MSSQKKVSSGNTTPSGLAGLASPLNDQQINLLQQISDLSPQQLAWVSGYFWGLSQSAAPSAVTPIAQAVSAVAAKPAGKLTIIFASQTGNAKGVAEALEQEAKAEGIAVQLFDASDYKGKNLANETHVIIVASTNGEGEAPDNAIELHEFLQSKKAPKLPNLQYGVIGLGDSSYEFFCQTGKDFDSYLAKLGATPFIERVDCDVDYDASAAQWRKQALEKVKDALSAGVEADVVQLPVAQLAAGHALYTKQKPYAATLLTSQKITGRDSGKDVRHVEIDLAGSGITYQPGDALGVWFENSGELANQVLAKVGLSGVESVDVDGESLSIHSALVSKFEITSSNPQQVEKFAQLSGSKKLLKLVEEKDKLREYAGNTQLVDLLAEKQTKLTAEELVGLLRRLTPRLYSIASSQTEVDEEVHLTVGLVEYDVKGEKRFGGASGYLAQRLEEGEQVKVFVENNNNFKLPADDNVPVIMVGPGTGIAPFRSFIQERDNRGAEGKNWLFFGDRTFTQDFLYQVEWQKYLKSGLLTKLDVAFSRDQAEKVYVQQRILENAAQVWQWIQEGAYLYVCGDANRMAKDVHQAFVAVAEQEGKMSRGDAEEFINDLRKAKRYQRDVY

SEQ ID NO: 1110 - DNA, 1857 bp, Yersinia pseudotuberculosis
  CDS (1)..(1857): transl_table=11
atgacgactcaggctcctccaacttcgttacttccgctatcgccagagcagttggcccgcttgcaagcggcggtgggtgaattctccccaacccaaatggcatggttgtcgggttacttctgggggatggttaaccagcagcccggcgctgttgcttcccctgcggtagcggcacccccaccagtgacagttaccctgatttccgcgtctcaaaccggcaacgcccggcgtttagctgaacaactgcgcgatgatcttctggctgcccaacttagtgtcaatctggtcaatgcgggtgattataagtttaaacaaattgcgcaggagcgtttactggtggtggtcgcatcgacccaaggagagggggagccagcagaagaagccgtcgcactgcataaattcctgttttctaaaaaagccccaaaattatcggagaccgcatttgctgtctttggcttaggtgacacctcttacgaacacttctgtcaggctgggaaagattttgatagcaagctggcagaacttggtgctcaacggttactggatcgtgtcgatgccgatgttgaatatcaggtacaagcacagcagtggcgtcagcaagtggttgccacgttgcaggctaaggttccagcacaatctacagctccaacacaatttatagctccaacacaatttatagctccaacacaatctacaactccagcagcagcggcgataacgtctggtggtaccactaccgttagtccgtacagtaaaaccgcgccgttgaccgcacagttatccgtacagcaaaaagtgactgggcgtaattcagaaaaagatgttcgccatattgaaatcgatttaggtgattcaggactgcgttaccaaccaggcgatgctttgggtgtctggtttgataatgatcctgctttggtcgaagaactgctcgcgctgttgtggctcaaaggtgatgagccggtcagtattgacggacaaaatatgccactggcacaggcgctgctcagtcaccttgaactgacacaaaatacgacgctgatcgtcgataaatacgccgcgctatcacgcgatgaaaccttgattgcactgctggcagataaacccgcgttgcaactgtacgctaagaatacgccattcgttgatatggtgcggcaggcaccgtctgatcttaatgccgatcaactggtggggttattgcgccccttaacgccacggttgtactccatcgcctcttcgcaagctgagaccgaaaatgaggtgcatatcaccgtgggtgtggtgcgctatgacattgatggccgagcgcgcagtggcggtgcttccggctatctggcggaccggctggaagtcgatggcgatatccgtgtctttattgaacacaatgataatttccgtttgcctgctaacccggaaacacccgtcatcatgatcgggccaggcaccggtatcgcgccgttccgcgcctttatgcaacagcgtgaagttgatggggccagtggcaagaactggttattcttcggtaatcctcatttcaccgaggattttctgtatcaggttgaatggcaacgctatgtcaaagaaggcgtgttgacgcgcattgatctggcctggtcccgtgatcaggcgcataaaatatacgtacaagacaaactgcgcgaacagggcgcggaactgtggaactggatacaacaaggtgcccacatttacgtctgtggcgatgctaaccgcatggcgaaagacgttgagcaggttttactggacgtggtggctctgcacggtgcaatggatgccgagcaggctgatgaatatttaagtgagttgcgccaagcgcgccgctatcagcgagatgtgtactga

SEQ ID NO: 1111 - protein, 618 aa, Yersinia pseudotuberculosis
MTTQAPPTSLLPLSPEQLARLQAAVGEFSPTQMAWLSGYFWGMVNQQPGAVASPAVAAPPPVTVTLISASQTGNARRLAEQLRDDLLAAQLSVNLVNAGDYKFKQIAQERLLVVVASTQGEGEPAEEAVALHKFLFSKKAPKLSETAFAVFGLGDTSYEHFCQAGKDFDSKLAELGAQRLLDRVDADVEYQVQAQQWRQQVVATLQAKVPAQSTAPTQFIAPTQFIAPTQSTTPAAAAITSGGTTTVSPYSKTAPLTAQLSVQQKVTGRNSEKDVRHIEIDLGDSGLRYQPGDALGVWFDNDPALVEELLALLWLKGDEPVSIDGQNMPLAQALLSHLELTQNTTLIVDKYAALSRDETLIALLADKPALQLYAKNTPFVDMVRQAPSDLNADQLVGLLRPLTPRLYSIASSQAETENEVHITVGVVRYDIDGRARSGGASGYLADRLEVDGDIRVFIEHNDNFRLPANPETPVIMIGPGTGIAPFRAFMQQREVDGASGKNWLFFGNPHFTEDFLYQVEWQRYVKEGVLTRIDLAWSRDQAHKIYVQDKLREQGAELWNWIQQGAHIYVCGDANRMAKDVEQVLLDVVALHGAMDAEQADEYLSELRQARRYQRDVY

SEQ ID NO: 1112 - DNA, 1821 bp, Zymomonas mobilis
  CDS (1)..(1821): transl_table=11
atgacgaatgaggcatctctcactcctattccgttgccagcggaaaaactggcacaattacagacagttaccaatggcctgtcgaccgcacagatagcgtggatttcaggctatctctggggcagaagcagcggcgctgatacgacgaatcaatcgcttccgacctctccagccacagaacagcccgttgaaccgaccgtcatcacgatcttgtcggcttcccaaacagggaatgcgcgcaggattgccgaagaattgcgcgatgaccttctggccgcgcatctcaaggtcaatctgatcaatacgggcgattacaaattcaaacagattgatcgcgaaaagatcattctgatggtcacgtcaacccaaggcgaaggcgaacccccagaagaagcggtcgctttttataaattcctgttttctaaaaaagccccgaaactgacgcataccgcttttgctgttttcggattgggtgacatcacctacgaacattttgctcaggctggtaacgacttcgatcgtcgttttgaggaattaggcggtgaacgcctattgcctcgcgtcgatgctgatgtcgattacgaagaagccgccgaagcatggcggaaagaagtcaccgaacttctcgaaaaacgggtgccatcggccaattctgcccagatagcggccacagccattagtccagtagatgaagtttccagcacgccttatgacaaagaaagcccattaacggccacgctttcggtgaatcaaaaaatcaccggtcgtcattcggataaagatgtccgccatatcgaaattgatctgggggattctggattacactataaaccgggcgatgccttgggtgtctggtatgaaaatgatccggcacttatccgcgaatgtcttgatcttctcggcttgtccggcgaagaaagcatcaaggtcaatgacaaaatcctgcccttggcacaggccttacagcaatctttcgaactgacggtcaacaatacccgactggtagaaagctacgcgaccttgacgcaaaacaaggctttggaaaaaatcatttccgataaagccgcgttacaggattatgcccagaatacgcctattgtcgatatgattagacaagcgggcggcaaactgacggcagaacaatttgtcagccttttgcgccccttaacgccgcgcttatattcgatcgcctcatcacaggccgaagtcgaaaacgaagtgcatctgacggttggcgttgtccgttatgaaatcgacggccataaacgagcaggcggtgcctccagcttcttagctgaccggcttgctgaaaatggcaatcttcgggtttttgtcgaacataatgacaatttccggctgccagataatcccgatgctcccgttatcatgatcgggcccggcacgggggtcgctcctttccgcgcctttatgcaacaacgggataatgacggggcaaagggtaaaaactggctgttcttcggcaatcctcattttatcgaagatttcctctatcaggtcgaatggcaggcttatgtcaaacagggcttattgacccatattgaccttgcatggtcacgcgatcaggcaaaaaaagtctatgtgcaggataaactccgcgagaaagcggccgaaatctggaaatggatcaaagaggacggcgcttatctctatgtctgcggtgacgcgacacatatggcaaaagatgtcgataaagccttgattgatatcatccgccaagaaggtggcatggatgaagaagccgccgacgaatttttaaccgagctgcgcctagagcgccgttatcagcgagatgtctactaa

SEQ ID NO: 1113 - protein, 606 aa, Zymomonas mobilis
MTNEASLTPIPLPAEKLAQLQTVTNGLSTAQIAWISGYLWGRSSGADTTNQSLPTSPATEQPVEPTVITILSASQTGNARRIAEELRDDLLAAHLKVNLINTGDYKFKQIDREKIILMVTSTQGEGEPPEEAVAFYKFLFSKKAPKLTHTAFAVFGLGDITYEHFAQAGNDFDRRFEELGGERLLPRVDADVDYEEAAEAWRKEVTELLEKRVPSANSAQIAATAISPVDEVSSTPYDKESPLTATLSVNQKITGRHSDKDVRHIEIDLGDSGLHYKPGDALGVWYENDPALIRECLDLLGLSGEESIKVNDKILPLAQALQQSFELTVNNTRLVESYATLTQNKALEKIISDKAALQDYAQNTPIVDMIRQAGGKLTAEQFVSLLRPLTPRLYSIASSQAEVENEVHLTVGVVRYEIDGHKRAGGASSFLADRLAENGNLRVFVEHNDNFRLPDNPDAPVIMIGPGTGVAPFRAFMQQRDNDGAKGKNWLFFGNPHFIEDFLYQVEWQAYVKQGLLTHIDLAWSRDQAKKVYVQDKLREKAAEIWKWIKEDGAYLYVCGDATHMAKDVDKALIDIIRQEGGMDEEAADEFLTELRLERRYQRDVY

SEQ ID NO: 1114 - DNA, 2088 bp, Oryza sativa
  CDS (1)..(2088)
atggcgctggcgctggaggcggcgaggtcgtgggcggcgtccgtgctgccgccggagctcgccgccgcggcggggggcgacccgctcgccgccctcgccgccacggccgcggcgctcgtcgccggggtggtcatcctcgccgtgtggttccgatccggtggaggggcgccgcccaaggccgccgcgccgccgccgcgcccgccgccggtcaagatcgaggccgacgccgacgccgacgacggccggaagcgcgtcaccgtcttcttcggcacgcagaccggcaccgccgagggcttcgctaaggcgatggcagaggaggcgagggcgcggtacgagaaggcggtgttcaaagttgtggatctggatgactatgcagctgaggatgaggagtacgaggagaagctcaggaaggaaactatcgtgttgctcttcctagcaacatatggggatggggagcctaccgacaatgctgcaagattctacaaatggttcactgaggggaaggaaaaggaagtctggcttaaggatcttaagtatgctgtttttggcctgggaaataggcagtatgagcactttaataaggttgcaaaggtggtggacgaactgctagaggagcagggtggcaagcgtcttgtcccagttggccttggagatgatgatcagtgcattgaggatgacttcacagcatggaaagaacaagtttggccagaattggaccaactgctccgtgatgaagatgatacaactggtgcatccactccttacactgctgctatacctgaatacagaattgtatttattgataaatcagatgtatcgttccaagacaaatcgtggtcacttgccaatggcagtggtgttattgatattcaccatcctgtcaggtctaatgttgctgttcgaaaggaactccataagccagcttcagatcgctcttgcattcatctggagttcgatatctcaggcactggtcttgtgtatgaaactggtgaccatgttggtgtttattcagaaaatgctatcgagacagtggagcaggctgaaaagctgctagatctttccccagatacatttttctccgtccatgcagacgcagaagatggatcacctcgtaaagggggtggttctttggccccacctttcccttctccttgcaccttacggactgcacttctaagatatgctgatctacttaattctccaaagaaggctgctttggttgctttagctgctcatgcgtctgacctagctgaagctgaaagattgagatttttggcttcccctgctggaaaggatgaatattctcaatgggtagtagctagccaaagaagccttcttgaagttatggctgcattcccttcagctaagcccccactgggagtattctttgcagctgttgcacctcgcctacaaccgcgttactactccatatcatcatctccaaagatggctccttccagaattcatgtaacatgtgcgttagtttatggacctacaccaacgggaaggattcaccaaggagtttgttcgacatggatgaagaacgcaatcccatcagaatatagtgaagagtgtagctgggcaccaatttatgtgaggcagtcaaattttaagttgcctgcagatccgaccactccaattatcatgattggtcctggtacagggttagcaccatttagaggcttcttgcaggaaagattagctctaaaacaatctggagttgaactgggcaattcagttctcttctttggatgcaggaaccgtaatatggactacatatatgaagacgagttgcaaaacttcattcaggagggtgcactttctgagctgattgttgccttctctcgtgaaggaccagccaaagaatacgtgcagcataagatgacagagaaggccacagaaatttggaacatcgtctcacaaggtggttacatatatgtgtgcggtgatgccaagggtatggcaagagacgtacacagagctcttcatacaattgttcaagagcagggatctttggatagctccaaaaccgagagctatgtaaagagcctacagatggacggcaggtacctccgtgacgtatggtga

SEQ ID NO: 1115 - protein, 695 aa, Oryza sativa
MALALEAARSWAASVLPPELAAAAGGDPLAALAATAAALVAGVVILAVWFRSGGGAPPKAAAPPPRPPPVKIEADADADDGRKRVTVFFGTQTGTAEGFAKAMAEEARARYEKAVFKVVDLDDYAAEDEEYEEKLRKETIVLLFLATYGDGEPTDNAARFYKWFTEGKEKEVWLKDLKYAVFGLGNRQYEHFNKVAKVVDELLEEQGGKRLVPVGLGDDDQCIEDDFTAWKEQVWPELDQLLRDEDDTTGASTPYTAAIPEYRIVFIDKSDVSFQDKSWSLANGSGVIDIHHPVRSNVAVRKELHKPASDRSCIHLEFDISGTGLVYETGDHVGVYSENAIETVEQAEKLLDLSPDTFFSVHADAEDGSPRKGGGSLAPPFPSPCTLRTALLRYADLLNSPKKAALVALAAHASDLAEAERLRFLASPAGKDEYSQWVVASQRSLLEVMAAFPSAKPPLGVFFAAVAPRLQPRYYSISSSPKMAPSRIHVTCALVYGPTPTGRIHQGVCSTWMKNAIPSEYSEECSWAPIYVRQSNFKLPADPTTPIIMIGPGTGLAPFRGFLQERLALKQSGVELGNSVLFFGCRNRNMDYIYEDELQNFIQEGALSELIVAFSREGPAKEYVQHKMTEKATEIWNIVSQGGYIYVCGDAKGMARDVHRALHTIVQEQGSLDSSKTESYVKSLQMDGRYLRDVW

SEQ ID NO: 1116 - DNA, 2160 bp, Oryza sativa
  CDS (1)..(2160)
atggagtcgtcggcggggccgatggagctggtggcggcgctgctgcgggggctgacgccgcgggcggagcagctgctgcagctgtcgtccgggggaggggaggccgccgccggtggcgcggcggaggcgagggccgcggtggccacggtggccgccgcgctgctcgggtgcgcgttcttggtgttatggaggcgggtctcggcggggcggaagcggaagagggaggaggcagagaggtcggcggcggccgtggctggggtggggaagggcgggaagaatgcctccgcggcggccggggaggaggccggcggcgccgacgggaggaagcgggtcaccgtcttcttcggcacgcagaccggcaccgccgagggcttcgccaaggcactcgctgaggaggctaagtcaagatacgacaaggcgatattcaaagttgtggacttggatgagtatgcgatggaggatgaggagtacgaggagagattgaagaaggagaagatatcgttgttcttcgttgcaacgtacggagatggtgaaccgactgacaatgctgctaggttctataaatggttcactgagggaaatgagaggggtgtttggttgaatgacttccagtatgctatttttggtcttggcaatcggcagtatgagcatttcaacaaggttgccaaggttgttgatgagctcctagttgagcaaggtggaaaacgtcttgttccggttggtcttggagatgatgatcaatgcattgaggatgacttcaacgcatggaaagaaactctctggccagaattggatcagttacttcgggatgaaaatgatgtttcaacaggcactacctacacagctgccattcctgaataccgggttgaatttgttaagcctgatgaggcagcccatttggagagaaatttcagtcttgcaaacggttatgcggttcatgatgctcagcatccttgccgggccaacgtggctgtgcgacgggaactccacactcctgcttctgatcgttcatgcactcacttggagtttgacattgctggcactggtcttacgtatgaaaccggtgaccatgttggtgtatacacagagaactgcctcgaggttgtagaggaggcagagaggttgttaggctactccccagaggcttttttcaccatccatgcagacaaagaggacggtacaccactaggtggtggttctctggctcctccattcccttccccgattactgtgaggaatgcgcttgctagatatgcggatcttctgaattcgccgaagaagagtgctttggttgcattagctacttatgcttcagattctactgaagctgatcgtctgaggttcttggcctctcctgctggaaaggatgagtatgctcaatgggttgttgcgagtcaaagaagtctattagaagtgatggcagagttcccttcagcaaagcctccactaggagtcttctttgcagccgttgctcctcgtcttcagccgagatactactcaatttcatcttcacctagcatggcacctaccagaattcatgttacatgtgcacttgtccatgaaaaaacacctgctggaagggtacataagggagtctgctcaacatggattaagaatgctattccatcagaagagacaaaggactgcagctgggctccagtttttgtgagacaatcaaacttcaaactgcctgctgatccttcagtaccggttatcatgattggcccaggaactggtcttgctcctttccgcggattcttgcaggagaggctgtctcaaaaacaatcaggagctgagcttggtcgctccgtattcttctttggatgcagaaacagcaagatggacttcatctatgaggatgagctgaacactttccttgaggaaggagcattgtccgagctggttctcgccttctctcgtgagggccctacgaaggaatacgtgcagcacaaaatgtcgcagaaagcttccgaaatctgggacatgatctcccagggtggttacatttacgtctgtggtgatgccaaaggcatggccagagatgtacatagagttctccacaccattgtacaggaacagggatcacttgacagctctaaggctgagagctttgtgaagagcctccaaacggagggtaggtatctgagagatgtgtggtaa

SEQ ID NO: 1117 - protein, 719 aa, Oryza sativa
MESSAGPMELVAALLRGLTPRAEQLLQLSSGGGEAAAGGAAEARAAVATVAAALLGCAFLVLWRRVSAGRKRKREEAERSAAAVAGVGKGGKNASAAAGEEAGGADGRKRVTVFFGTQTGTAEGFAKALAEEAKSRYDKAIFKVVDLDEYAMEDEEYEERLKKEKISLFFVATYGDGEPTDNAARFYKWFTEGNERGVWLNDFQYAIFGLGNRQYEHFNKVAKVVDELLVEQGGKRLVPVGLGDDDQCIEDDFNAWKETLWPELDQLLRDENDVSTGTTYTAAIPEYRVEFVKPDEAAHLERNFSLANGYAVHDAQHPCRANVAVRRELHTPASDRSCTHLEFDIAGTGLTYETGDHVGVYTENCLEVVEEAERLLGYSPEAFFTIHADKEDGTPLGGGSLAPPFPSPITVRNALARYADLLNSPKKSALVALATYASDSTEADRLRFLASPAGKDEYAQWVVASQRSLLEVMAEFPSAKPPLGVFFAAVAPRLQPRYYSISSSPSMAPTRIHVTCALVHEKTPAGRVHKGVCSTWIKNAIPSEETKDCSWAPVFVRQSNFKLPADPSVPVIMIGPGTGLAPFRGFLQERLSQKQSGAELGRSVFFFGCRNSKMDFIYEDELNTFLEEGALSELVLAFSREGPTKEYVQHKMSQKASEIWDMISQGGYIYVCGDAKGMARDVHRVLHTIVQEQGSLDSSKAESFVKSLQTEGRYLRDVW

SEQ ID NO: 1118 - DNA, 2145 bp, Oryza sativa
  CDS (1)..(2145)
atggactccggcggcggcggcggcggcggggcgctgaggccgtcggcgctggacctggtggcggcgctgctcacggggcggggacgaccggaggaggaggggtggccgccctcgctcgccgagaaccgccacctcatcgtcctgctcaccacctccctcgccgtcctcgtcggctgcggcgtcgcgctgctcgtccgccgctcctccatctccgcgcccgccgtgagggcgcaggagccgcagccgcgggcccccgcccccgcgaagaggaagcaggaggccgagcctgaccccgacgacggcaggcagagggtcgccgtcttcttcggcacgcagaccggcaccgccgagggcttcgccaaggcgcttgcggaggaggccaagtcgaggtacgacaaggccgtcttcaaggtgctcgatctggatgagtatgctgcggatgatgaggagtatgagcagaagcttaagaaggagatcatcgccttgttcttcgtggcaacgtatggggatggggaaccaactgacaatgcggcgaggttctataaatggtttggagaggggaatgagagaggtgaatggttgagtaatcttcggtttggggtctttggcctcggaaataggcagtacgagcattttaacaaggttggaaaggtggttgaccaactcctcgctgaacaaggtggaaaacgcattgttcctcttggtcttggagatgatgatcaatgcattgaggatgacttcaatgcatggaaggaacttctatggccagaattggataaattgctccgtgttgaagatgataaatcggcagcaccaactccctacacagctgctattcctgaatatagagttgtattggtcaagccagaggaagccatgcatatcaacaaatcctttagtctcagtaatggtcatgctgtatatgacattcagcatccttgcagagcaaatgtggctgtgcggcgggagcttcacacgccggcttcttaccggtcctgcattcatttagagtttgatatttcagggactggtcttacatatgagactggagatcatgttggtgtatatgcagaaaactgcacagagactgtagaggaggtagaaaatctgttaggttattcaccagataccttattctcaattcatgctgaccaagaggatggcactccactttttgggggttctttgccacctcctttcccgtccccctgtactgtggggactgcacttgccagatatgctgaccttctgagttttcctaagaagagtgctttaattgctttggcttcccatgcatctgatcccaaagatgctgagaggctaagacatctagcatctcctgctggaaagaaggagtattctcaatggatagtttcaagtcaacggagtctcttggaagttatgacagagttcccatcagcaaagcctccacttggtgtcttctttgcagccattgctcctcgactgcagccgagatactactcgatatcttcctcaccgaggatgactccaacaagaattcatgtaacatgtgcgctagtgtatgggcaaacccctactggaaggatccataaaggagtttgttctacttggatgaagaactcgattcccttggaagagagccaagaatgtagctgggctccaatttttgttaggcagtcaaacttcaaactgcctactgatcctactgtgcctattataatgataggtcctggaactggtcttgcaccttttaggggcttcttacaggaaagattagctctaaaagagactggtgtggaactaggccatgccgtcctattctttgggtgcagaaatcgaaagatggacttcatatatgaggatgagctcaacaattttgttgagaccggtgcgctgtctgaattgattgtagccttttctcgtgagggtccttcaaaggagtatgttcagcacaaaatggcagagaaggctcccgagatttggagcatcatttctcagggtggttatatttatgtctgtggtgatgcaaagggcatggcaagagatgtacaccgcacactacacaccattgtgcaggaacagggttctttggacaactcaaacacagaaagctatgtaaagagcttgcagatggaagggagatacttgagagatgtctggtga

SEQ ID NO: 1119 - protein, 714 aa, Oryza sativa
MDSGGGGGGGALRPSALDLVAALLTGRGRPEEEGWPPSLAENRHLIVLLTTSLAVLVGCGVALLVRRSSISAPAVRAQEPQPRAPAPAKRKQEAEPDPDDGRQRVAVFFGTQTGTAEGFAKALAEEAKSRYDKAVFKVLDLDEYAADDEEYEQKLKKEIIALFFVATYGDGEPTDNAARFYKWFGEGNERGEWLSNLRFGVFGLGNRQYEHFNKVGKVVDQLLAEQGGKRIVPLGLGDDDQCIEDDFNAWKELLWPELDKLLRVEDDKSAAPTPYTAAIPEYRVVLVKPEEAMHINKSFSLSNGHAVYDIQHPCRANVAVRRELHTPASYRSCIHLEFDISGTGLTYETGDHVGVYAENCTETVEEVENLLGYSPDTLFSIHADQEDGTPLFGGSLPPPFPSPCTVGTALARYADLLSFPKKSALIALASHASDPKDAERLRHLASPAGKKEYSQWIVSSQRSLLEVMTEFPSAKPPLGVFFAAIAPRLQPRYYSISSSPRMTPTRIHVTCALVYGQTPTGRIHKGVCSTWMKNSIPLEESQECSWAPIFVRQSNFKLPTDPTVPIIMIGPGTGLAPFRGFLQERLALKETGVELGHAVLFFGCRNRKMDFIYEDELNNFVETGALSELIVAFSREGPSKEYVQHKMAEKAPEIWSIISQGGYIYVCGDAKGMARDVHRTLHTIVQEQGSLDNSNTESYVKSLQMEGRYLRDVW

SEQ ID NO: 1120 - DNA, 2121 bp, Brassica napus
  CDS (1)..(2121)
atgtcgtcctcttcttattctccattcgatctcatgtccgccatcatcaaaggagagcccgtcgtggtctccgacccggccaacgcctccgcctacgagtccgtcgccgccgaattgagctccatgcccatcgagaatcgccaattcgccatgattatctccacctccattgctgtcctcatcggctgcatcgtcatgctcctctggcggagatccggcggctcccccaaacgcgtcgagacgcttaagccgctggtgatcaagccgccaagcgaggacgaggtcgacgacgggaggaagaaagtcacgatctttttcggtacacagaccggaaccgcagaagggttcgctaaagctttgggagaagaagctagagcgagatacgagaagaccagattcaagatcgttgatttggatgattacgcggctgatgatgatgagtatgaggagaagttgaagaaggaggatgttgctttcttcttcttagccacatatggagacggtgagcctacggacaatgcagcgagattctacaaatggttcaccgagggtgatgacagaggagagtggcttaagaacttgaagtatggagtttttggattaggaaacagacaatatgagcattttaataaggttgccaaagttgtagatgacatccttgtagaacaaggtgcacagcgtcttgtacatgttggtcttggagatgatgaccagtgtattgaagatgacttcaccgcatggagagaagcattgtggccagagttggatacactgctaagggaagaaggtgatacagctgttacaccatacactgctgctgtgctagaatacagagtttctattcacaactctgaagatgcgttgaatgagaaaaacttggctaatgggaatggtcatgtagtctttgacgctcaacatccttacagggcaaatgttgctgtgagaagggagcttcatactccagagtctgaccgttcctgcacccatctggagtttgacattgccgggagtggactaacgtatgaaactggagatcatgttggtgtactttgtgataatctgaatgaaactgtaaaggaagcgcttaggttgctggatatgtcacctgacacttacttctcccttcactctgataaagaagatggaacaccaatcagcagctcgcttcctcctacattcccaccttgcagcttgagaacagcgcttacacgatatgcttgtctattgagttctcctaagaagtccgctttacttgctttggctgctcatgcatctgatcctactgaagcagagcgactaagacaccttgcttcacctgctggaaaggatgagtattcaaagtgggtagtagagagtcaaagaagtctactcgaggtgatggcagagtttccttcagccaagccgccacttggtgtcttctttgctgctgtcgctcctaggttgcagcctaggttctactcaatatcatcatctcccaagattgctgaaactagaatccatgtcacatgtgcactggtctatgagaagatgccaacaggaaggatacacaagggagtgtgttcgacttggatgaagagtgctgtgccttatgagaagagtgaaaactgctgctcagcaccaatatttgttaggcaatccaacttcaagcttccttctgattctaaggtaccgatcatcatgatcggtccagggacaggattggctcctttcagaggtttccttcaggaaaggcttgcgttggtagaatctggtgttgaacttggaccatcagttttgttctttggatgcagaaaccgcagaatggacttcatctacgaggaagagctccagaggtttctagagagtggtgcactctcagagctaagcgtggccttctctcgtgaaggaccaaccaaagagtatgtacagcacaagatgatggacaaggcttctgatatatggaacatgatctctgaaggagcttatgtatatgtttgtggtgacgccaaaggcatggcaagagacgttcacagatctctccacacaatagctcaagaacagggatcaatggattcgacgaaagcagagagctttgtgaagaatctgcaaatgagtggaaggtatcttagagatgtatggtaa

SEQ ID NO: 1121 - protein, 706 aa, Brassica napus
MSSSSYSPFDLMSAIIKGEPVVVSDPANASAYESVAAELSSMPIENRQFAMIISTSIAVLIGCIVMLLWRRSGGSPKRVETLKPLVIKPPSEDEVDDGRKKVTIFFGTQTGTAEGFAKALGEEARARYEKTRFKIVDLDDYAADDDEYEEKLKKEDVAFFFLATYGDGEPTDNAARFYKWFTEGDDRGEWLKNLKYGVFGLGNRQYEHFNKVAKVVDDILVEQGAQRLVHVGLGDDDQCIEDDFTAWREALWPELDTLLREEGDTAVTPYTAAVLEYRVSIHNSEDALNEKNLANGNGHVVFDAQHPYRANVAVRRELHTPESDRSCTHLEFDIAGSGLTYETGDHVGVLCDNLNETVKEALRLLDMSPDTYFSLHSDKEDGTPISSSLPPTFPPCSLRTALTRYACLLSSPKKSALLALAAHASDPTEAERLRHLASPAGKDEYSKWVVESQRSLLEVMAEFPSAKPPLGVFFAAVAPRLQPRFYSISSSPKIAETRIHVTCALVYEKMPTGRIHKGVCSTWMKSAVPYEKSENCCSAPIFVRQSNFKLPSDSKVPIIMIGPGTGLAPFRGFLQERLALVESGVELGPSVLFFGCRNRRMDFIYEEELQRFLESGALSELSVAFSREGPTKEYVQHKMMDKASDIWNMISEGAYVYVCGDAKGMARDVHRSLHTIAQEQGSMDSTKAESFVKNLQMSGRYLRDVW

SEQ ID NO: 1122 - DNA, 2076 bp, Glycine max
  CDS (1)..(2076)
atggcttccaattccgatttggtccgcgccgttgagtcgctcctcggcgtctcgctcgccgattccgtctccgattctttgctcctcattgcgaccacctccgccgccgtcataatcggccttctcgtgtttctctggaagaaatcttcggatcggagcaaggaggtgaagccggtgatcgtgccgaagggcttgccgaaggatgaggacgacgagatcgatgttgccgacgggaagactaaggtcacgattttcttcggtactcaaaccggcactgctgaaggctttgctaaggcattggcagaggagatcaaggcaagatatgataaagcagctgtcaaagttgttgacctggatgactatgcagcggatgatgatcaatatgaggagaagctgaagaaagagactgttgcatttttcatgctggcaacttatggagatggagagccaactgataatgctgcaagattctacaaatggtttactgaggggaaagatgagaggggaacctcgcttcaacagctcacatatggagtttttggcctgggtaacagacaatacgaacactttaataagataggtaaagttgttgatgaagaacttagtgaacaaggagcaaagcgtcttgttacacttggattaggtgatgatgatcaatccattgaagatgatttttctgcctggaaagaaactttgtggcctgagttggataagttgctccgaaatgaggatgatgcaaatactgtctctaccccctatacagctgctattcttgaatatcgagtagtgattcatgacccaactgtcacatcatcctatgataatcacataaacgtggcaaatgggaatgctgtgtttgatattcatcatccttgcagggcgaatgttgctatacagagggagcttcacaaacctgagtctgaccgttcttgcatacatttggaatttgatatatcagggactggcataacatacgaaactggagaccatgtgggtgtctatgctgataactgcaacgaaactgttgaagaaactgggaagttgttgggtcagaatttagatctattgttttctcttcacactgataaggaggatggcacttccctaggtggttctctcctgcctcctttccctggcccttgcacactgcgtactgcattagcacgctatgctgatctcttgaaccccccacgaaaggctgctttagttgctttagcttctcatgcatctgaacctagcgaagcagaaagattaaagttcctttcgtctcctcaggggaaggatgagtactccaaatgggtggttggaagccagagaagtctccttgaggtgatggctgagtttccatcagccaaacctccactaggtgttttttttgctgcagtggcccctcgtttacagcctcgttattattctatttcatcctctcctaggtttgctccgcaaagggtacatgttacttgtgccttggtgtatggtccaactcccactggtagaattcacaaaggagtatgttcaacctggatgaagaatgctattcccttagaaaaaagtcccgactgtagctgggctcctatttttattaggccatcaaatttcaagctaccagttgatcattcaattcctattattatggttggacctggtactggtcttgcacctttcaggggatttttacaggaaagatttgccctcaaagaggctggtgttcaacaaggccctgcaatactcttctttggatgtaggaatcgtcgattggattttatttatgaggaggagctaaagaattttgtggaacaaggttctctgtcagaattgatagttgcattctctagagagggggccgaaaaggaatatgttcaacacaagatgatggatcaagctgcacagctgtggagtttgatttctcaaggaggttatctttacgtctgtggtgatgccaagggtatggccagagatgttcatcgaactcttcataccattgtccagcagcaggaaaatgtggactcgacaaaggctgaggctatagtgaaaaaacttcagatggatggacgttacctaagggatgtgtggtga

SEQ ID NO: 1123 - protein, 691 aa, Glycine max
MASNSDLVRAVESLLGVSLADSVSDSLLLIATTSAAVIIGLLVFLWKKSSDRSKEVKPVIVPKGLPKDEDDEIDVADGKTKVTIFFGTQTGTAEGFAKALAEEIKARYDKAAVKVVDLDDYAADDDQYEEKLKKETVAFFMLATYGDGEPTDNAARFYKWFTEGKDERGTSLQQLTYGVFGLGNRQYEHFNKIGKVVDEELSEQGAKRLVTLGLGDDDQSIEDDFSAWKETLWPELDKLLRNEDDANTVSTPYTAAILEYRVVIHDPTVTSSYDNHINVANGNAVFDIHHPCRANVAIQRELHKPESDRSCIHLEFDISGTGITYETGDHVGVYADNCNETVEETGKLLGQNLDLLFSLHTDKEDGTSLGGSLLPPFPGPCTLRTALARYADLLNPPRKAALVALASHASEPSEAERLKFLSSPQGKDEYSKWVVGSQRSLLEVMAEFPSAKPPLGVFFAAVAPRLQPRYYSISSSPRFAPQRVHVTCALVYGPTPTGRIHKGVCSTWMKNAIPLEKSPDCSWAPIFIRPSNFKLPVDHSIPIIMVGPGTGLAPFRGFLQERFALKEAGVQQGPAILFFGCRNRRLDFIYEEELKNFVEQGSLSELIVAFSREGAEKEYVQHKMMDQAAQLWSLISQGGYLYVCGDAKGMARDVHRTLHTIVQQQENVDSTKAEAIVKKLQMDGRYLRDVW

SEQ ID NO: 1124 - DNA, 2076 bp, Glycine max
  CDS (1)..(2076)
atggcttccaattccgatttggtccgcgccgttgagtcgctcctcggcgtctcgctcgccgattccgtctccgattctttgctcctcattgcgaccacctccgccgccgtcataatcggccttctcgtgtttctctggaagaaatcttcggatcggagcaaggaggtgaagccggtgatcgtgccgaagggcttgccgaaggatgaggacgacgagatcgatgttgccgacgggaagactaaggtcacgattttcttcggtactcaaaccggcactgctgaaggctttgctaaggcattggcagaggagatcaaggcaagatatgataaagcagctgtcaaagttgttgacctggatgactatgcagcggatgatgatcaatatgaggagaagctgaagaaagagactgttgcatctttcatgctggcaacttatggagatggagagccaactgataatgctgcaagattctacaaatggtttactgaggggaaagatgagaggggaacctcgcttcaacagctcacatatggagtttttggcctgggtaacagacaatacgaacactttaataagataggtaaagttgttgatgaagaacttagtgaacaaggagcaaagcgtcttgttacacttggattaggtgatgatgatcaatccattgaagatgatttttctgcctggaaagaaactttgtggcctgagttggataagttgctccgaaatgaggatgatgcaaatactgtctctaccccctatacagctgctattcttgaatatcgagtagtgattcatgacccaactgtcacatcatcctatgataatcacataaacgtggcaaatgggaatgctgtgtttgatattcatcatccttgcagggcgaatgttgctatacagagggagcttcacaaacctgagtctgaccgttcttgcatacatttggaatttgatatatcagggactggcataacatacgaaactggagaccatgtcggtgtctatgctgataactgcaacgaaactgttgaagaagctgggaagttgttgggtcagaatttagatctattgttttctcttcacactgataaggaggatggcacttccctaggcggttctctcctgcctcctttccctggcccttgcactctgcgtactgcattagcacgctatgctgatctcttgaaccccccacgaaaggctgctttagttgctttagctgctcatgcttctgaacttagtgaagcagaaagattaaagttcctttcatctcctcagggaaaggatgagtactccaaatgggtggttggaagccagagaagtctccttgaggtgatggctgagttcccatcagccaaacctccccttggtgttttttttgctgcagtagcccctcgtttacagcctcgttattattctatttcatcctctcctaggtttgctccgcaaagggtacatgttacttgtgccttggtgtatggtccaactcccactggtagaattcacaaaggagtatgttcaacctggatgaagaatgctattcccttagaaaaaagtcccgactgttgctgggctcctatttttattaggccatcgaatttcaagctaccagttgatcattcaattcctattattatggttggacctggtactggtcttgcacctttcaggggatttttacaggaaagatttgcgctcaaagaggatggtgttcaacttggccctgcaatactcttctttggatgtaggaatcgtcgaatggattttatttatgaggatgagctaaagaattttgtggaacaaggttctctttcagaattgatagttgcattctctagagagggggctgaaaaggaatatgttcaacacaagatgatggatcaagctgcacatctgtggagtttgatttctcaaggaggttatctttacgtctgtggtgatgccaagggtatggccagagatgttcatcgaattcttcataccattgtccagcagcaggaaaatgtggactcgacaaaggctgaggctatagtgaaaaaacttcagatggatggacgttacctaagggacgtatggtga

SEQ ID NO: 1125 - protein, 691 aa, Glycine max
MASNSDLVRAVESLLGVSLADSVSDSLLLIATTSAAVIIGLLVFLWKKSSDRSKEVKPVIVPKGLPKDEDDEIDVADGKTKVTIFFGTQTGTAEGFAKALAEEIKARYDKAAVKVVDLDDYAADDDQYEEKLKKETVASFMLATYGDGEPTDNAARFYKWFTEGKDERGTSLQQLTYGVFGLGNRQYEHFNKIGKVVDEELSEQGAKRLVTLGLGDDDQSIEDDFSAWKETLWPELDKLLRNEDDANTVSTPYTAAILEYRVVIHDPTVTSSYDNHINVANGNAVFDIHHPCRANVAIQRELHKPESDRSCIHLEFDISGTGITYETGDHVGVYADNCNETVEEAGKLLGQNLDLLFSLHTDKEDGTSLGGSLLPPFPGPCTLRTALARYADLLNPPRKAALVALAAHASELSEAERLKFLSSPQGKDEYSKWVVGSQRSLLEVMAEFPSAKPPLGVFFAAVAPRLQPRYYSISSSPRFAPQRVHVTCALVYGPTPTGRIHKGVCSTWMKNAIPLEKSPDCCWAPIFIRPSNFKLPVDHSIPIIMVGPGTGLAPFRGFLQERFALKEDGVQLGPAILFFGCRNRRMDFIYEDELKNFVEQGSLSELIVAFSREGAEKEYVQHKMMDQAAHLWSLISQGGYLYVCGDAKGMARDVHRILHTIVQQQENVDSTKAEAIVKKLQMDGRYLRDVW

SEQ ID NO: 1126 - DNA, 2076 bp, Glycine max
  CDS (1)..(2076)
atgccttccaattccgatttggtccgcgccgttgagtcgctcctcggcgtctcgctcgccgattccgtctccgattcgctgctcctcatcgccaccacctccgccgcgctcataatcggcctcctcgtgtttctctggaagaaatcttcggatcggagcaaggagctaaagccggtgatcgtgccgaagggcttgccgaaggacgacgacgacgaggttgatgttgccgacgggaagactaaggtcactattttcttcggtactcaaaccggtaccgctgaaggctttgctaaggcattggcagaggagatcaaggcaagatatgataaagcagctgtcaaagttgttgacctggatgactatgcagcggatgatgatcaatatgaggagaagctcaagaaagagactcttgcatttttcatgctggcaacttatggagatggagagccaactgataatgctgcaagattctacaaatggtttactgaggggaaagatgagaggggcacctggcttcaacatctcacatatggagtttttggcctgggtaacagacaatacgaacactttaataagataggtaaagttgttgatgaagatcttagtgaacaaggtgcaaagcgtcttgttacatttggattaggcgatgatgatcaatccattgaagatgatttttctgcctggaaagaaactttgtggcctgagttggatcagttgctccgagatgaggatgatgcaaatactgtctctaccccatatacagctgctattcttgaatatcgagtagtgattcatgacccgactttcacatcatcctatgataatcacgtaaccgtggcaaatgggaatgctgtgtttgatattcatcatccttgcagggtgaatgttgctgtacaaagggagcttcacaaacccgagtctgaccgttcttgcatacatttggaatttgatatatcagggactggcttaacatatgaaactggagaccatgtgggtgtttatgctgataactgcgacgaaactgttgaagaaactgggaagttgttgggtcagaatttagatctattgttttctcttcacactgataaggaggatggcacttccctaggtggttctctcctgcctcctttccctggcccttgcacactgcgtactgcattagcacgctatgctgatctcttgaaccccccacgaaaggctgctttagttgctttagcttctcatgcatctgaacctagcgaagcagaaagattaaagttcctttcgtctcctcaggggaaggatgagtactccaaatgggtggttggaagccagagaagtctccttgaggtgatggctgagtttccatcagccaaacctccactaggtgttttttttgctgcagtggcccctcgtttacagcctcgttattattctatttcatcctctcctaggtttgctccgcaaagggtacatgttacttgtgccttggtgtatggtccaactcccactggtagaattcacaaaggagtatgttcaacctggatgaagaatgctattcccttagaaaaaagtcccgactgtagctgggctcctatttttattaggccatcaaatttcaagctaccagttgatcattcaattcctattattatggttggacctggtactggtcttgcacctttcaggggatttttacaggaaagatttgccctcaaagaggctggtgttcaacaaggccctgcaatactcttctttggatgtaggaatcgtcgaatggattttatttatgaggatgagctaaagaattttgtggaacaaggttctctttcagaattgatagttgcattctctagagagggggccgaaaaggaatatgttcaacacaagatgatggatcaagctgcacatctgtggagtttgatttctcaaggaggttatctttacgtctgtggtgatgccaagggtatggccagagatgttcatcgaactcttcataccattgtccagcagcaggaaaatgtggactcgacaaaggctgaggctatagtgaaaaaacttcagatggatggacgttacctaagggatgtgtggtga

SEQ ID NO: 1127 - protein, 691 aa, Glycine max
MPSNSDLVRAVESLLGVSLADSVSDSLLLIATTSAALIIGLLVFLWKKSSDRSKELKPVIVPKGLPKDDDDEVDVADGKTKVTIFFGTQTGTAEGFAKALAEEIKARYDKAAVKVVDLDDYAADDDQYEEKLKKETLAFFMLATYGDGEPTDNAARFYKWFTEGKDERGTWLQHLTYGVFGLGNRQYEHFNKIGKVVDEDLSEQGAKRLVTFGLGDDDQSIEDDFSAWKETLWPELDQLLRDEDDANTVSTPYTAAILEYRVVIHDPTFTSSYDNHVTVANGNAVFDIHHPCRVNVAVQRELHKPESDRSCIHLEFDISGTGLTYETGDHVGVYADNCDETVEETGKLLGQNLDLLFSLHTDKEDGTSLGGSLLPPFPGPCTLRTALARYADLLNPPRKAALVALASHASEPSEAERLKFLSSPQGKDEYSKWVVGSQRSLLEVMAEFPSAKPPLGVFFAAVAPRLQPRYYSISSSPRFAPQRVHVTCALVYGPTPTGRIHKGVCSTWMKNAIPLEKSPDCSWAPIFIRPSNFKLPVDHSIPIIMVGPGTGLAPFRGFLQERFALKEAGVQQGPAILFFGCRNRRMDFIYEDELKNFVEQGSLSELIVAFSREGAEKEYVQHKMMDQAAHLWSLISQGGYLYVCGDAKGMARDVHRTLHTIVQQQENVDSTKAEAIVKKLQMDGRYLRDVW

SEQ ID NO: 1128 - DNA, 2085 bp, Zea mays
  CDS (1)..(2085)
atggcggcgctggaggcggcgagggagtgggcgggctccgtcataccgccggagctcgccgccgccgcggggggagacccactcgccgcgctggcggccaccgccgcggccctcgtcgcggggctgcttattatcgctgtctggttccgatccggaggcgggacgccgtccaagccggtcgccacgccggtacggccaccgccggtcaaggtggacgccgacgccgacgttgatgacggccggaagcgcgtcaccatcttcttcggcacacagactggcaccgccgaggggttcgcaaagtccatggcggaggaggcgagggcgcggtacgagaaggccgtgttcaaagtggtggatctggatgactatgctcaggaggacgaggaatacgaggagaagctgaagaaggaaactgtggtgctgttcttcctagcaacatatggggatggggagccaactgataatgcagcacgattctacaaatggtttactgagggaaaagagaaggaagtttggttgaaggatcttaaatatggtatttttggccttggaaacaggcaatacgaacattttaataaggttgcaaaggtggtagatgagctagtagaggagcagggtgggaaacgtcttgttcctgttggccttggagacgatgatcagcgcattgaggatgatttcactgcatggaaagaactagcgtggccagaattagatcaattgctccgcgacgaggatgacacaactggtgcatcgactccatatactgctgctattcctgaatacagagttgttttcattgacaaatctgacctgtcattccaagatagatcatggacactagccaacggtactggtgtgattgatattcaacacccttgcaggtctaatgttgctgttcggaaggagctgcacaaaccagcttcagatcgctcttgtatccatctcgagtttgacatttctggcactggtcttgtgtatgaaaccggagaccatgttggtgtatatgcagaaaattctgttcagactgtggaggaggttgaaaggctacttgacctttctccagacacattcttctccatccatgcagatgcagaagatggatctcctcgtaaaggaggaggttccttggccccacctttcccatctccatgtaccttgcggactgcgcttctacgatatgctgatctactcaatccaccgaagaaggctgctttgcttgctttagcttctcatgcatctgatccagctgaagctgaacgacttaggttcttggcctctcctgctggaaaggatgagtattctcaatggataactgctagtcagaggagtcttcttgaagttatggctgcattcccttcagctaagccaccactgggagtgtttttcgcagcaatagctcctcgtctgcaaccacgatactactcaatttcatcatctccaaagatggctccctccagaattcatgtaacatgtgcattagtttatgggccttcaccaacaggaaggatccaccaaggagtttgttcaacatggatgaagaatacaattcctctggaatatagcgaagaatgcagctgggctcccatatttgtgaggcagtcaaatttcaagttacctgctgacccatccactccgattatcatgattggtcctgggacagggctggctccttttagaggcttcttgcaggaaaggttagcactgaaacaatctggagcagaactgggcacttcaatccttttctttggatgcaggaaccgtaatatggactacatatatgaagatgagttgcaaactttccttgaggagggggcgctttctgagctaattgttgcattctctcgggaagggccaacgaaagaatatgtgcagcataagatggtggaaaaggccacagaaatttggaacatcatctcaaatggtggttacttatatgtttgcggtgatgccaagggaatggctagagatgtacacaaaatgcttcatacaatagtccaagagcagggatctttggataactccaaaaccgagagctatgtaaagagcctgcagatggaaggaaggtacctccgtgatgtatggtga

SEQ ID NO: 1129 - protein, 694 aa, Zea mays
MAALEAAREWAGSVIPPELAAAAGGDPLAALAATAAALVAGLLIIAVWFRSGGGTPSKPVATPVRPPPVKVDADADVDDGRKRVTIFFGTQTGTAEGFAKSMAEEARARYEKAVFKVVDLDDYAQEDEEYEEKLKKETVVLFFLATYGDGEPTDNAARFYKWFTEGKEKEVWLKDLKYGIFGLGNRQYEHFNKVAKVVDELVEEQGGKRLVPVGLGDDDQRIEDDFTAWKELAWPELDQLLRDEDDTTGASTPYTAAIPEYRVVFIDKSDLSFQDRSWTLANGTGVIDIQHPCRSNVAVRKELHKPASDRSCIHLEFDISGTGLVYETGDHVGVYAENSVQTVEEVERLLDLSPDTFFSIHADAEDGSPRKGGGSLAPPFPSPCTLRTALLRYADLLNPPKKAALLALASHASDPAEAERLRFLASPAGKDEYSQWITASQRSLLEVMAAFPSAKPPLGVFFAAIAPRLQPRYYSISSSPKMAPSRIHVTCALVYGPSPTGRIHQGVCSTWMKNTIPLEYSEECSWAPIFVRQSNFKLPADPSTPIIMIGPGTGLAPFRGFLQERLALKQSGAELGTSILFFGCRNRNMDYIYEDELQTFLEEGALSELIVAFSREGPTKEYVQHKMVEKATEIWNIISNGGYLYVCGDAKGMARDVHKMLHTIVQEQGSLDNSKTESYVKSLQMEGRYLRDVW

SEQ ID NO: 1130 - DNA, 2085 bp, Zea mays
  CDS (1)..(2085)
atggcggcactggaggcggtgaggtcgtgggcggtgtccgtcatcccgccggagctcgccgccgccgcggggggagacccgctcgccgcgctggcagccaccgccgcggcccttgtcgcggggctgcttatcctcgccgtctggttccgatccggaggcggggcgccgtccaagccggtcgccacgccattacggccgccgccggtgaaggtggacgccgacgccgacgtggacgacgggcggaagcgcgtcaccatcttcttcggcacgcagaccggcaccgccgagggattcgccaagtcgatggcggacgaggcgagggtgcggtacgagaaggccgtgtttaaagtggtggatctggatgactatgctcaggaggacgaggaatacgaggagaagctgaagaaggaaactgtggcgctgttcttcttagcaacatatggggatggagagccaactgataacgcagcaagattctacaaatggtttactgagggaaaagagaaggaagtttggctgaaggatcttaaatatggtatttttggccttggaaacaggcagtacgaacactttaataaggttgcaaaggtggtagatgagctactagaggagcagggtgggaaacgtattgttcctgttggccttggagatgatgatcagtgcattgaggatgatttcactgcatggaaagaactagtgtggccagagttggatcaattgctccgcgacgaggatgacacaaatggtgcatcaactccatatactgctgctattcctgaatacagagttgttttcattgataaatctgacctgtcattccaagatagatcatggacactagccaacggtactggtgtgattgatattcaccacccttgcagggctaatgttgctgttcgaaaggagctgcacaaaccagcttcagaccgctcttgtattcatcttgagtttgatatttctggcactagtcttgtgtatgaaacaggagaccatgttggcgtatatgcagaaaattctgttgagactgtggaggaggttgaaaggctacttgacctttctccagacacattcttctccatccatgcagatgcagaagatggatctcctcgtaaaggaggaggttccttggccccacctttcccatctccatgtaccttgcggactgcgcttctacgatatgctgatctactcaatccaccgaagaaggctgctttgcttgctttagcttctcacgcatctgatccagctgaagctgagcgacttagattcttggcttctccttctggaaaggatgagtattctcaatggataactgctagtcagaggagccttcttgaagttatggccgcattcccttcagctaagccaccactgggagtgttttttgcagcaatagctcctcgtctgcaaccacgatactactcaatttcatcatctccaaagatggctccctccagaattcatgtaacatgtgcgttagtttatgggccttcaccaacaggaaggatccaccaaggagtttgttcaacatggatgaagaatacaattcctctggaatatagcgaagaatgcagctgggctcccatctttgtgaggcagtcaaatttcaagttacctgctgatccgtccactcctattatcatgattggtcctgggacagggctggctccttttagaggcttcttgcaggaaaggttagcattgaaacaatctggggcagaattgggcacttcaatccttttctttggatgcaggaaccgtaatatggactacatatatgaagatgagttgcaaactttccttgaggagggggcgctttctgagctaattgttgcattctctcgggaagggccaacgaaagaatatgtgcagcataagatggtggaaaaggccacagatatttggaacatcatctcaaatggtggttacttatatgtttgcggtgatgccaagggaatggctagagatgtacacaaaatgcttcatacaatagtccaagagcagggatctttggataactccaaaaccgagagctatgtaaagagcctgcagatggaaggaaggtacctccgtgatgtatggtga

SEQ ID NO: 1131 - protein, 694 aa, Zea mays
MAALEAVRSWAVSVIPPELAAAAGGDPLAALAATAAALVAGLLILAVWFRSGGGAPSKPVATPLRPPPVKVDADADVDDGRKRVTIFFGTQTGTAEGFAKSMADEARVRYEKAVFKVVDLDDYAQEDEEYEEKLKKETVALFFLATYGDGEPTDNAARFYKWFTEGKEKEVWLKDLKYGIFGLGNRQYEHFNKVAKVVDELLEEQGGKRIVPVGLGDDDQCIEDDFTAWKELVWPELDQLLRDEDDTNGASTPYTAAIPEYRVVFIDKSDLSFQDRSWTLANGTGVIDIHHPCRANVAVRKELHKPASDRSCIHLEFDISGTSLVYETGDHVGVYAENSVETVEEVERLLDLSPDTFFSIHADAEDGSPRKGGGSLAPPFPSPCTLRTALLRYADLLNPPKKAALLALASHASDPAEAERLRFLASPSGKDEYSQWITASQRSLLEVMAAFPSAKPPLGVFFAAIAPRLQPRYYSISSSPKMAPSRIHVTCALVYGPSPTGRIHQGVCSTWMKNTIPLEYSEECSWAPIFVRQSNFKLPADPSTPIIMIGPGTGLAPFRGFLQERLALKQSGAELGTSILFFGCRNRNMDYIYEDELQTFLEEGALSELIVAFSREGPTKEYVQHKMVEKATDIWNIISNGGYLYVCGDAKGMARDVHKMLHTIVQEQGSLDNSKTESYVKSLQMEGRYLRDVW

SEQ ID NO: 1132 - DNA, 20 bp, Artificial sequence
  primer
atgacgacacaggtcccacc

SEQ ID NO: 1133 - DNA, 24 bp, Artificial sequence
  primer
ttagtagacatctcgctgataacg

SEQ ID NO: 1134 - protein, 750 aa, Artificial sequence
  consensus sequence
  Variant (2)..(24): Xaa in position 2 to 24 is any amino acid
  Variant (25)..(58): Xaa in position 25 to 58 is any or no amino acid
  Variant (60)..(62): Xaa in position 60 to 62 is any amino acid
  Variant (63)..(64): Xaa in position 63 to 64 is any or no amino acid
  Variant (68)..(68): Xaa in position 68 is any amino acid
  Variant (70)..(72): Xaa in position 70 to 72 is any amino acid
  Variant (74)..(94): Xaa in position 74 to 94 is any amino acid
  Variant (95)..(96): Xaa in position 95 to 96 is any or no amino acid
  Variant (98)..(113): Xaa in position 98 to 113 is any amino acid
  Variant (114)..(119): Xaa in position 114 to 119 is any or no amino acid
  Variant (121)..(121): Xaa in position 121 is any amino acid
  Variant (123)..(123): Xaa in position 123 is any amino acid
  Variant (126)..(129): Xaa in position 126 to 129 is any amino acid
  Variant (131)..(143): Xaa in position 131 to 143 is any amino acid
  Variant (144)..(149): Xaa in position 144 to 149 is any or no amino acid
  Variant (151)..(156): Xaa in position 151 to 156 is any amino acid
  Variant (158)..(159): Xaa in position 158 to 159 is any amino acid
  Variant (162)..(164): Xaa in position 162 to 164 is any amino acid
  Variant (166)..(167): Xaa in position 166 to 167 is any amino acid
  Variant (169)..(172): Xaa in position 169 to 172 is any amino acid
  Variant (174)..(175): Xaa in position 174 to 175 is any amino acid
  Variant (177)..(178): Xaa in position 177 to 178 is any amino acid
  Variant (180)..(182): Xaa in position 180 to 182 is any amino acid
  Variant (184)..(193): Xaa in position 184 to 193 is any amino acid
  Variant (195)..(203): Xaa in position 195 to 203 is any amino acid
  Variant (204)..(207): Xaa in position 204 to 207 is any or no amino acid
  Variant (209)..(242): Xaa in position 209 to 242 is any amino acid
  Variant (243)..(281): Xaa in position 243 to 281 is any or no amino acid
  Variant (283)..(284): Xaa in position 283 to 284 is any amino acid
  Variant (286)..(296): Xaa in position 286 to 296 is any amino acid
  Variant (297)..(308): Xaa in position 297 to 308 is any or no amino acid
  Variant (310)..(314): Xaa in position 310 to 314 is any amino acid
  Variant (316)..(316): Xaa in position 316 is any amino acid
  Variant (318)..(322): Xaa in position 318 to 322 is any amino acid
  Variant (323)..(323): Xaa in position 323 is any or no amino acid
  Variant (325)..(326): Xaa in position 325 to 326 is any amino acid
  Variant (328)..(329): Xaa in position 328 to 329 is any amino acid
  Variant (332)..(333): Xaa in position 332 to 333 is any amino acid
  Variant (335)..(338): Xaa in position 335 to 338 is any amino acid
  Variant (340)..(343): Xaa in position 340 to 343 is any amino acid
  Variant (345)..(366): Xaa in position 345 to 366 is any amino acid
  Variant (367)..(389): Xaa in position 367 to 389 is any or no amino acid
  Variant (392)..(408): Xaa in position 392 to 408 is any amino acid
  Variant (409)..(411): Xaa in position 409 to 411 is any or no amino acid
  Variant (413)..(461): Xaa in position 413 to 461 is any amino acid
  Variant (462)..(492): Xaa in position 462 to 492 is any or no amino acid
  Variant (494)..(494): Xaa in position 494 is any amino acid
  Variant (497)..(497): Xaa in position 497 is any amino acid
  Variant (501)..(501): Xaa in position 501 is any amino acid
  Variant (504)..(511): Xaa in position 504 to 511 is any amino acid
  Variant (513)..(513): Xaa in position 513 is any amino acid
  Variant (515)..(517): Xaa in position 515 to 517 is any amino acid
  Variant (519)..(528): Xaa in position 519 to 528 is any amino acid
  Variant (529)..(530): Xaa in position 529 to 530 is any or no amino acid
  Variant (532)..(533): Xaa in position 532 to 533 is any amino acid
  Variant (535)..(553): Xaa in position 535 to 553 is any amino acid
  Variant (554)..(579): Xaa in position 554 to 579 is any or no amino acid
  Variant (581)..(581): Xaa in position 581 is any amino acid
  Variant (584)..(587): Xaa in position 584 to 587 is any amino acid
  Variant (588)..(588): Xaa in position 588 is any or no amino acid
  Variant (590)..(590): Xaa in position 590 is any amino acid
  Variant (593)..(593): Xaa in position 593 is any amino acid
  Variant (599)..(599): Xaa in position 599 is any amino acid
  Variant (604)..(604): Xaa in position 604 is any amino acid
  Variant (606)..(606): Xaa in position 606 is any amino acid
  Variant (608)..(614): Xaa in position 608 to 614 is any amino acid
  Variant (615)..(622): Xaa in position 615 to 622 is any or no amino acid
  Variant (624)..(626): Xaa in position 624 to 626 is any amino acid
  Variant (631)..(636): Xaa in position 631 to 636 is any amino acid
  Variant (639)..(639): Xaa in position 639 is any amino acid
  Variant (641)..(642): Xaa in position 641 to 642 is any amino acid
  Variant (644)..(648): Xaa in position 644 to 648 is any amino acid
  Variant (649)..(656): Xaa in position 649 to 656 is any or no amino acid
  Variant (658)..(658): Xaa in position 658 is any amino acid
  Variant (660)..(664): Xaa in position 660 to 664 is any amino acid
  Variant (666)..(666): Xaa in position 666 is any amino acid
  Variant (669)..(672): Xaa in position 669 to 672 is any amino acid
  Variant (673)..(675): Xaa in position 673 to 675 is any or no amino acid
  Variant (677)..(677): Xaa in position 677 is any amino acid
  Variant (681)..(684): Xaa in position 681 to 684 is any amino acid
  Variant (686)..(696): Xaa in position 686 to 696 is any amino acid
  Variant (697)..(697): Xaa in position 697 is any or no amino acid
  Variant (700)..(701): Xaa in position 700 to 701 is any amino acid
  Variant (708)..(709): Xaa in position 708 to 709 is any amino acid
  Variant (712)..(712): Xaa in position 712 is any amino acid
  Variant (715)..(717): Xaa in position 715 to 717 is any amino acid
  Variant (719)..(730): Xaa in position 719 to 730 is any amino acid
  Variant (731)..(732): Xaa in position 731 to 732 is any or no amino acid
  Variant (734)..(744): Xaa in position 734 to 744 is any amino acid
  Variant (747)..(747): Xaa in position 747 is any amino acid
WXXXXXXXXXXXXXXXXXXXXXXXXXXXXXXXXXXXXXXXXXXXXXXXXXXXXXXXXXTXXXXXQTGXAXXXAXXXXXXXXXXXXXXXXXXXXXXXYXXXXXXXXXXXXXXXXXXXXXXTXGXGEXXXXAXXXXXXXXXXXXXXXXXXXLXXXXXXVXXLGXXXYXXFXXXXKXXDXXLXXXGXXXXXXXXXXDXXXXXXXXXXXXXWXXXXXXXXXXXXXXXXXXXXXXXXXXXXXXXXXXXXXXXXXXXXXXXXXXXXXXXXXXXXXXXXXXXXXXXXXPXXAXXXXXXXXXXXXXXXXXXXXXXXSXXXXXHXEXXXXXXGXXYXXGDXXGXXXXNXXXXVXXXXXXXXXXXXXXXXXXXXXXXXXXXXXXXXXXXXXXXXXXXXXALXXXXXXXXXXXXXXXXXXXXAXXXXXXXXXXXXXXXXXXXXXXXXXXXXXXXXXXXXXXXXXXXXXXXXXXXXXXXXXXXXXXXXXXXXXXXXXXXXXXXXLXPRXYSIXSSXXXXXXXXHXTXXXVXXXXXXXXXXXXGXXSXXXXXXXXXXXXXXXXXXXXXXXXXXXXXXXXXXXXXXXXXXXXXFXLPXXXXXPXIMXGPGTGXAPFRXFXQXXXXXXXXXXXXXXXGXXXLFFGXXXXXXDFXYXXEXXXXXXXXXXXXXGXLXXXXXAXSRXXXXXXXKXYVQXXXXEXXXXXXXXXXXXGAXXYVCGDAXXMAXDVXXXLXXXXXXXXXXXXXXAXXXXXXXXXXXRYXRDV

SEQ ID NO: 1135 - protein, 21 aa, Artificial sequence
  protein pattern
  Variant (2)..(3): Xaa in position 2 to 3 is any amino acid
  Variant (5)..(5): Xaa in position 5 is Ile or Val
  Variant (7)..(7): Xaa in position 7 is Pro or Ser
  Variant (11)..(11): Xaa in position 11 is Ile, Leu or Val
  Variant (16)..(16): Xaa in position 16 is Ala, Gly or Ser
  Variant (17)..(17): Xaa in position 17 is Phe or Tyr
  Variant (18)..(18): Xaa in position 18 is Ile, Leu, Met or Val
  Variant (19)..(19): Xaa in position 19 is Glu or Gln
  Variant (20)..(20): Xaa in position 20 is any amino acid
PXXMXGXGTGXAPFRXXXXXR

SEQ ID NO: 1136 - protein, 8 aa, Artificial sequence
  protein pattern
  Variant (3)..(3): Xaa in position 3 is any amino acid
  Variant (4)..(4): Xaa in position 4 is Phe, Ile, Leu or Val
  Variant (6)..(6): Xaa in position 6 is Ile or Val
GAXXYXCG

SEQ ID NO: 1137 - protein, 29 aa, Artificial sequence
  protein pattern
  Variant (2)..(5): Xaa in position 2 to 5 is any amino acid
  Variant (9)..(14): Xaa in position 9 to 14 is any amino acid
  Variant (16)..(16): Xaa in position 16 is Phe or Tyr
  Variant (17)..(17): Xaa in position 17 is Ile or Leu
  Variant (19)..(19): Xaa in position 19 is Glu or Gln
  Variant (20)..(20): Xaa in position 20 is any amino acid
  Variant (22)..(28): Xaa in position 22 to 28 is any amino acid
GXXXXFFGXXXXXXDXXYXXEXXXXXXXG

SEQ ID NO: 1138 - protein, 38 aa, Artificial sequence
  protein pattern
  Variant (2)..(4): Xaa in position 2 to 4 is any amino acid
  Variant (5)..(7): Xaa in position 5 to 7 is any or no amino acid
  Variant (9)..(9): Xaa in position 9 is Phe, Ile or Leu
  Variant (10)..(10): Xaa in position 10 is Ala, Gly or Ser
  Variant (13)..(13): Xaa in position 13 is Asp or Asn
  Variant (14)..(14): Xaa in position 14 is any amino acid
  Variant (15)..(15): Xaa in position 15 is Gln, Ser or Thr
  Variant (17)..(18): Xaa in position 17 to 18 is any amino acid
  Variant (20)..(20): Xaa in position 20 is Ala, Cys, Asn or Ser
  Variant (21)..(22): Xaa in position 21 to 22 is any amino acid
  Variant (23)..(23): Xaa in position 23 is Ala or Gly
  Variant (24)..(25): Xaa in position 24 to 25 is any amino acid
  Variant (26)..(26): Xaa in position 26 is Phe, Ile, Leu or Val
  Variant (28)..(29): Xaa in position 28 to 29 is any amino acid
  Variant (30)..(30): Xaa in position 30 is Phe or Leu
  Variant (31)..(33): Xaa in position 31 to 33 is any amino acid
  Variant (35)..(35): Xaa in position 35 is Ala or Gly
  Variant (36)..(37): Xaa in position 36 to 37 is any amino acid
  Variant (38)..(38): Xaa in position 38 is Phe, Ile, Leu, Met or Val
LXXXXXXVXXLGXXXYXXFXXXXXXXDXXXXXXGXXXX

SEQ ID NO: 1139 - protein, 29 aa, Artificial sequence
  protein pattern
  Variant (2)..(2): Xaa in position 2 is any amino acid
  Variant (3)..(5): Xaa in position 3 to 5 is any or no amino acid
  Variant (8)..(8): Xaa in position 8 is any amino acid
  Variant (12)..(12): Xaa in position 12 is Ala or Ser
  Variant (14)..(14): Xaa in position 14 is Ala or Ser
  Variant (15)..(19): Xaa in position 15 to 19 is any amino acid
  Variant (20)..(20): Xaa in position 20 is Asp, Glu, Gly, Asn, Gln, Ser or Thr
  Variant (21)..(21): Xaa in position 21 is Glu or Arg
  Variant (22)..(22): Xaa in position 22 is Ala, Ile or Val
  Variant (24)..(24): Xaa in position 24 is Ile, Leu or Val
  Variant (26)..(26): Xaa in position 26 is any amino acid
  Variant (27)..(27): Xaa in position 27 is Ala, Asp, Gly or Ser
  Variant (28)..(28): Xaa in position 28 is any amino acid
  Variant (29)..(29): Xaa in position 29 is Leu or Val
LXXXXPRXYSIXSXXXXXXXXXHXTXXXX

SEQ ID NO: 1140 - protein, 11 aa, Artificial sequence
  protein pattern
  Variant (3)..(3): Xaa in position 3 is Asp or Glu
  Variant (4)..(4): Xaa in position 4 is Gly or Gln
  Variant (5)..(6): Xaa in position 5 to 6 is any amino acid
  Variant (8)..(8): Xaa in position 8 is any amino acid
SRXXXXKXYVQ

SEQ ID NO: 1141 - protein, 20 aa, Artificial sequence
  protein pattern
  Variant (2)..(2): Xaa in position 2 is any amino acid
  Variant (3)..(3): Xaa in position 3 is Gly or Thr
  Variant (4)..(4): Xaa in position 4 is any amino acid
  Variant (7)..(8): Xaa in position 7 to 8 is any or no amino acid
  Variant (10)..(11): Xaa in position 10 to 11 is any amino acid
  Variant (12)..(12): Xaa in position 12 is any or no amino acid
  Variant (14)..(15): Xaa in position 14 to 15 is any amino acid
  Variant (16)..(16): Xaa in position 16 is Phe or Leu
  Variant (17)..(17): Xaa in position 17 is Phe, His, Trp or Tyr
  Variant (18)..(19): Xaa in position 18 to 19 is any amino acid
  Variant (20)..(20): Xaa in position 20 is Phe, Ile or Leu
TXXXGEXXPXXXAXXXXXXX

SEQ ID NO: 1142 - protein, 15 aa, Artificial sequence
  protein pattern
  Variant (2)..(2): Xaa in position 2 is Ile, Leu or Val
  Variant (3)..(3): Xaa in position 3 is Phe, Ile or Leu
  Variant (4)..(4): Xaa in position 4 is any amino acid
  Variant (5)..(5): Xaa in position 5 is Ala or Gly
  Variant (6)..(6): Xaa in position 6 is Ser or Thr
  Variant (7)..(7): Xaa in position 7 is Glu or Gln
  Variant (8)..(8): Xaa in position 8 is Ser or Thr
  Variant (10)..(10): Xaa in position 10 is any amino acid
  Variant (11)..(14): Xaa in position 11 to 14 is any or no amino acid
TXXXXXXXGXXXXXA

SEQ ID NO: 1143 - DNA, 891 bp, Escherichia coli
  CDS (1)..(891): transl_table=11
atgaccatgagaacaggatgtgaaccgacccggtttggtaatgaagctaagaccattattcacggtgatgcgcttgccgaacttaaaaagatccccgccgaaagtgtcgatctgatctttgccgacccaccatataacatcggtaaaaattttgatggtctgatcgaagcctggaaagaagatctgtttatcgactggctgtttgaagtgattgcagagtgccaccgcgttctgaaaaagcagggcagcatgtacatcatgaacagtacggaaaacatgccctttatcgatctccagtgccgcaagctttttaccatcaaaagtcgcatcgtctggtcatatgacagttctggagtgcaggcgaaaaaacactacggctccatgtacgaacccatcctgatgatggtgaaagacgcaaagaactacacattcaacggtgatgctattctggtagaagccaaaaccggatcgcagcgcgcgttgatcgattatcgcaaaaatcctccacagccttacaatcatcaaaaagtaccgggtaacgtttgggattttccgcgcgtgcgttatttgatggatgaatatgaaaaccacccgacgcaaaaaccggaagccttactgaaacgcattattctcgcctcttccaacccaggcgatatcgttctcgacccgtttgctggtagctttactaccggtgccgtagccatcgccagcggacgaaaattcattggtattgagatcaacagcgagtacatcaaaatggggcttcgacggctggatgtcgcgtcgcattactctgcggaagaactggcgaaagtgaaaaaaagaaagaccggcaacctgtcaaaacgaagccggttaagcgaagttgaccccgatctcattacaaagtaa

SEQ ID NO: 1144 - protein, 296 aa, Escherichia coli
MTMRTGCEPTRFGNEAKTIIHGDALAELKKIPAESVDLIFADPPYNIGKNFDGLIEAWKEDLFIDWLFEVIAECHRVLKKQGSMYIMNSTENMPFIDLQCRKLFTIKSRIVWSYDSSGVQAKKHYGSMYEPILMMVKDAKNYTFNGDAILVEAKTGSQRALIDYRKNPPQPYNHQKVPGNVWDFPRVRYLMDEYENHPTQKPEALLKRIILASSNPGDIVLDPFAGSFTTGAVAIASGRKFIGIEINSEYIKMGLRRLDVASHYSAEELAKVKKRKTGNLSKRSRLSEVDPDLITK

SEQ ID NO: 1145 - DNA, 885 bp, Escherichia coli O157:H7 EDL933
  CDS (1)..(885): transl_table=11
atgagaacaggatgtgaaccgacccggtttggtaatgaagctaagaccattattcacggtgatgcccttgccgaacttaaaaagctacctactgaaagcgtcgatctgatctttgccgacccaccgtataacatcggtaaaaattttgatggtctgatcgaagcctggaaagaagatctgtttatcgactggctgttagaagtgattgcagagtgccaccgcgttctgaaaaagcagggcagcatgtacatcatgaacagtacggaaaacatgccctttatcgatctccagtgccgcaagctttttaccatcaaaagtcgcatcgtctggtcatatgacagttctggagtgcaggcgaaaaaacactacggctccatgtacgaacccatcctgatgatggtgaaagacgcaaagaactacacattcaacggtgatgctattctggtagaagccaaaaccggatcgcagcgcgcgttgatcgattatcgcaaaaatcctccacagccttacaatcatcaaaaagtaccgggtaacgtctgggattttccgcgcgtgcgttatttgatggatgaatatgaaaaccacccgacgcaaaaaccggaagccttactgaaacgcattattctcgcctcttccaacccaggcgatatcgttctcgacccgtttgctggtagctttactaccggtgccgtagccatcgccagcggacgaaaattcattggtattgagatcaacagcgagtacatcaaaatggggcttcgacggctggatgtcgcgtcgcattactctgcggaagaactggcgaaagtgaaaaaaagaaagaccggcaacctgtcaaaacgaagccggttaagcgaagttgaccccgatctcattacaaagtaa

SEQ ID NO: 1146 - protein, 294 aa, Escherichia coli O157:H7 EDL933
MRTGCEPTRFGNEAKTIIHGDALAELKKLPTESVDLIFADPPYNIGKNFDGLIEAWKEDLFIDWLLEVIAECHRVLKKQGSMYIMNSTENMPFIDLQCRKLFTIKSRIVWSYDSSGVQAKKHYGSMYEPILMMVKDAKNYTFNGDAILVEAKTGSQRALIDYRKNPPQPYNHQKVPGNVWDFPRVRYLMDEYENHPTQKPEALLKRIILASSNPGDIVLDPFAGSFTTGAVAIASGRKFIGIEINSEYIKMGLRRLDVASHYSAEELAKVKKRKTGNLSKRSRLSEVDPDLITK

SEQ ID NO: 1147 - DNA, 885 bp, Salmonella typhimurium LT2
  CDS (1)..(885): transl_table=11
atgaaagcggaatgtgaacctcagtactttggcgatgaatcgaagaagattattcacggtgacgcgctaacagaacttaaaaaactgccttctgaaagcattgacttaatttttgccgatccgccttacaatatcggaaaagatttcgacggtatggtggagtcctgggacgaagcgtcttttctggcctggctgtatgaatgcattgatgagtgccaccgcgtactgaagaaacacggcaccatgtacatcatgaatagcacagaaaatatgccgtatatcgatctcaaatgccgaacgctttttaccatcaaaagccgtatcgtctggtcctatgatagttccggggtgcaggcgaaaaaatactttggttctatgtatgaaccgatcctgatgatggtaaaaaacccgaaaagctatacctttaaccgtgatgcgattctggtcgaaaccactacgggcgctaagcgcgcgctaatcgattatcgaaaaaacccgccccaaccatacaatcagaaaaaagtgccgggcaacgtctggtcatttcctcgcgtacgttatctgatggatgaatatgaaaaccatcctacgcaaaagcccagcgcgctgttaaaacggatcatactggcctcttctaacccgagcgataccgtattggaccctttcgcgggcagtttcaccacaggcgctgtcgcagcggcgtcaggtcgtaagtttatcggtattgaactcaataatgagtacgtaaaaatggggctcagaagattgagcgtcacttcgcattattcagaaaatgaacttgcaaaagtcaaaaagagaaaaacacaaaacctgtccaaaaagcagcgaaatgtcgggataaacgcgctatcttcagagaagtaa

SEQ ID NO: 1148 - protein, 294 aa, Salmonella typhimurium LT2
MKAECEPQYFGDESKKIIHGDALTELKKLPSESIDLIFADPPYNIGKDFDGMVESWDEASFLAWLYECIDECHRVLKKHGTMYIMNSTENMPYIDLKCRTLFTIKSRIVWSYDSSGVQAKKYFGSMYEPILMMVKNPKSYTFNRDAILVETTTGAKRALIDYRKNPPQPYNQKKVPGNVWSFPRVRYLMDEYENHPTQKPSALLKRIILASSNPSDTVLDPFAGSFTTGAVAAASGRKFIGIELNNEYVKMGLRRLSVTSHYSENELAKVKKRKTQNLSKKQRNVGINALSSEK

SEQ ID NO: 1149 - DNA, 888 bp, Nostoc sp. PCC 7120
  CDS (1)..(888): transl_table=11
atgtttgaaacatatgaagacgaagcacacatcttatttcatggagatgccttaaatattttgtcaagtaacattccaagtgaatctgtagatcttatttttatagaccccccgtacaacataggaaaacatttctctaactttcatgataaatgggaatctgaggaagaatatgcaaactgggcttataaatggctagatgagtgcattcgggtgctaaaatctcacggaactatttatgttatgaccagtacacaagccatgccatattttgatatttatttgcggcagaaattaacaattctgagtcgaatagtatggcattatgatagttctggagttcaagcaactaagtatttcggttctatgtatgaaccgatacttcattgtgttaagaacaaaagtaattatatttttaattcagaagaaatcaaaattgaagcgaaaactggcgcacaacgaaaattaattgattatagaaaggcagttccagcaccatacaatacagagaaagtgcctggcaatgtttggtatttttctcgtgtgagatatcggatgccagaatatgaaaatcatccttcacagaaaccagaatcattaatagaaagaattattttgtccagtagcaatgaagatagtttggtattagatccctttgcggggacgtttacagttgcttctgtagcaaagcgtttagggagaaaatcaattagtatagagtctcaagaagaatatttgaaaataggtttaagacgtgtattaggttgggaagaatataagggagaacaactttcaccaccaattaaaacacatattagcagaaataaaagtcatcagagtttagattcattacagcagagcctttttaatgccgataccacagcatga

SEQ ID NO: 1150 - protein, 295 aa, Nostoc sp. PCC 7120
MFETYEDEAHILFHGDALNILSSNIPSESVDLIFIDPPYNIGKHFSNFHDKWESEEEYANWAYKWLDECIRVLKSHGTIYVMTSTQAMPYFDIYLRQKLTILSRIVWHYDSSGVQATKYFGSMYEPILHCVKNKSNYIFNSEEIKIEAKTGAQRKLIDYRKAVPAPYNTEKVPGNVWYFSRVRYRMPEYENHPSQKPESLIERIILSSSNEDSLVLDPFAGTFTVASVAKRLGRKSISIESQEEYLKIGLRRVLGWEEYKGEQLSPPIKTHISRNKSHQSLDSLQQSLFNADTTA

SEQ ID NO: 1151 - DNA, 885 bp, Salmonella enterica subsp. arizonae serovar 62:z4,z23:--
  CDS (1)..(885): transl_table=11
atgaaagcggaatgtgaacctcagtactttggcgatgaatcgaaaaaaattattctcggcgacgcgctaacagaacttaaaaaactgccttctgaaagcattgacttaatttttgccgatccgccgtacaatatcggaaaagatttcgacggtatggtggaatcctgggacgaggcgtcttttctggcctggctgtatgaatgcgttgatgaatgctaccgcgtgctgaagaaacacggcactatgtatatcatgaacagcacagaaaatatgccgtatattgatctcaaatgtcgaacgctttttaccatcaaaagccgtatcgtctggtcctatgatagttccggagtacaggcgaaaaaatactttggttctatgtatgaaccgatcctgatgatggtaaaagactcaaaaacctatacctttaaccgtgacgcgattctggtcgaaaccactacgggcgctaagcgcgcgttaattgattatcgaaaaaacccgccccaaccgtacaatcagaaaaaagtgccgggcaatgtctggtcatttccacgcgtacgttatctgatggatgaatatgaaaaccatcctacgcaaaaacccagcgcgctgctaaaacggatcatactggcctcttctaacctgggcgataccgtgctggatcctttcgcaggtagttttaccacgggcgctgtcgcagcggcgtcaggacgtaagtttatcggtattgaaatcaataatgagtacgtaaaaatcggcctcagaagattgagcgtcacttcgcattattcagaaaatgatcttgcaaaagtcaaaaagagaaagaccaaaaaccggtcaaaaaaacagagaaatgccgtgataaatgcacgatcttcagagaagtaa

SEQ ID NO: 1152 - protein, 294 aa, Salmonella enterica subsp. arizonae serovar 62:z4,z23:--
MKAECEPQYFGDESKKIILGDALTELKKLPSESIDLIFADPPYNIGKDFDGMVESWDEASFLAWLYECVDECYRVLKKHGTMYIMNSTENMPYIDLKCRTLFTIKSRIVWSYDSSGVQAKKYFGSMYEPILMMVKDSKTYTFNRDAILVETTTGAKRALIDYRKNPPQPYNQKKVPGNVWSFPRVRYLMDEYENHPTQKPSALLKRIILASSNLGDTVLDPFAGSFTTGAVAAASGRKFIGIEINNEYVKIGLRRLSVTSHYSENDLAKVKKRKTKNRSKKQRNAVINARSSEK

SEQ ID NO: 1153 - DNA, 855 bp, Cyanothece sp. ATCC 51142
  CDS (1)..(855): transl_table=11
atgaaatatcaagatagtagtggcgagcatattattctatttggagacagtattaaacttttagaccaagaaatccaagatgaaagtattcaccttatttttgttgatcctccttataatattggtaaaaaatacgctaattttattgataaatggccaacagaagaaaactatttattatggtgttattcttggttagaattatgttttaaaaagcttcatcctgaaggtagtatttatcttatggctagtacacaaactattccttacttagatatttatttacgtaaacatattcatattttatcaagaattatttggcattatgatagctcaggagtgcaagctaagaattattttggttctttatatgaaccgataatttatggagtcaaaaatcctaaatcatatacatttaatcgggatgacataaaagtagaagcaaaaacaggttcaaaacgaaaattaattgattatcgtaaagcaatcccaaaagtttataattcccacaaagttcctggaaatgtttggtatttcccaagggttcgttatcgtatggaagaatatgaaaaacatccaactcaaaaaccagaagcacttttaaaacgtattattttggcaagtagtaatgtgggagatacgatccttgatccttttgccggcacttttacaacttccgcagttgctcaaaaagtagggcgaaaatctattggaattgaaattgaagaagattatataaaaattggtttaagacgtttaggaatttgtacacattataatggtaatctcttacaaaagcctttaaaaagctatcaaagaaattaccaacaattagagctatttaaagatgattaa

SEQ ID NO: 1154 - protein, 284 aa, Cyanothece sp. ATCC 51142
MKYQDSSGEHIILFGDSIKLLDQEIQDESIHLIFVDPPYNIGKKYANFIDKWPTEENYLLWCYSWLELCFKKLHPEGSIYLMASTQTIPYLDIYLRKHIHILSRIIWHYDSSGVQAKNYFGSLYEPIIYGVKNPKSYTFNRDDIKVEAKTGSKRKLIDYRKAIPKVYNSHKVPGNVWYFPRVRYRMEEYEKHPTQKPEALLKRIILASSNVGDTILDPFAGTFTTSAVAQKVGRKSIGIEIEEDYIKIGLRRLGICTHYNGNLLQKPLKSYQRNYQQLELFKDD

SEQ ID NO: 1155 - DNA, 861 bp, Bacteroides fragilis NCTC 9343
  CDS (1)..(861): transl_table=11
atgaatttactgggaactaatagttataagattatacatggggatgccattgaagcattgaaaaatgaaatagaagataattctgtagatttgatttttgcagatcctccatacaatataggcaagaactttgctggttgtatagataaatgggagactgatgataaatatttatcatggtgttatcaatggttagatttatgtattcgtaaattgaagccatcaggtgctttttatgtaatgacctccactcagtttatgcctttttttgatctttatcttagagaaaagttaacgatcctgtcacgtctgatatggtattatgatagttccggagttcaagcaaaaaattattttggttcgatgtatgaacctatacttttttgtgtgaaagataagaataactatacattcaattctgaagctattttagtagaagctaaaactggtgctaaaagaggtttgatcgattataggaaaaacccacctcagccatatagtactgagaaagtaccaggtaatgtctgggaatttgctagagtacgatatcggatggatgaatatgaaaatcatccaacacagaaacctgttgcattgttagaacgtatcattaaagccagttcaaatgaaggtgacttaatattagatcctttctcaggaacattcactacagcttttgttgcaaaaactttaaacagaagggccataggtatagagctacaagaagattatgtaaaaataggattgagaaggctcgaattagcatctgaatataacggggaagccatccagagagagttaaaaacctatcaaagacaagctatagatggagacaaacaaacaacattaaattttatgtaa

SEQ ID NO: 1156 - protein, 286 aa, Bacteroides fragilis NCTC 9343
MNLLGTNSYKIIHGDAIEALKNEIEDNSVDLIFADPPYNIGKNFAGCIDKWETDDKYLSWCYQWLDLCIRKLKPSGAFYVMTSTQFMPFFDLYLREKLTILSRLIWYYDSSGVQAKNYFGSMYEPILFCVKDKNNYTFNSEAILVEAKTGAKRGLIDYRKNPPQPYSTEKVPGNVWEFARVRYRMDEYENHPTQKPVALLERIIKASSNEGDLILDPFSGTFTTAFVAKTLNRRAIGIELQEDYVKIGLRRLELASEYNGEAIQRELKTYQRQAIDGDKQTTLNFM

SEQ ID NO: 1157 - DNA, 852 bp, Cyanothece sp. PCC 7424
  CDS (1)..(852): transl_table=11
atgtctgtccgatacggaaataaagatcatcttatatttcatggcgatgctttaacagttttattagaagaaattgattcggaatctatagagcttatttttcttgatcctccttataatattggtaagcgctttggagatttttatgacaaatggttatctgatgaagactatgtcgaatgggcatataagtggttagatgaatgtattcgcgtattaaagcctaacggaacattatatgtaatgaccagcactcaatctatgccttattttgatatttatttaagaaaaaaattaacaatcctgagtcggattatatggcactacgatagttctggtgttcaagcaagcaaatattttggttcgatgtatgaaccgatactgcattgtgtgaaagataaaaagaattatatttttaattctgaagccattaaaatagaagcaaaaacgggagcaaaaagaaagttaattgattatagaaaaactattccaacgccttacaatacaaacaaaataccgggtaatgtatggtatttttctcgcgtcagatatagaatggaagagtatgaaaatcatccttcacaaaaacctgaatcattgttagaaagaattattttggcaagtagtaatgaaaaagatttaatacttgatccatttgcgggaacttttacggctgctgctgtagcaaaaaggctcaggagaaattcaattagcatagaatctcaggaagaatatcttaagattgggttaagaagaattttagattggcaagagtataaaggagaaaagcttttacctcttcagaaatcctatgttagaaaaaatgaaaatggacaaaaaatatcaagttag

SEQ ID NO: 1158 - protein, 283 aa, Cyanothece sp. PCC 7424
MSVRYGNKDHLIFHGDALTVLLEEIDSESIELIFLDPPYNIGKRFGDFYDKWLSDEDYVEWAYKWLDECIRVLKPNGTLYVMTSTQSMPYFDIYLRKKLTILSRIIWHYDSSGVQASKYFGSMYEPILHCVKDKKNYIFNSEAIKIEAKTGAKRKLIDYRKTIPTPYNTNKIPGNVWYFSRVRYRMEEYENHPSQKPESLLERIILASSNEKDLILDPFAGTFTAAAVAKRLRRNSISIESQEEYLKIGLRRILDWQEYKGEKLLPLQKSYVRKNENGQKISS

SEQ ID NO: 1159 - DNA, 888 bp, Spirulina platensis
  CDS (1)..(888): transl_table=11
atgtttcaacggtatcaagatgatagaaatactatatttcatggagatgcaattcagattttatctagtcaaattgcagctaattctgtgaatctgatttttgcagatcctccctacaatatagggaagaaattttccaagtttcatgaccaatggaattccgaagaagattatatcaattggtcatatcaatggcttgatgaatgtgtcagggtattgaaacctaacggaacattatatgtaatgaccagcactcaatctatgccatactttgatatttacttgcggcaaaaaatgtcaattcttagtcgtattgtctggcattatgatagttctggagtgcaagcaaagaaatattttgggtctatgtatgaacccatacttcattgcgtgaaagaccagaaaaattatattttcaattcagccgatattaaagtggaagccaagactggcgcacaacgtaaattaattgattatagaaaaccagtacctactcaatacaacagtgaaaaagtgcctggtaatgtctggtattttccccgtgtaaggtatcgcatggcagaatatgaaaatcatccagcacagaaaccagaatcattgttagaaagaattattctagcaagtaccaacacacatgatttggtacttgatccctttgctggaacttttaccactgcagccgtagctaaacgcttaggacgaatttctatgagtatagaatctcaagaagaatatcttaaaattggtctaaggcgggttttaggatggcaagaataccaaggagaaaagctactaccacccgcgaaaaatcagactaaacaaaataccaattttcctacaaatcaattcattcaacccagtatttttgatgccgatactacagcatga

SEQ ID NO: 1160 - protein, 295 aa, Spirulina platensis
MFQRYQDDRNTIFHGDAIQILSSQIAANSVNLIFADPPYNIGKKFSKFHDQWNSEEDYINWSYQWLDECVRVLKPNGTLYVMTSTQSMPYFDIYLRQKMSILSRIVWHYDSSGVQAKKYFGSMYEPILHCVKDQKNYIFNSADIKVEAKTGAQRKLIDYRKPVPTQYNSEKVPGNVWYFPRVRYRMAEYENHPAQKPESLLERIILASTNTHDLVLDPFAGTFTTAAVAKRLGRISMSIESQEEYLKIGLRRVLGWQEYQGEKLLPPAKNQTKQNTNFPTNQFIQPSIFDADTTA

SEQ ID NO: 1161 - DNA, 891 bp, Escherichia coli O157
  CDS (1)..(891): transl_table=11
gtgaccatgagaacaggatgtgaaccgacccggtttggtaatgaagctaagaccattattcacggtgatgcccttgccgaacttaaaaagctacctactgaaagcgtcgatctgatctttgccgacccaccgtataacatcggtaaaaattttgatggtctgatcgaagcctggaaagaagatctgtttatcgactggctgttagaagtgattgcagagtgccaccgcgttctgaaaaagcagggcagcatgtacatcatgaacagtacggaaaacatgccctttatcgatctccagtgccgcaagctttttaccatcaaaagtcgcatcgtctggtcatatgacagttctggagtgcaggcgaaaaaacactacggctccatgtacgaacccatcctgatgatggtgaaagacgcaaagaactacacattcaacggtgatgctattctggtagaagccaaaaccggatcgcagcgcgcgttgatcgattatcgcaaaaatcctccacagccttacaatcatcaaaaagtaccgggtaacgtctgggattttccgcgcgtgcgttatttgatggatgaatatgaaaaccacccgacgcaaaaaccggaagccttactgaaacgcattattctcgcctcttccaacccaggcgatatcgttctcgacccgtttgctggtagctttactaccggtgccgtagccatcgccagcggacgaaaattcattggtattgagatcaacagcgagtacatcaaaatggggcttcgacggctggatgtcgcgtcgcattactctgcggaagaactggcgaaagtgaaaaaaagaaagaccggcaacctgtcaaaacgaagccggttaagcgaagttgaccccgatctcattacaaagtaa

SEQ ID NO: 1162 - protein, 296 aa, Escherichia coli O157
MTMRTGCEPTRFGNEAKTIIHGDALAELKKLPTESVDLIFADPPYNIGKNFDGLIEAWKEDLFIDWLLEVIAECHRVLKKQGSMYIMNSTENMPFIDLQCRKLFTIKSRIVWSYDSSGVQAKKHYGSMYEPILMMVKDAKNYTFNGDAILVEAKTGSQRALIDYRKNPPQPYNHQKVPGNVWDFPRVRYLMDEYENHPTQKPEALLKRIILASSNPGDIVLDPFAGSFTTGAVAIASGRKFIGIEINSEYIKMGLRRLDVASHYSAEELAKVKKRKTGNLSKRSRLSEVDPDLITK

SEQ ID NO: 1163 - DNA, 885 bp, Escherichia coli
  CDS (1)..(885): transl_table=11
atgagaacaggatgtgaaccgacccggtttggtaatgaagctaagaccattattcacggtgatgcgcttgccgaacttaaaaagatccccgccgaaagtgtcgatctgatctttgccgacccaccatataacatcggtaaaaattttgatggtctgatcgaagcctggaaagaagatctgtttatcgactggctgtttgaagtgattgcagagtgccaccgcgttctgaaaaagcagggcagcatgtacatcatgaacagtacggaaaacatgccctttatcgatctccagtgccgcaagctttttaccatcaaaagtcgcatcgtctggtcatatgacagttctggagtgcaggcgaaaaaacactacggctccatgtacgaacccatcctgatgatggtgaaagacgcaaagaactacacattcaacggtgatgctattctggtagaagccaaaaccggatcgcagcgcgcgttgatcgattatcgcaaaaatcctccacagccttacaatcatcaaaaagtaccgggtaacgtttgggattttccgcgcgtgcgttatttgatggatgaatatgaaaaccacccgacgcaaaaaccggaagccttactgaaacgcattattctcgcctcttccaacccaggcgatatcgttctcgacccgtttgctggtagctttactaccggtgccgtagccatcgccagcggacgaaaattcattggtattgagatcaacagcgagtacatcaaaatggggcttcgacggctggatgtcgcgtcgcattactctgcggaagaactggcgaaagtgaaaaaaagaaagaccggcaacctgtcaaaacgaagccggttaagcgaagttgaccccgatctcattacaaagtaa

SEQ ID NO: 1164 - protein, 294 aa, Escherichia coli
MRTGCEPTRFGNEAKTIIHGDALAELKKIPAESVDLIFADPPYNIGKNFDGLIEAWKEDLFIDWLFEVIAECHRVLKKQGSMYIMNSTENMPFIDLQCRKLFTIKSRIVWSYDSSGVQAKKHYGSMYEPILMMVKDAKNYTFNGDAILVEAKTGSQRALIDYRKNPPQPYNHQKVPGNVWDFPRVRYLMDEYENHPTQKPEALLKRIILASSNPGDIVLDPFAGSFTTGAVAIASGRKFIGIEINSEYIKMGLRRLDVASHYSAEELAKVKKRKTGNLSKRSRLSEVDPDLITK

SEQ ID NO: 1165 - DNA, 25 bp, Artificial sequence
  primer
atgaccatgagaacaggatgtgaac

SEQ ID NO: 1166 - DNA, 24 bp, Artificial sequence
  primer
ttactttgtaatgagatcggggtc

SEQ ID NO: 1167 - protein, 258 aa, Artificial sequence
  consensus sequence
  Variant (2)..(2): Xaa in position 2 is any amino acid
  Variant (7)..(9): Xaa in position 7 to 9 is any amino acid
  Variant (11)..(15): Xaa in position 11 to 15 is any amino acid
  Variant (16)..(16): Xaa in position 16 is any or no amino acid
  Variant (19)..(20): Xaa in position 19 to 20 is any amino acid
  Variant (24)..(24): Xaa in position 24 is any amino acid
  Variant (33)..(33): Xaa in position 33 is any amino acid
  Variant (35)..(40): Xaa in position 35 to 40 is any amino acid
  Variant (42)..(42): Xaa in position 42 is any amino acid
  Variant (43)..(43): Xaa in position 43 is any or no amino acid
  Variant (45)..(49): Xaa in position 45 to 49 is any amino acid
  Variant (51)..(56): Xaa in position 51 to 56 is any amino acid
  Variant (59)..(59): Xaa in position 59 is any amino acid
  Variant (64)..(65): Xaa in position 64 to 65 is any amino acid
  Variant (67)..(68): Xaa in position 67 to 68 is any amino acid
  Variant (70)..(70): Xaa in position 70 is any amino acid
  Variant (72)..(72): Xaa in position 72 is any amino acid
  Variant (75)..(76): Xaa in position 75 to 76 is any amino acid
  Variant (79)..(80): Xaa in position 79 to 80 is any amino acid
  Variant (82)..(84): Xaa in position 82 to 84 is any amino acid
  Variant (86)..(88): Xaa in position 86 to 88 is any amino acid
  Variant (91)..(91): Xaa in position 91 is any amino acid
  Variant (95)..(95): Xaa in position 95 is any amino acid
  Variant (97)..(97): Xaa in position 97 is any amino acid
  Variant (108)..(109): Xaa in position 108 to 109 is any amino acid
  Variant (118)..(119): Xaa in position 118 to 119 is any amino acid
  Variant (122)..(123): Xaa in position 122 to 123 is any amino acid
  Variant (125)..(125): Xaa in position 125 is any amino acid
  Variant (127)..(127): Xaa in position 127 is any amino acid
  Variant (130)..(132): Xaa in position 130 to 132 is any amino acid
  Variant (134)..(134): Xaa in position 134 is any amino acid
  Variant (141)..(142): Xaa in position 141 to 142 is any amino acid
  Variant (144)..(144): Xaa in position 144 is any amino acid
  Variant (151)..(152): Xaa in position 151 to 152 is any amino acid
  Variant (154)..(154): Xaa in position 154 is any amino acid
  Variant (158)..(159): Xaa in position 158 to 159 is any amino acid
  Variant (167)..(167): Xaa in position 167 is any amino acid
  Variant (169)..(169): Xaa in position 169 is any amino acid
  Variant (174)..(174): Xaa in position 174 is any amino acid
  Variant (176)..(176): Xaa in position 176 is any amino acid
  Variant (183)..(183): Xaa in position 183 is any amino acid
  Variant (187)..(188): Xaa in position 187 to 188 is any amino acid
  Variant (191)..(191): Xaa in position 191 is any amino acid
  Variant (200)..(201): Xaa in position 200 to 201 is any amino acid
  Variant (203)..(204): Xaa in position 203 to 204 is any amino acid
  Variant (211)..(211): Xaa in position 211 is any amino acid
  Variant (215)..(215): Xaa in position 215 is any amino acid
  Variant (219)..(221): Xaa in position 219 to 221 is any amino acid
  Variant (224)..(225): Xaa in position 224 to 225 is any amino acid
  Variant (227)..(227): Xaa in position 227 is any amino acid
  Variant (230)..(232): Xaa in position 230 to 232 is any amino acid
  Variant (235)..(235): Xaa in position 235 is any amino acid
  Variant (237)..(237): Xaa in position 237 is any amino acid
  Variant (242)..(247): Xaa in position 242 to 247 is any amino acid
  Variant (249)..(252): Xaa in position 249 to 252 is any amino acid
  Variant (254)..(257): Xaa in position 254 to 257 is any amino acid
IXHGDAXXXLXXXXXXESXXLIFXDPPYNIGKXFXXXXXXWXXEXXXXXWXXXXXXECXRVLKXXGXXYXMXSTXXMPXXDXXXRXXXTIXSRIXWXYDSSGVQAKKXXGSMYEPILXXVKXXKXYXFNXXXIXVEAKTGXXRXLIDYRKXXPXPYNXXKVPGNVWXFXRVRYXMXEYENHPXQKPXXLLXRIILASSNXXDXXLDPFAGXFTTXAVAXXXGRXXIXIEXXXEYXKXGLRRXXXXXXYXXXXLXXXXK

SEQ ID NO: 1168 - protein, 61 aa, Artificial sequence
  protein pattern
  Variant (2)..(2): Xaa in position 2 is any or no amino acid
  Variant (9)..(9): Xaa in position 9 is any amino acid
  Variant (11)..(11): Xaa in position 11 is Ala, Pro or Ser
  Variant (16)..(16): Xaa in position 16 is any amino acid
  Variant (18)..(18): Xaa in position 18 is Ala, Asp or Pro
  Variant (25)..(25): Xaa in position 25 is Ala, Ser or Thr
  Variant (29)..(29): Xaa in position 29 is any amino acid
  Variant (30)..(30): Xaa in position 30 is Ala or Ser
  Variant (32)..(32): Xaa in position 32 is Ile or Leu
  Variant (33)..(33): Xaa in position 33 is Glu or Lys
  Variant (37)..(37): Xaa in position 37 is any amino acid
  Variant (38)..(38): Xaa in position 38 is Ala or Ser
  Variant (40)..(40): Xaa in position 40 is Ser or Thr
  Variant (42)..(42): Xaa in position 42 is any amino acid
  Variant (43)..(43): Xaa in position 43 is any or no amino acid
  Variant (45)..(46): Xaa in position 45 to 46 is any amino acid
  Variant (47)..(47): Xaa in position 47 is any or no amino acid
  Variant (52)..(52): Xaa in position 52 is Ala or Ser
  Variant (54)..(54): Xaa in position 54 is Ser or Thr
  Variant (57)..(57): Xaa in position 57 is Thr or Val
  Variant (58)..(58): Xaa in position 58 is Ala or Gly
  Variant (59)..(59): Xaa in position 59 is any amino acid
KXVPGNVWXFXRVRYXMXEYENHPXQKPXXLXXRIIXXSXNXXDXXXLDPFXGXFTXXXVA

SEQ ID NO: 1169 - protein, 60 aa, Artificial sequence
  protein pattern
  Variant (4)..(4): Xaa in position 4 is Ile or Val
  Variant (6)..(6): Xaa in position 6 is any amino acid
  Variant (15)..(15): Xaa in position 15 is any amino acid
  Variant (17)..(17): Xaa in position 17 is His or Tyr
  Variant (18)..(18): Xaa in position 18 is Phe or Tyr
  Variant (27)..(28): Xaa in position 27 to 28 is any amino acid
  Variant (31)..(31): Xaa in position 31 is Asp or Asn
  Variant (32)..(33): Xaa in position 32 to 33 is any amino acid
  Variant (34)..(34): Xaa in position 34 is Asn, Ser or Thr
  Variant (36)..(36): Xaa in position 36 is any amino acid
  Variant (39)..(39): Xaa in position 39 is any amino acid
  Variant (40)..(41): Xaa in position 40 to 41 is Ala, Asp or Glu
  Variant (43)..(43): Xaa in position 43 is any amino acid
  Variant (44)..(44): Xaa in position 44 is Ile or Val
  Variant (46)..(46): Xaa in position 46 is Ala or Thr
  Variant (47)..(47): Xaa in position 47 is any amino acid
  Variant (50)..(50): Xaa in position 50 is Ala or Ser
  Variant (51)..(51): Xaa in position 51 is any amino acid
  Variant (53)..(53): Xaa in position 53 is any amino acid
  Variant (60)..(60): Xaa in position 60 is Ala, Asn, Pro or Thr
SRIXWXYDSSGVQAXKXXGSMYEPILXXVKXXXXYXFNXXXIXXEXXTGXXRXLIDYRKX

SEQ ID NO: 1170 - protein, 40 aa, Artificial sequence
  protein pattern
  Variant (2)..(2): Xaa in position 2 is any amino acid
  Variant (3)..(6): Xaa in position 3 to 6 is any or no amino acid
  Variant (9)..(9): Xaa in position 9 is any amino acid
  Variant (14)..(15): Xaa in position 14 to 15 is any amino acid
  Variant (17)..(17): Xaa in position 17 is Ser or Thr
  Variant (18)..(18): Xaa in position 18 is Ile, Leu or Met
  Variant (20)..(20): Xaa in position 20 is Ile or Val
  Variant (22)..(22): Xaa in position 22 is Asn or Thr
  Variant (25)..(25): Xaa in position 25 is Glu or Gln
  Variant (26)..(26): Xaa in position 26 is Ala, Asn or Ser
  Variant (29)..(29): Xaa in position 29 is Phe or Tyr
  Variant (30)..(30): Xaa in position 30 is Phe or Ile
  Variant (32)..(32): Xaa in position 32 is Ile or Leu
  Variant (33)..(34): Xaa in position 33 to 34 is any amino acid
  Variant (36)..(37): Xaa in position 36 to 37 is any amino acid
  Variant (38)..(38): Xaa in position 38 is Phe, Leu or Met
  Variant (39)..(39): Xaa in position 39 is Ser or Thr
LXXXXXECXRVLKXXGXXYXMXSTXXMPXXDXXXRXXXXI

SEQ ID NO: 1171 - protein, 29 aa, Artificial sequence
  protein pattern
  Variant (2)..(3): Xaa in position 2 to 3 is any amino acid
  Variant (5)..(8): Xaa in position 5 to 8 is any or no amino acid
  Variant (12)..(12): Xaa in position 12 is Ala, Ile or Val
  Variant (21)..(21): Xaa in position 21 is any amino acid
  Variant (22)..(22): Xaa in position 22 is Phe or Tyr
  Variant (23)..(23): Xaa in position 23 is Ala, Asp or Ser
  Variant (24)..(24): Xaa in position 24 is Gly or Asn
  Variant (25)..(26): Xaa in position 25 to 26 is any amino acid
  Variant (27)..(27): Xaa in position 27 is Asp or Glu
  Variant (28)..(28): Xaa in position 28 is any amino acid
EXXDXXXXLIFXDPPYNIGKXXXXXXXXW

SEQ ID NO: 1172 - protein, 40 aa, Artificial sequence
  protein pattern
  Variant (2)..(2): Xaa in position 2 is any or no amino acid
  Variant (4)..(7): Xaa in position 4 to 7 is any or no amino acid
  Variant (9)..(9): Xaa in position 9 is any amino acid
  Variant (10)..(10): Xaa in position 10 is Glu, Asn or Gln
  Variant (11)..(11): Xaa in position 11 is Glu, Asn or Ser
  Variant (12)..(12): Xaa in position 12 is Asp or Glu
  Variant (14)..(14): Xaa in position 14 is Ile, Leu or Val
  Variant (16)..(16): Xaa in position 16 is Ile or Met
  Variant (21)..(21): Xaa in position 21 is Leu or Val
  Variant (22)..(22): Xaa in position 22 is any amino acid
  Variant (23)..(23): Xaa in position 23 is Gly, Ile, Leu or Val
  Variant (24)..(24): Xaa in position 24 is any amino acid
  Variant (25)..(25): Xaa in position 25 is Gln, Ser or Thr
  Variant (26)..(26): Xaa in position 26 is Glu or His
  Variant (28)..(28): Xaa in position 28 is Asn, Gln or Ser
  Variant (29)..(29): Xaa in position 29 is Ala, Glu or Gly
  Variant (30)..(30): Xaa in position 30 is Glu or Asn
  Variant (31)..(31): Xaa in position 31 is any amino acid
  Variant (32)..(32): Xaa in position 32 is Ile or Leu
  Variant (33)..(36): Xaa in position 33 to 36 is any amino acid
  Variant (38)..(39): Xaa in position 38 to 39 is any amino acid
  Variant (40)..(40): Xaa in position 40 is Gln or Thr
GXIXXXXEXXXXYXKXGLRRXXXXXXYXXXXXXXXXKXXX

SEQ ID NO: 1173 - protein, 11 aa, Artificial sequence
  protein pattern
  Variant (2)..(3): Xaa in position 2 to 3 is any or no amino acid
  Variant (8)..(8): Xaa in position 8 is Ile or Leu
  Variant (9)..(9): Xaa in position 9 is Ala, Glu, Asn, Gln or Thr
  Variant (10)..(10): Xaa in position 10 is any amino acid
IXXHGDAXXXL

SEQ ID NO: 1174 - DNA, 573 bp, Escherichia coli
  CDS (1)..(573): transl_table=11
atgttcaaatcgaccctggcggcgatggctgctgttttcgctctttctgctctttctcccgcagcaatggcagcgaaaggggacccgcacgtattgttgacaacctcagctggtaacatcgaactggagctggataaacaaaaagcgccagtgtctgtgcaaaactttgtcgattatgtgaacagcggtttttataacaacactacctttcaccgcgtcattcctggctttatgattcagggcggcggtttcaccgagcagatgcagcagaaaaaaccaaacccgccaatcaaaaatgaagccgataacggcctgcgcaacacgcgtggcaccatcgcgatggcacgtaccgctgacaaagacagcgccaccagccagttctttatcaacgttgccgataacgccttccttgaccatggtcagcgtgatttcggttacgcggtatttggtaaagtggtgaaaggcatggacgttgccgataagatttcccaggtgccgactcatgacgttggtccgtaccagaatgtgccgtcaaaaccggtagttatcctttccgctaaagtcctgccgtaa

SEQ ID NO: 1175 - protein, 190 aa, Escherichia coli
MFKSTLAAMAAVFALSALSPAAMAAKGDPHVLLTTSAGNIELELDKQKAPVSVQNFVDYVNSGFYNNTTFHRVIPGFMIQGGGFTEQMQQKKPNPPIKNEADNGLRNTRGTIAMARTADKDSATSQFFINVADNAFLDHGQRDFGYAVFGKVVKGMDVADKISQVPTHDVGPYQNVPSKPVVILSAKVLP

SEQ ID NO: 1176 - DNA, 501 bp, Cupriavidus taiwanensis
  CDS (1)..(501): transl_table=11
atgtccaaggtacagctccagaccaacaagggtgtgatcaccctggaactcgacgccgagaaggccccgaaaacggttgagaacttcctgtcgtatgtccgcaagggccactacgacaacaccatcttccaccgcgtgatcaagaacttcatgatccagggcggcggcttcgaacccggcatgaagcagaaggacaccgacgccccgatcgagaacgaagccggcaacggcctgaagaacgaccgctacaccgtggcgatggcgcgcaccaatgcgccgcactcggccaccgcgcagttcttcatcaacgtggtcgacaacgacttcctcaacttttcgtcgccgaccccgcagggcttcggctatgccgtgttcggcaaggtcgtcgacggcaccgacgtggtcgagcagatcaagggcgtgcgtaccggcagctcgggcttccaccaggacgtgccgctggaagacgtcgtgatcgagaaggccgtcgtcgtcgaataa

SEQ ID NO: 1177 - protein, 166 aa, Cupriavidus taiwanensis
MSKVQLQTNKGVITLELDAEKAPKTVENFLSYVRKGHYDNTIFHRVIKNFMIQGGGFEPGMKQKDTDAPIENEAGNGLKNDRYTVAMARTNAPHSATAQFFINVVDNDFLNFSSPTPQGFGYAVFGKVVDGTDVVEQIKGVRTGSSGFHQDVPLEDVVIEKAVVVE

SEQ ID NO: 1178 - DNA, 585 bp, Cupriavidus taiwanensis
  CDS (1)..(585): transl_table=11
atgatccgttcccgtcgcatcctgctggccggcctggccgccggcaccctggcgctgtcttcgttcagcgcgctggcccagcagaaggccgccgagcgcgtccagttcgtcaccagcgccggcaagttcacggtcgagctctatcccgaggcagcgcccaagaccgtcgcgaacttcctggaatatgtgaagagcggcttctacagtggcaccatcttccaccgcgtgatcaacggcttcatggtgcagggcggcggctttgaccgcgacatgaaggaaaagcccacgcgcgcgccgatcccgctggaagcccgcaacggcctcaagaacaaggccggcacggttgccatggcgcgcaccagcaacccggactcggccaccgcgcagttcttcgtcaatgtggtggataatccgaatctcgactacccgcagccggacggcaatggctatgccgtcttcggcaaggtggtggaaggcatggacacgatcgacaagatcaagtccgtgccgaccacggcctacggcccgatgcgcaacgtgccggccgcgccgatcgtgatcgagtcggccaccgtcgtcaaataa

SEQ ID NO: 1179 - protein, 194 aa, Cupriavidus taiwanensis
MIRSRRILLAGLAAGTLALSSFSALAQQKAAERVQFVTSAGKFTVELYPEAAPKTVANFLEYVKSGFYSGTIFHRVINGFMVQGGGFDRDMKEKPTRAPIPLEARNGLKNKAGTVAMARTSNPDSATAQFFVNVVDNPNLDYPQPDGNGYAVFGKVVEGMDTIDKIKSVPTTAYGPMRNVPAAPIVIESATVVK

SEQ ID NO: 1180 - DNA, 552 bp, Pasteurella multocida subsp. multocida str. Pm70
  CDS (1)..(552): transl_table=11
atgttaagaataattaccgcacttttgcttgctggtgttgtttgtgttgctcaagcaaagaatgtggttttacatacaaattatggcgatattaaaatggtgttagaagaggagaaagcgcccattagcactcagaattttctacgttatagccaagcgggattttataacggtacgatttttcatcgtgttattcccggttttatgattcaagctgggggatttgaggttgggatgaagcaaaagaaaaccgacgcgcctattacaaatgaggcgaataatggtttgaaaaatttgcgcggtactgttgcaatggcacggacgtctgatccacattctgccacagcgcaattctttattaatacagttgacaatgattttttgaattttagtgcagaaacgcaaaaaggttggggatatgcggtttttgctaacgtagtggcaggtatggacgtggttgatcgtattagccaagtagatactgagcgatcaggatttcaccgtgatgtaccaaaagcgccagtgatcattaaaagtgtcactattgaatag

SEQ ID NO: 1181 - protein, 183 aa, Pasteurella multocida subsp. multocida str. Pm70
MLRIITALLLAGVVCVAQAKNVVLHTNYGDIKMVLEEEKAPISTQNFLRYSQAGFYNGTIFHRVIPGFMIQAGGFEVGMKQKKTDAPITNEANNGLKNLRGTVAMARTSDPHSATAQFFINTVDNDFLNFSAETQKGWGYAVFANVVAGMDVVDRISQVDTERSGFHRDVPKAPVIIKSVTIE

SEQ ID NO: 1182 - DNA, 510 bp, Pasteurella multocida subsp. multocida str. Pm70
  CDS (1)..(510): transl_table=11
atgattacattacacactaacttgggtaacattaaaattcaattagatcatgaaaaagcaccgaacacagcgcaaaactttgtaaattactgtaaaagtggattctatgataacacaatttttcatcgtgttattgatggatttatgatccaaggtggtggtatggatgaggcgatgcgtgagaaaaagacgaatgcgccgatccaaaatgaagccaacaatggtttaagtaacaaacgtggcacaattgcgatggcgcgaacatcggatcctcattctgcgaccgcacaattttttattaatgtagcagataatacttttttagatcaccgttcaaaagagttatttggtaaaaaggtggtacaagagtggggctatgccgtctttggtgaagtggttgagggcatggatgtagtagataagatcaaaggcgtgaaaaccggaaataaagggtttcaccaagatgtaccacaagaagccatcgtgattactgcagtgaccgttgaataa

SEQ ID NO: 1183 - protein, 169 aa, Pasteurella multocida subsp. multocida str. Pm70
MITLHTNLGNIKIQLDHEKAPNTAQNFVNYCKSGFYDNTIFHRVIDGFMIQGGGMDEAMREKKTNAPIQNEANNGLSNKRGTIAMARTSDPHSATAQFFINVADNTFLDHRSKELFGKKVVQEWGYAVFGEVVEGMDVVDKIKGVKTGNKGFHQDVPQEAIVITAVTVE

SEQ ID NO: 1184 - DNA, 510 bp, Neisseria meningitidis MC58
  CDS (1)..(510): transl_table=11
atgattatcctgcacaccaacaaaggcgacatcaaaatcgaactcgatttcgacaaagcccctgttaccgccaaaaacttcgagcaatacgtcaaagacggcttctacgacggcgtaatcttccaccgcgtcatcaaaggcttcatgattcaaggcggcggcatggatgaaaacatgaacgaaaaagaaacccgcgatccgattcaaaacgaagcgtccaacggcctgcccaacgataaatacaccatcgccatggcacgcacttccgacccccattccgccagcgcgcaattcttcatcaacactgccgacaacgctttcctgaacttccgttctaaagagctgtacggcaaaaccgtcgtccaagactggggctatgccgtattcggtaaagtcgttgacggttttgacgttgtcgatgccatcgaaggcgtttctaccaaacgtcatggttaccacgacgacgtaccgagcgaacctgtcgtcatcattaaagccgaagcggtataa

SEQ ID NO: 1185 - protein, 169 aa, Neisseria meningitidis MC58
MIILHTNKGDIKIELDFDKAPVTAKNFEQYVKDGFYDGVIFHRVIKGFMIQGGGMDENMNEKETRDPIQNEASNGLPNDKYTIAMARTSDPHSASAQFFINTADNAFLNFRSKELYGKTVVQDWGYAVFGKVVDGFDVVDAIEGVSTKRHGYHDDVPSEPVVIIKAEAV

SEQ ID NO: 1186 - DNA, 558 bp, Neisseria meningitidis MC58
  CDS (1)..(558): transl_table=11
atgaaacccaaattcaaaaccgttttaaccgcgctgcttttggcggtttccctgccgtctatggcggcaacccatgttttgatggaaaccgatatgggcaatatccgtttggttttggacgaatccaaagcccccaaaaccgttgctaatttcgtgcgctatgcccgaaaaggcttttacgacgacaccgtttttcaccgcgttatcgacggttttgttatccagggcggtggattgaccgaggacttggcacaaaaggcaagcgataaggccgttgccaacgaatccggcaacggcttgaaaaacaccgccggcaccatcgccatggcgcggacgacagcccccgattccgccaccagccaattctttatcaatctggcggacaacgcttcgctcgactacaaaaacggacaatacggctataccgttttcggcagggtcgaaagcggcatgaacaccgtttccaaaatcgcccgcgtcaaaaccgccacgcgcggcttttatcaaaacgtacccgtacagcccgtcaaaatccgtcgcgttgttgtcgggcagtaa

SEQ ID NO: 1187 - protein, 185 aa, Neisseria meningitidis MC58
MKPKFKTVLTALLLAVSLPSMAATHVLMETDMGNIRLVLDESKAPKTVANFVRYARKGFYDDTVFHRVIDGFVIQGGGLTEDLAQKASDKAVANESGNGLKNTAGTIAMARTTAPDSATSQFFINLADNASLDYKNGQYGYTVFGRVESGMNTVSKIARVKTATRGFYQNVPVQPVKIRRVVVGQ

SEQ ID NO: 1188 - DNA, 558 bp, Neisseria meningitidis Z2491
  CDS (1)..(558): transl_table=11
atgaaacccaaattcaaaaccgttttaaccgcgctgcttttggcggtttccctgccgtctatggcggcaacccatgttttgatggaaaccgatatgggcaatatccgtttggttttggacgaatccaaagcacccaaaaccgttgccaatttcgtgcgctatgcccgaaaaggcttttacgacaatacgatttttcaccgcgtcatcggcggcttcgttatccaaggcggcggattgaccgaggacttggcacaaaaggcaagcgataaggccgttgccaacgaatccggcaacggcttgaaaaacactgtcggcaccatcgccatggcgcggacggccgatccggattccgccaccagccaattctttatcaatctggtggacaatgattcgctcaactacaaaaacggacaatacggctataccgttttcggcagggtcgaaagcggcatgaacaccgtttccaaaatcgcccgcgtcaaaaccgccacgcgcggcttttatcaaaacgtacccgtacagcccgtcaaaatccgtcgcgttgttgtcgggcagtaa

SEQ ID NO: 1189 - protein, 185 aa, Neisseria meningitidis Z2491
MKPKFKTVLTALLLAVSLPSMAATHVLMETDMGNIRLVLDESKAPKTVANFVRYARKGFYDNTIFHRVIGGFVIQGGGLTEDLAQKASDKAVANESGNGLKNTVGTIAMARTADPDSATSQFFINLVDNDSLNYKNGQYGYTVFGRVESGMNTVSKIARVKTATRGFYQNVPVQPVKIRRVVVGQ

SEQ ID NO: 1190 - DNA, 495 bp, Escherichia coli O157:H7 EDL933
  CDS (1)..(495): transl_table=11
atggttactttccacaccaatcacggcgatattgtcatcaaaacttttgacgataaagcacctgaaacagttaaaaacttcctggactactgccgcgaaggtttttacaacaacaccattttccaccgtgttatcaacggctttatgattcagggcggcggttttgaaccgggcatgaaacaaaaagccaccaaagaaccgatcaaaaacgaagccaacaacggcctgaaaaatacccgtggtacgctggcaatggcccgtactcaggctccgcactctgcaactgcacagttcttcatcaacgtggttgataacgacttcctgaacttctctggcgaaagcctgcaaggttggggctactgcgtgtttgctgaagtggttgaaggcatggacgtggtagacaaaatcaaaggtgttgcaaccggtcgtagcggtatgcaccaggacgtgccaaaagaagacgttatcattgaaagcgtgaccgttagcgagtaa

SEQ ID NO: 1191 - protein, 164 aa, Escherichia coli O157:H7 EDL933
MVTFHTNHGDIVIKTFDDKAPETVKNFLDYCREGFYNNTIFHRVINGFMIQGGGFEPGMKQKATKEPIKNEANNGLKNTRGTLAMARTQAPHSATAQFFINVVDNDFLNFSGESLQGWGYCVFAEVVEGMDVVDKIKGVATGRSGMHQDVPKEDVIIESVTVSE

SEQ ID NO: 1192 - DNA, 495 bp, Salmonella typhimurium LT2
  CDS (1)..(495): transl_table=11
atggttactttccacactaatcacggcgatatcgtaatcaaaacctttgatgataaagcgcctgaaacagttaaaaacttcctggactactgccgcgaaggtttttacaacaacaccattttccaccgtgtgattaacggttttatgattcagggcggcggctttgagccgggcatgaaacagaaagccaccaaagaggcgatcaaaaacgaagccaacaatggtctgaaaaatacccgtggtacgctggcgatggcgcgtactcaggcaccacactcggctaccgcgcaattcttcatcaacgtggcagacaacgacttcctgaacttctccggcgaaagtctgcagggctggggctactgcgtctttgcggaagtcgtagaaggtatggacgtggtagataaaatcaaaggcgtcgccactggccgtagcggtatgcaccaggacgtaccaaaagaagacgtcatcattgaaaacgtgaccgtcagcgagtaa

SEQ ID NO: 1193 - protein, 164 aa, Salmonella typhimurium LT2
MVTFHTNHGDIVIKTFDDKAPETVKNFLDYCREGFYNNTIFHRVINGFMIQGGGFEPGMKQKATKEAIKNEANNGLKNTRGTLAMARTQAPHSATAQFFINVADNDFLNFSGESLQGWGYCVFAEVVEGMDVVDKIKGVATGRSGMHQDVPKEDVIIENVTVSE

SEQ ID NO: 1194 - DNA, 540 bp, Ralstonia solanacearum GMI1000
  CDS (1)..(540): transl_table=11
ttgcttttgcgcttttccgccaaggaactcaccatgacccaagtcaagctgcacaccaaccacggcgacatcacgctggccctggacgccgagaaggcgcccaagagcgtcgccaacttcgtccactacgtcaagaagggccactacaacggcacggtgttccaccgcgtcatcaagggcttcatgatccagggcggcggtttcgagccgggcgccgacatgaagcagaagccgaccgacgcaccgatcgacaacgaagccaacaacggcctgaagaacgagcgcggctcgatcgccatggcgcgcaccaacgacccgcattcggccacggcccagttcttcatcaacgtggtcgacaacgacttcctgaaccacacctcgccgacgccgcaaggctggggctatgccgtgttcggcaaggtgaccgagggcctggacgtggtcgacaagatccgcgccgtgcgcaccggcaaccgcggctaccaccaggacgtgccgatggaagacgtggtgatcgaaagcgccgaagtgatcgaatga

SEQ ID NO: 1195 - protein, 179 aa, Ralstonia solanacearum GMI1000
MLLRFSAKELTMTQVKLHTNHGDITLALDAEKAPKSVANFVHYVKKGHYNGTVFHRVIKGFMIQGGGFEPGADMKQKPTDAPIDNEANNGLKNERGSIAMARTNDPHSATAQFFINVVDNDFLNHTSPTPQGWGYAVFGKVTEGLDVVDKIRAVRTGNRGYHQDVPMEDVVIESAEVIE

SEQ ID NO: 1196 - DNA, 573 bp, Ralstonia solanacearum GMI1000
  CDS (1)..(573): transl_table=11
atgctccgtatccgctccctctttgccgggctcgtgtgtgcactggccgtttccgtcagcgcggccgccgcgccggccccgcgcgtgcagttcaagacgtcgatgggcgacttcaccgtcgaggtctatccggacaaggcgcccaagaccgtcgccaacttcctgcagtacgtgaaggacggcttctacaagggcaccatcttccaccgcgtgatggacggtttcatgatccagggcggcggcttcacgcccgacatgaagcagaaggacacgcgcgcgcccgtcgagatcgaatcgaagaacggcctgaagaacgacaagtacaccatcgccatggcgcgcaccatggacccgaactccgccaccgcccagttctacgtcaacgtggtcaataacgacatgctgaactacccgggccaggacggctacggctacaccgtgttcggcaaggtcgtcgaaggcaccgccaccatcgacaagatcaagggcgtggagaccaccagcaagctcccgcaccaaaacgtgcccgtcacgccgatcgtgatcgaatcggtcaccctcgtcaccaagtaa

SEQ ID NO: 1197 - protein, 190 aa, Ralstonia solanacearum GMI1000
MLRIRSLFAGLVCALAVSVSAAAAPAPRVQFKTSMGDFTVEVYPDKAPKTVANFLQYVKDGFYKGTIFHRVMDGFMIQGGGFTPDMKQKDTRAPVEIESKNGLKNDKYTIAMARTMDPNSATAQFYVNVVNNDMLNYPGQDGYGYTVFGKVVEGTATIDKIKGVETTSKLPHQNVPVTPIVIESVTLVTK

SEQ ID NO: 1198 - DNA, 633 bp, Shewanella oneidensis MR-1
  CDS (1)..(633): transl_table=11
atgaaaagcatgacgggactgatattagccagcagtttgagcttagccctcagtgcctgcgatggcagtggcgatgagcaaaccccttctatccccacacctgatccaacgcctcccacgttagccgccgatgtgtgctacttaatgagcacgacgaagggagatatcacccttgccatcgatctcactaatacccccattactggtaaaaacttcaaacaatatgtcgataagtctttttataacggcaccttattccacagaaccatcaataactttatgatccaaggcgggggctttaccacgggattacaaagcaaacctacgaacgcccctattaaaaatgaagcatctgtcggtatcagtaataaacgtggcactatcgccatggcgcgcactccagtttcggattccgccacatcgcaattctttatcaatgtgttagataatccgcagctcgatgcttcagcgagcagctatggctatgccgtgtttggcaaagtggttgaaggcatggatgtcgctgaccaaatcagtattgtgccgactaaaacgagcaacggctttagcgacacccccgtaaaagagattttgattaatagcgtgaaggagaccacctgccccgctgcttag

SEQ ID NO: 1199 - protein, 210 aa, Shewanella oneidensis MR-1
MKSMTGLILASSLSLALSACDGSGDEQTPSIPTPDPTPPTLAADVCYLMSTTKGDITLAIDLTNTPITGKNFKQYVDKSFYNGTLFHRTINNFMIQGGGFTTGLQSKPTNAPIKNEASVGISNKRGTIAMARTPVSDSATSQFFINVLDNPQLDASASSYGYAVFGKVVEGMDVADQISIVPTKTSNGFSDTPVKEILINSVKETTCPAA

SEQ ID NO: 1200 - DNA, 495 bp, Shewanella oneidensis MR-1
  CDS (1)..(495): transl_table=11
atgatcacattacacactaattttggcgacattaaactgcaactaaatgccgaaaaagcaccgctgaccgtggcaaactttatgaaatatgtcgacgaaggtttcttcgatggcaccattttccaccgtgtaattgacggctttatgatccaaggtggtggctttacggctgaaatgagccaaaaacgttgccatgagccagtgaaaaatgaagcgaacaatggtttatcaaaccgtactggtactatcgctatggcgcgtacttctgatccgcattcagcgacagctcaattctttatcaacgtaaacgacaataccttcctcgattttaaatctgagagcatgcaaggttggggttactgcgtattcggtgaagtagttgaaggcatggacattattgaaaaaatcaaagcggtaagcacaggtaaccgtggcatgcatcaagatgtaccattagaagcggtcgtgattgaaaaagtcagtgtagcggcctaa

SEQ ID NO: 1201 - protein, 164 aa, Shewanella oneidensis MR-1
MITLHTNFGDIKLQLNAEKAPLTVANFMKYVDEGFFDGTIFHRVIDGFMIQGGGFTAEMSQKRCHEPVKNEANNGLSNRTGTIAMARTSDPHSATAQFFINVNDNTFLDFKSESMQGWGYCVFGEVVEGMDIIEKIKAVSTGNRGMHQDVPLEAVVIEKVSVAA

SEQ ID NO: 1202 - DNA, 495 bp, Shewanella oneidensis MR-1
  CDS (1)..(495): transl_table=11
atgattattttcacaacaaactttggtgatatcagtatcgaacttgatgttgagcacgcccctgtgaccgccaaaaactttatgcgttactgcaaagaaggtttttatgaacacacgatttttcaccgtgtgatcaaaggctttatgatccaaggtggtggctttaccgctaaaatgaaagaaaaacccacccacgagccaattgttaacgaagctaacaaagggttatcaaacgtctttggtacaattgccatggcgcgcacagatgcgccgcattcagctactgcgcaattttttatcaataccgctaacaatgaattcctcgaccatacggcaaccaccaataacggttggggttatgcggtatttggtaaggtgaccgcgggacttgaagtgattttaaaaattgaagaggtgaagacaacgcgagtagcaggtcatgaagatgtgccccgtgagcctatcattatcgaaaaagtgacgattattgaatga

SEQ ID NO: 1203 - protein, 164 aa, Shewanella oneidensis MR-1
MIIFTTNFGDISIELDVEHAPVTAKNFMRYCKEGFYEHTIFHRVIKGFMIQGGGFTAKMKEKPTHEPIVNEANKGLSNVFGTIAMARTDAPHSATAQFFINTANNEFLDHTATTNNGWGYAVFGKVTAGLEVILKIEEVKTTRVAGHEDVPREPIIIEKVTIIE

SEQ ID NO: 1204 - DNA, 588 bp, Shewanella oneidensis MR-1
  CDS (1)..(588): transl_table=11
atgtttcgttggatatctgcactcttagttctctgtgctagttatagcagctgggcggcaatcgacattcaacccgatagcttgtatccccaagtcgagtttgatacgagtttaggtaagattgttgtcgaactcgatagaacccgcgcccccattacagtcgataacttcctcacctatgtggtcaaaggtgagtacaacaacacgattttccatcgcgtgatcagtgactttgtagtgcaaggcggtggactgaatccgcaattagaagagttgccagcgggcaagcccatagtcaacgagtcgggcaatggtttatccaatagcatgggcaccattgccatggcgcgcgacaatgaaccccattcggccacccgccagttttactttaacgttgcagacaacactaagcttgacccctcaaaacgtcgttggggttatgcggtatttggtgaagtgattgaaggtaagcaagtactcgaagccatggccgtagtagagacaaccactaatgccaaactgaattggcccgatgtacctgtcactcctatcatattgaaaacagctaaattactcccgaaaaaataa

SEQ ID NO: 1205 - protein, 195 aa, Shewanella oneidensis MR-1
MFRWISALLVLCASYSSWAAIDIQPDSLYPQVEFDTSLGKIVVELDRTRAPITVDNFLTYVVKGEYNNTIFHRVISDFVVQGGGLNPQLEELPAGKPIVNESGNGLSNSMGTIAMARDNEPHSATRQFYFNVADNTKLDPSKRRWGYAVFGEVIEGKQVLEAMAVVETTTNAKLNWPDVPVTPIILKTAKLLPKK

SEQ ID NO: 1206 - DNA, 501 bp, Pseudomonas putida KT2440
  CDS (1)..(501): transl_table=11
atgtccaaagtcaaactgagcaccaaccacggcgacatcgtcctgcaactggacgccgagaaagcgccgctgactaccgaaaacttcgttcagtacgtcaaggacggccactacaatggcaccgtattccaccgtgtgatcaaaggcttcatgatccagggcggcggcttcgaggccggcatgagccagaagaaaacccgcgccagcatccagaacgaagccgacaacggcctgaagaacaagaagtacagcattgccatggcccgtaccatggagccgcactccgcctcggcgcagttcttcatcaacgcctccgacaacgacttcctcaaccacagcggcaagaacgtgcaaggctggggttatgccgtattcggtgaagtgatcgaaggccgtgaagtggtcgacgccatcgaaaaagtggccaccggttccaaagctggccaccaggacgtaccgaaggacgacgtgatcatcgagaaagccgagatcattgagtga

SEQ ID NO: 1207 - protein, 166 aa, Pseudomonas putida KT2440
MSKVKLSTNHGDIVLQLDAEKAPLTTENFVQYVKDGHYNGTVFHRVIKGFMIQGGGFEAGMSQKKTRASIQNEADNGLKNKKYSIAMARTMEPHSASAQFFINASDNDFLNHSGKNVQGWGYAVFGEVIEGREVVDAIEKVATGSKAGHQDVPKDDVIIEKAEIIE

SEQ ID NO: 1208 - DNA, 558 bp, Pseudomonas putida KT2440
  CDS (1)..(558): transl_table=11
atgctgaaaaaactcctgctcaccgcctgctcggtcgccttcgccaccagtgtcatggcttccgacaagaccccgcacgtcctgctggacaccagcttcggccaggtcgaaatcgagctgaacgccgagaaggcaccgctcagtaccaagaacttcctgcagtacgtggacagcggcttctacaacaacaccatcttccaccgcgtgatcccggggttcatggtccagggcggcggtttcactgaccagatggtgcagaagaacaccaacgacccgatcaagaacgaggccagcaacggcctgcagaacacccgcggcaccctgtcgatggcacgcacgtccaacccgaactcggccaccagccaattcttcatcaacgtcgccgacaacgacttcctcaacccaggccgcgacgccggttatgccgtgttcggcaaggtgaccaaaggcatggaagtggtcgatcagatcgtcaactcgccgaccaccatcaaaaaaggcatgcgcgacgtaccggccgatccggtctatatcaagtccgccaaacgtatcgactga

SEQ ID NO: 1209 - protein, 185 aa, Pseudomonas putida KT2440
MLKKLLLTACSVAFATSVMASDKTPHVLLDTSFGQVEIELNAEKAPLSTKNFLQYVDSGFYNNTIFHRVIPGFMVQGGGFTDQMVQKNTNDPIKNEASNGLQNTRGTLSMARTSNPNSATSQFFINVADNDFLNPGRDAGYAVFGKVTKGMEVVDQIVNSPTTIKKGMRDVPADPVYIKSAKRID

SEQ ID NO: 1210 - DNA, 546 bp, Vibrio vulnificus CMCP6
  CDS (1)..(546): transl_table=11
atgctcaaagttatctgtgcatcactcgtactcacgagtagcctcgccttggcggggccaaaagttgaattcgaaacctctctggggaatttcactgttgagttaaatgaagaaaaagcgccgattagcgtcgaaaacttcgtaaaatacgtgaaagatggcagttacgttggatctcaatttcaccgtatcattcctggttttatggcgcaaggtggtggttttgatgagaaaatgaatcgtctacccagttacgcaccaataaagaacgaagcaagtaatggtctgaagaacgtgacgggctctatcgcaatggctcgaactcaagatcctaactctgcgacacgacaattctttatcaacttggtggataacgagtttctcgactatgacctccaacctccaggttacgccgtttttggtcaagtcaccgaagggtttgacgtcattcaacagatggcgagcaaaccgaccaaaagccaaggctacatgagagatattcccgtggaaccaatcgtgatcaccaaggccacactactcccataa

SEQ ID NO: 1211 - protein, 181 aa, Vibrio vulnificus CMCP6
MLKVICASLVLTSSLALAGPKVEFETSLGNFTVELNEEKAPISVENFVKYVKDGSYVGSQFHRIIPGFMAQGGGFDEKMNRLPSYAPIKNEASNGLKNVTGSIAMARTQDPNSATRQFFINLVDNEFLDYDLQPPGYAVFGQVTEGFDVIQQMASKPTKSQGYMRDIPVEPIVITKATLLP

SEQ ID NO: 1212 - DNA, 495 bp, Vibrio vulnificus CMCP6
  CDS (1)..(495): transl_table=11
atgatcacccttcacacaaattttggtgacatcaagattgagctaaatgcagaaaaagcaccagaaacgagcgcaaactttcttcaatactgccgcgaaggtttttacgacaacaccattttccaccgtgttatcgatggttttatgatccaaggcggtggtatggagtctggtctacgtgagaaaccaactcgcacgccaatcaaaaacgaagcgaacaacggcctaagcaacaaagtcggttctatcgcgatggctcgtactatggacccacactctgctagctcacagtttttcattaacgtaaacaacaacacatttctagacttccgtagcgaaagcctagacggttggggttactgcgtgttcggtgaagttgttgaaggtatggacgtggttaacaaaatcaaaggcgttagcacaggttcttacggcatgcaccaagacgtaccactagaagaagtggtgatcactggcgcaaccatcgaagagtaa

SEQ ID NO: 1213 - protein, 164 aa, Vibrio vulnificus CMCP6
MITLHTNFGDIKIELNAEKAPETSANFLQYCREGFYDNTIFHRVIDGFMIQGGGMESGLREKPTRTPIKNEANNGLSNKVGSIAMARTMDPHSASSQFFINVNNNTFLDFRSESLDGWGYCVFGEVVEGMDVVNKIKGVSTGSYGMHQDVPLEEVVITGATIEE

SEQ ID NO: 1214 - DNA, 504 bp, Pseudomonas syringae pv. tomato str. DC3000
  CDS (1)..(504): transl_table=11
atgtccaaagtaaagctgaccaccaaccacggcgacatcgttctgcagctgaacgcagaaaaagcgccactgactgtagccaacttcatcgaatacgttaacgccggccactatgaaaacactgtttttcaccgtgtgatcggtaatttcatggtccagggcggcggtttcgagcctggcatgaaagaaaagaaagacaagcgcccgagcatccagaacgaagctgacaacggcctgccgaacaagaagtacaccgttgcaatggcccgcaccatggagccgcattcggcttctgcgcagttcttcatcaacgtggctgacaacgccttcctgaaccacagcgccaagaccactcagggctggggttatgcggtattcgccgaagtgatcgaaggcactgacgtcgtcgacaagatcaagggcgtccctaccgccagcaaagccggtcaccaggatgtaccggtagaagacgtgatcatcgagaaagccgagatcgttgagtga

SEQ ID NO: 1215 - protein, 167 aa, Pseudomonas syringae pv. tomato str. DC3000
MSKVKLTTNHGDIVLQLNAEKAPLTVANFIEYVNAGHYENTVFHRVIGNFMVQGGGFEPGMKEKKDKRPSIQNEADNGLPNKKYTVAMARTMEPHSASAQFFINVADNAFLNHSAKTTQGWGYAVFAEVIEGTDVVDKIKGVPTASKAGHQDVPVEDVIIEKAEIVE

SEQ ID NO: 1216 - DNA, 564 bp, Pseudomonas syringae pv. tomato str. DC3000
  CDS (1)..(564): transl_table=11
atgctgaaaaaaatcgctctcgccgcctgctccgtgctgtttgccgccaacctgatggctgctcaagacaaggccacgcatgtggtactcgataccagcttcggccagattgaaatcgagctcgccgacaccaaggcgcctgtcagcactcagaactttctgggttacgtagacagcggcttctacagcaacaccatttttcaccgggtgattccgggcttcatggtgcaaggtggcggtttcacccagcaactggtgcagaaacccaccaaggacccgatcaagaacgaagcccagaacggtctgcataacgtgcgcggcacgattgccatggcccggacttcggatgtgaactcggccaccagccagttcttcatcaacaccaatgacaatgccatgctcgacaacggcacccgtgacttcggctacgcggtgttcggcaaagtcgtcaagggcatggacgtggtcgacaacatcgtcaacgcccgaaccggcaatcagaaaggcatgcaaaacgtgccagtcgacccgatcctgatcaagtccgccaaacgcgtcaactga

SEQ ID NO: 1217 - protein, 187 aa, Pseudomonas syringae pv. tomato str. DC3000
MLKKIALAACSVLFAANLMAAQDKATHVVLDTSFGQIEIELADTKAPVSTQNFLGYVDSGFYSNTIFHRVIPGFMVQGGGFTQQLVQKPTKDPIKNEAQNGLHNVRGTIAMARTSDVNSATSQFFINTNDNAMLDNGTRDFGYAVFGKVVKGMDVVDNIVNARTGNQKGMQNVPVDPILIKSAKRVN

SEQ ID NO: 1218 - DNA, 495 bp, Vibrio parahaemolyticus RIMD 2210633
  CDS (1)..(495): transl_table=11
atgatcacccttcacactaattttggtgacatcaagattcaactaaacgaagagaaagcgccagagacaagcgcaaacttccttcagtactgccgcgacggcttttacgacaacactcttttccaccgtgttattgacggtttcatgatccaaggcggcggcatggaatcaggtctacgtgaaaaatcaacacgtgcacctatcaagaacgaagcaaacaacggcctaagcaacaaagtcggtacacttgctatggctcgtacgatggaaccacattctgcaagctctcagttcttcatcaacgtaaacaacaacactttcctagatttccgtagcgaaagcctagatggttggggttactgtgtattcggtgaagttgtagaaggtatggacgttgtaaacaagatcaagggcgttagcactggctcttacggcatgcaccaagacgtaccactagaagacgtggtaatcactggtactacaatcgcagagtaa

SEQ ID NO: 1219 - protein, 164 aa, Vibrio parahaemolyticus RIMD 2210633
MITLHTNFGDIKIQLNEEKAPETSANFLQYCRDGFYDNTLFHRVIDGFMIQGGGMESGLREKSTRAPIKNEANNGLSNKVGTLAMARTMEPHSASSQFFINVNNNTFLDFRSESLDGWGYCVFGEVVEGMDVVNKIKGVSTGSYGMHQDVPLEDVVITGTTIAE

SEQ ID NO: 1220 - DNA, 546 bp, Vibrio parahaemolyticus RIMD 2210633
  CDS (1)..(546): transl_table=11
atgttacgcaaagcgattctttctttagcattacttagctgcagtgtttgggcagggccaaaagtggcgtttgaaacaacgttaggttcatttaccgtcgaactgaatgaagaaaaagcgccaatcacagtggctaacttcctgaaatatgtagaagacggcagctacgaaggtacgattttccatcgtattatcccaggattcatggcacaaggtggcggctttaaccaagacatgcagatggtaaaaacatacgcgccaatcaaaaacgaaggaaacaatggtctgaacaatgaccgtgcgaccatcgcaatggcacgcactaatgcaccagactctgcaactcgccaattcttcgtcaacctcgtcgacaatgacttcctaaactatggcgctcgcccacctggttatgcggtatttggtgaggtgactgaaggattcgacgttatcgaaaaaatggcacagcaaccgaccactacagtaggtcgaatgcgcgatgtaccagagacgcaaatcgtcattactaaagcaacgctactcaaataa

SEQ ID NO: 1221 - protein, 181 aa, Vibrio parahaemolyticus RIMD 2210633
MLRKAILSLALLSCSVWAGPKVAFETTLGSFTVELNEEKAPITVANFLKYVEDGSYEGTIFHRIIPGFMAQGGGFNQDMQMVKTYAPIKNEGNNGLNNDRATIAMARTNAPDSATRQFFVNLVDNDFLNYGARPPGYAVFGEVTEGFDVIEKMAQQPTTTVGRMRDVPETQIVITKATLLK

SEQ ID NO: 1222 - DNA, 495 bp, Vibrio parahaemolyticus RIMD 2210633
  CDS (1)..(495): transl_table=11
atgattattatgaccaccaacttcggtgacatcgaaattgaactgaacttggaacgagcgccagtgagctcaaaaaacttcaaaaaatactgtgaagaaggcttctacaacggcacgattttccaccgcgttatcgacggttttatgattcaaggtggcggtcacactgaggacatgacagaaaaaccaacccgcgcaccaatcgcaaacgaagcgaaccgtggcctaaaaaataccgtcggcacaattgcgatggcacgtaccgacgcgccgcactcagcaactgcgcagttcttcattaacttggaagacaatgatttcttagatcacaccgccaccaccaacttgggttggggctacgcagtatttggaaaagtgacagcgggcatggatgtggttaatcgcatcgcgaaagtgaaaacgacatcaaagcaggggcacgatgatgtgccatgcgaacctatcattattgaaaaagtgacgatcagcgaatag

SEQ ID NO: 1223 - protein, 164 aa, Vibrio parahaemolyticus RIMD 2210633
MIIMTTNFGDIEIELNLERAPVSSKNFKKYCEEGFYNGTIFHRVIDGFMIQGGGHTEDMTEKPTRAPIANEANRGLKNTVGTIAMARTDAPHSATAQFFINLEDNDFLDHTATTNLGWGYAVFGKVTAGMDVVNRIAKVKTTSKQGHDDVPCEPIIIEKVTISE

SEQ ID NO: 1224 - DNA, 495 bp, Salmonella enterica subsp. enterica serovar Typhi str. Ty2
  CDS (1)..(495): transl_table=11
atggttactttccacactaatcacggcgatatcgtaatcaaaacctttgatgataaagcgcctgaaacagttaaaaacttcctggactactgccgcgaaggtttttacaacaacaccattttccaccgtgtgattaacggttttatgattcagggcggcggctttgagccgggcatgaaacagaaagccaccaaagaggcgatcaaaaacgaagccaacaatggtctgaaaaatacccgtggtacgctggcgatggcgcgtactcaggcaccacattcggctaccgcgcaattcttcatcaacgtggcagacaacgacttcctgaacttctccggcgaaagtctgcagggctggggctactgcgtctttgcggaaatcgtagaaggtatggacgtggtagataaaatcaaaggcgtcgccactggccgtagcggtatgcaccaggacgtaccaaaagaagacgtcatcattgaaaacgtgaccgtcagcgagtaa

SEQ ID NO: 1225 - protein, 164 aa, Salmonella enterica subsp. enterica serovar Typhi str. Ty2
MVTFHTNHGDIVIKTFDDKAPETVKNFLDYCREGFYNNTIFHRVINGFMIQGGGFEPGMKQKATKEAIKNEANNGLKNTRGTLAMARTQAPHSATAQFFINVADNDFLNFSGESLQGWGYCVFAEIVEGMDVVDKIKGVATGRSGMHQDVPKEDVIIENVTVSE

SEQ ID NO: 1226 - DNA, 492 bp, Nitrosomonas europaea ATCC 19718
  CDS (1)..(492): transl_table=11
atggtcaaaatacatactaatcatggcgtcattactttggaactcgacaatgacaaaacaccaatcactgtcgaaaattttttgcgttatgtcgatagcggacattacgaaaatactctgtttcaccgcgtgatcgacggtttcatgattcaaggtggcggttatgcaccgggaatgaaagagaaatcgactctggcacccattcagaatgaggctgcactgggttccggtaatgaagcctataccatcgccatggcacgtacttccgatgtacattctgccacggcacaatttttcatcaacgttgccaacaaccattttttgaatcacaccaacatgacgccacagggttttggctattgtgtgttcggcagagttgtcgaaggcaaggaagtgatcgatgcgatcaaaaaagtaaaaaccggtcgtcatgccggacatcaggatgttccgctggaagatgtcatcattcagaaagcagagagagtgtga

SEQ ID NO: 1227 - protein, 163 aa, Nitrosomonas europaea ATCC 19718
MVKIHTNHGVITLELDNDKTPITVENFLRYVDSGHYENTLFHRVIDGFMIQGGGYAPGMKEKSTLAPIQNEAALGSGNEAYTIAMARTSDVHSATAQFFINVANNHFLNHTNMTPQGFGYCVFGRVVEGKEVIDAIKKVKTGRHAGHQDVPLEDVIIQKAERV

SEQ ID NO: 1228 - DNA, 642 bp, Nitrosomonas europaea ATCC 19718
  CDS (1)..(642): transl_table=11
atgaaaaccttcccctttgagcgacagactgcccgcccgatgaaatcgatcacctccaccggtcttttctttattctgtgtctgatgatatcggcaacctcggcttttgcggccaatccaaaggtcgaaatcaaaaccaatctcggtgcaatacaggtggaactgtatcccgatcagtcgcctaaaacagtcgaaaattttctgaattacgtcaaggatgactactataccggcacgatttttcatcgtgtcattgccggtttcatggttcaggggggaggattcgatcagaattacacccagaaaccgacccggcagccagttgaaaatgaagctgccaacgggcttaagaacaccattggtaccattgcgatggcacgcacccaagatccgcattctgcttcatcacaattttttatcaatgttgcaaacaatcactttcttgactataccgcccccaccctgcaaggatatggctacactgtctttggcaaagtcaccagcggcatggatgtggtcaataacattgccagttcaccaaccggctcaaacgggccttttaacagggatgtccctcggaaaatgatcatcatcgaaagtatcaaactgctcccggctgcagtcagccccgaaaatccataa

SEQ ID NO: 1229 - protein, 213 aa, Nitrosomonas europaea ATCC 19718
MKTFPFERQTARPMKSITSTGLFFILCLMISATSAFAANPKVEIKTNLGAIQVELYPDQSPKTVENFLNYVKDDYYTGTIFHRVIAGFMVQGGGFDQNYTQKPTRQPVENEAANGLKNTIGTIAMARTQDPHSASSQFFINVANNHFLDYTAPTLQGYGYTVFGKVTSGMDVVNNIASSPTGSNGPFNRDVPRKMIIIESIKLLPAAVSPENP

SEQ ID NO: 1230 - DNA, 510 bp, Haemophilus ducreyi 35000HP
  CDS (1)..(510): transl_table=11
atgattacattacatactaattatggcgatattaaaatcgaattatattatgataaagcgccaatcactgcacaaaattttaccgattactgtcagcaaggtttttataatggcactatttttcaccgtgtaattgatggttttatgattcagggtgggggtatgagcgcaggtttaattgaaaaaccaaccaatgcgcctattcagaatgaagcaagtaatggcctaagcaataaacgtggtacattagcaatggcacgtactgctgatccacattcagcaagctcacaattttttatcaatgtagcggataatacttttttagattatcgtgctaaagaaatgttcggtaaaacggttatacaagaatggggctatgctgtctttggcgaagttacggaaggtatggaagtcattgataagatcaaagcagttaaaacaggtaacaaagggtttcaccaagatgtgcccgttgaggatattgtaattgaatcggtcactgtcgcataa

SEQ ID NO: 1231 - protein, 169 aa, Haemophilus ducreyi 35000HP
MITLHTNYGDIKIELYYDKAPITAQNFTDYCQQGFYNGTIFHRVIDGFMIQGGGMSAGLIEKPTNAPIQNEASNGLSNKRGTLAMARTADPHSASSQFFINVADNTFLDYRAKEMFGKTVIQEWGYAVFGEVTEGMEVIDKIKAVKTGNKGFHQDVPVEDIVIESVTVA

SEQ ID NO: 1232 - DNA, 510 bp, Bordetella bronchiseptica RB50
  CDS (1)..(510): transl_table=11
atgagcacgaatccccgcgtcaagctgcacaccaaccagggcgacatcatcatcaccctgaatgccgaaaaggcgcccaagagcgtggaaaacttcgtcgcctataccaaggacggcttctatgacggcacggtgttccaccgcgtcatcgacggcttcatgatccagggcggcggcttcgagcccggcatgaagcaaaagcccaccaaggcgcccatcgagaacgaggccaacaacggcctgaagaacgacaaatacacgctcgccatggcccgcaccagcgatccgcactcggccaccgcgcagttcttcatcaacgtgtccgacaacgacttcctcaacttcaccgcgcccacgcccaacggctggggctacgccgtgttcggcgtggtcaccgagggcaccgaggtggtcgacaagatcaagaacgtcaagaccggcaaccgtggcttccaccagaacgtgccggccgaggacgtgatcatcgaaaaggccgaagtccttgaataa

SEQ ID NO: 1233 - protein, 169 aa, Bordetella bronchiseptica RB50
MSTNPRVKLHTNQGDIIITLNAEKAPKSVENFVAYTKDGFYDGTVFHRVIDGFMIQGGGFEPGMKQKPTKAPIENEANNGLKNDKYTLAMARTSDPHSATAQFFINVSDNDFLNFTAPTPNGWGYAVFGVVTEGTEVVDKIKNVKTGNRGFHQNVPAEDVIIEKAEVLE

SEQ ID NO: 1234 - DNA, 558 bp, Chromobacterium violaceum ATCC 12472
  CDS (1)..(558): transl_table=11
atgaagaaactgatcagcagcctggccctcgccgccctgcccgcactcgccttcgccgccccggtggcggagatggtcaccaacaagggcaatatcgaaatcgcgctggattcggccaaggcgcccaagtccgtcgccaatttcgtcgcctacgccaaggccggccactacaacggcaccgtgttccaccgcgtgatagacggtttcatgatccagggcggcggcttcgacgccaagctcaaccagaagccgactcgcgcgccgatcgccaacgaggcgagcaacggcctgaagaacgatgtcggcaccatcgcgatggcccgcacctcggatccgaactccgccaccgcgcagttcttcatcaacgtcgccgccaacgacttcctcaattacagttcgccgaccccgcagggcgccggctacgccgtattcggcaaagtcaccaagggcatggatgtggtcaaccgcatcgccaaagtccgcaccggcagcatgaacggcatgcaggacgtgccgttcgagccggtgatcatccagaaagtcaccatcaaaccgtaa

SEQ ID NO: 1235 - protein, 185 aa, Chromobacterium violaceum ATCC 12472
MKKLISSLALAALPALAFAAPVAEMVTNKGNIEIALDSAKAPKSVANFVAYAKAGHYNGTVFHRVIDGFMIQGGGFDAKLNQKPTRAPIANEASNGLKNDVGTIAMARTSDPNSATAQFFINVAANDFLNYSSPTPQGAGYAVFGKVTKGMDVVNRIAKVRTGSMNGMQDVPFEPVIIQKVTIKP

SEQ ID NO: 1236 - DNA, 492 bp, Chromobacterium violaceum ATCC 12472
  CDS (1)..(492): transl_table=11
atgatcaaactgacgaccaatttcggtgaaatcaccctggaactggatcacgagaaggcgccgaaaaccgccgccaacttcgagcaatacgtgaaaagcggccactacgacggcaccatcttccaccgcgtgatcaacggcttcatgatccagggcggcggcttcgacgccgacatgaaccagaagccgacccaggagccgatccagaacgaggccaacaacggcctgtccaacaagacctacaccgtcgccatggcccgcaccatggatccgcactcggcgtcggcgcagttcttcatcaacgtctccgacaacgatttcctggacttcaaatcggaaagcacccagggctggggttacgcggtgttcggccaggtcgtcgccggccaggacatcgtggaccgcatcaagaccgtacgcaccggccgcactggcatgcatcaggacgtgccggtggagccggtggtgatccagaaggccgagatcgtctaa

SEQ ID NO: 1237 - protein, 163 aa, Chromobacterium violaceum ATCC 12472
MIKLTTNFGEITLELDHEKAPKTAANFEQYVKSGHYDGTIFHRVINGFMIQGGGFDADMNQKPTQEPIQNEANNGLSNKTYTVAMARTMDPHSASAQFFINVSDNDFLDFKSESTQGWGYAVFGQVVAGQDIVDRIKTVRTGRTGMHQDVPVEPVVIQKAEIV

SEQ ID NO: 1238 - DNA, 570 bp, Photorhabdus luminescens subsp. laumondii TTO1
  CDS (1)..(570): transl_table=11
atgtttaaacgtattttagtagcacttgtaactgcatgctctctgagcgcaatggcacctctggctttggcggtgggagaaacccacgtgaagctgacaacaacggagggtaatattgaactggaattaaataaccagaaagcgccaattacaacgaaaaactttattgaatacgtcaatgagggttattacaacaatacaatcttccatcgggtaatccctggatttatggtgcaaggtggtggttttaccaaagatttgcagcaaaaagcgactaaagctgctattaaaaatgaggcagataatggactgcgtaatttacgcggaactatctctatggcacgtaccgctgataaagacagtgccactagccaattttttattaatgtagcggataatgctttccttgatcacggtcagcgtgattttggctatgcagtatttggtaaagtcgtaaaaggtatggatgttgtggataaaatttctcaagtcaaaacggaaaacgttggtccatatcagaatgtaccggttaaacctgttgctattctgtctgcggagattatcccttaa

SEQ ID NO: 1239 - protein, 189 aa, Photorhabdus luminescens subsp. laumondii TTO1
MFKRILVALVTACSLSAMAPLALAVGETHVKLTTTEGNIELELNNQKAPITTKNFIEYVNEGYYNNTIFHRVIPGFMVQGGGFTKDLQQKATKAAIKNEADNGLRNLRGTISMARTADKDSATSQFFINVADNAFLDHGQRDFGYAVFGKVVKGMDVVDKISQVKTENVGPYQNVPVKPVAILSAEIIP

SEQ ID NO: 1240 - DNA, 495 bp, Photorhabdus luminescens subsp. laumondii TTO1
  CDS (1)..(495): transl_table=11
atggtgactttccataccaattttggcgatattgtaattaatactttcgctgataaagctcctgtaactgttgagaatttcttgaactactgccgcaatagtttctacgataatactattttccaccgtgttattaacggtttcatgattcagggtggtggattcgaacctggtatgaaacaaaagccgactgatgcagctatcaaaaacgaagccaataacggtctgaaaaacaaccgtggtactttggcaatggcccgtactaacgatccacactcagcaactgcgcagttcttcattaatgttgttgataatgatttcctgaacttccgctctgagcgccctgatggttggggttactgcgtctttgccgaagtgatcgaaggtatggatgttgttgataaaatcaaaggcgtttctaccggtcgcagcggtatgcaccaagatgtaccactcgaagatgttatcatcgaaaaagtcactgtcagcgaataa

SEQ ID NO: 1241 - protein, 164 aa, Photorhabdus luminescens subsp. laumondii TTO1
MVTFHTNFGDIVINTFADKAPVTVENFLNYCRNSFYDNTIFHRVINGFMIQGGGFEPGMKQKPTDAAIKNEANNGLKNNRGTLAMARTNDPHSATAQFFINVVDNDFLNFRSERPDGWGYCVFAEVIEGMDVVDKIKGVSTGRSGMHQDVPLEDVIIEKVTVSE

SEQ ID NO: 1242 - DNA, 495 bp, Vibrio vulnificus YJ016
  CDS (1)..(495): transl_table=11
atgatcacccttcacacaaattttggtgacatcaagattgagctaaatgcagaaaaagcaccagaaacgagcgcaaactttcttcaatactgccgcgatggcttttacgacaacaccgttttccaccgcgttatcgatggttttatgatccaaggcggtggtatggagtctggtctacgtgagaaaccaactcgcgcgccaatcaaaaacgaagcgaacaacggcctaagcaacaaagtcggttctatcgcgatggctcgtactatggacccacactctgctagctcacagtttttcattaacgtaaacaacaacacatttctagacttccgtagcgaaagcctagacggttggggttactgcgtgttcggtgaagttgttgaaggtatggacgtggttaacaaaatcaaaggcgttagcacaggttcttacggcatgcaccaagacgtaccactagaagaagtggtgatcactggcgcaaccatcgaagagtaa

SEQ ID NO: 1243 - protein, 164 aa, Vibrio vulnificus YJ016
MITLHTNFGDIKIELNAEKAPETSANFLQYCRDGFYDNTVFHRVIDGFMIQGGGMESGLREKPTRAPIKNEANNGLSNKVGSIAMARTMDPHSASSQFFINVNNNTFLDFRSESLDGWGYCVFGEVVEGMDVVNKIKGVSTGSYGMHQDVPLEEVVITGATIEE

SEQ ID NO: 1244 - DNA, 546 bp, Vibrio vulnificus YJ016
  CDS (1)..(546): transl_table=11
atgctcaaagttatctgtgcatcactcgtactcacgagtagcctcgccttggcggggccaaaagttgaattcgaaacctctctggggaatttcactgttgagttaaatgaagaaaaagcgccgattagcgtcgaaaacttcgtaaaatacgtgaaagatggcagttacgtaggatctcaatttcaccgtgtcattcctggttttatggcgcaaggtggtggttttgatgagaaaatgaatcgtctacccagttacgcaccaataaagaacgaagcaagtaatggtctgaagaacgtgacgggctctatcgcaatggctcgaactcaagatcctaactctgcgacacgacaattctttatcaacttggtggataacgagtttctcgactatgacctccaacctccaggttacgccgtttttggtcaagtcaccgaagggtttgacgtcattcaacagatggcgagcaaaccgaccaaaagccaaggctacatgagagatattcccgtggaaccaatcgtgatcaccaaggccacactactcccataa

SEQ ID NO: 1245 - protein, 181 aa, Vibrio vulnificus YJ016
MLKVICASLVLTSSLALAGPKVEFETSLGNFTVELNEEKAPISVENFVKYVKDGSYVGSQFHRVIPGFMAQGGGFDEKMNRLPSYAPIKNEASNGLKNVTGSIAMARTQDPNSATRQFFINLVDNEFLDYDLQPPGYAVFGQVTEGFDVIQQMASKPTKSQGYMRDIPVEPIVITKATLLP

SEQ ID NO: 1246 - DNA, 516 bp, Geobacter sulfurreducens PCA
  CDS (1)..(516): transl_table=11
atgagcgaagagcagaacccccgggtcatgcttgagacctcccaggggaacatcaccatcgaactgttcagggacaaggcgccgatttccgcccgcaatttcctctcttacgtgaaggacggctactatgacggtctcatcttccaccgggtcatcaagggattcatggtccaggggggcgggatggacgaaaacatgcaaccccggaagaccaagttcgccatcaagaacgaggcgaccaacggcctctccaacaagcgggggactctggccatggcccggaccgcggtggtcgacagcgccacgtcccagttcttcatcaacctggtggacaacgcgtttctcgataaccggggcaagactcccgatcttttcggctatgccgtgttcggacaggtcgtggaggggatggaggtagtggacgccattgccggggttaagaccggcaacagggcgggccactcggatgtgccggtggagaacgtgtttatcaccagggcttcggtgatcgaataa

SEQ ID NO: 1247 - protein, 171 aa, Geobacter sulfurreducens PCA
MSEEQNPRVMLETSQGNITIELFRDKAPISARNFLSYVKDGYYDGLIFHRVIKGFMVQGGGMDENMQPRKTKFAIKNEATNGLSNKRGTLAMARTAVVDSATSQFFINLVDNAFLDNRGKTPDLFGYAVFGQVVEGMEVVDAIAGVKTGNRAGHSDVPVENVFITRASVIE

SEQ ID NO: 1248 - DNA, 597 bp, Geobacter sulfurreducens PCA
  CDS (1)..(597): transl_table=11
atgttcaagagactgatcatcgccctgctcatgagcgggctgttcggcgcactgctcctggccggcaacgccgatgccgccgacaaggcggccaaggccgccaatcccgtggtggttatggagacgagcctcggcaagatcgccgtggagctctacccggacaaggcgccggccacggtgaagaacgttctcgactacgtcaagagcggcttctacgatggcaccatcttccaccgggtcatccccggcttcatgatccagggaggcggcttcaccaccgaccggaaacagaaggagaccagggctccgatcaagaacgaggcggacaacggcctcaagaacgaccggggtaccattgccatggcccgcaccgccagccccgacagcgccacggcccagttcttcatcaacttggtgaacaacgaaaacctgaaccgtccccgccccgacggctacggctacgcggtgttcggcaaggtgatcgaggggatggatgtggttgacaagattgccgcctcccccacccagcgtctcaacatgctcttcgccaacataccggtgacgccggtggtcatcacctccgtcaagatccggtaa

SEQ ID NO: 1249 - protein, 198 aa, Geobacter sulfurreducens PCA
MFKRLIIALLMSGLFGALLLAGNADAADKAAKAANPVVVMETSLGKIAVELYPDKAPATVKNVLDYVKSGFYDGTIFHRVIPGFMIQGGGFTTDRKQKETRAPIKNEADNGLKNDRGTIAMARTASPDSATAQFFINLVNNENLNRPRPDGYGYAVFGKVIEGMDVVDKIAASPTQRLNMLFANIPVTPVVITSVKIR

SEQ ID NO: 1250 - DNA, 612 bp, Methanococcus maripaludis S2
  CDS (1)..(612): transl_table=11
atggattttaaaaacgctatttttataattgtcgcatcaattgttcttttaaccagtttttcaggatgtacagaatctgattcgacaacttcgaacgaaactggtgaaatagtttatgcgacaattcagacgaattatggaaacatgacttttgaactctatcctgataaagcaccaataactgttgaaaacttcaaaaaatacgcagaatcaggattttacgaaggaacaatctttcacagagtaataagtgactttatgattcagggtggcggatttaccgcaaatggaactaaaaaagaaacactcgatccaattaaaaatgaagcggataatggactttcaaacaaaagaggaactatcgcaatggcaagaaccaacattgtagattccgcaacaagccagtttttcataaacacagttgataattcatatttggattatcaaaatgatcaaaattacggttacgcagtatttggtgaactgactgacggtttcgatgttcttgacaaaattgaaaatgtagctactgcaaataatgggcagtatcaaaactggcctgttgaagatgtaatcattgaaaaagttacaatcgatccaattaaaaaatag

SEQ ID NO: 1251 - protein, 203 aa, Methanococcus maripaludis S2
MDFKNAIFIIVASIVLLTSFSGCTESDSTTSNETGEIVYATIQTNYGNMTFELYPDKAPITVENFKKYAESGFYEGTIFHRVISDFMIQGGGFTANGTKKETLDPIKNEADNGLSNKRGTIAMARTNIVDSATSQFFINTVDNSYLDYQNDQNYGYAVFGELTDGFDVLDKIENVATANNGQYQNWPVEDVIIEKVTIDPIKK

SEQ ID NO: 1252 - DNA, 489 bp, Methanococcus maripaludis S2
  CDS (1)..(489): transl_table=11
atgattgctacaattcaaacaacacttggaacaattaaaatagaactatttgctgataaagcaccaataactgttgaaaacttcaaaaaatacgcagaaactggatttttcgatggaacgatctttcacagagtaataaaaggattcatggttcagggtggtggatttacaaaagatggaattcaaaaagaaacttttgcaccaattaaaaacgaagctaaaaacggactttcaaacaaaagaggaactatcgcaatggctagaaccaacgttgtagattcagcaacaagccagtttttcataaatactgttgacaacatgtttttaaactaccaaaatgatgcaaactacggttacgcagtatttggtgaaatgatcgacggttttgaagtacttgacaaaattgcagcagttaaaactggaaaccggggatacttcgcagactggcctgttgaagatgtaattattgaaaaagttacagtcgaataa

SEQ ID NO: 1253 - protein, 162 aa, Methanococcus maripaludis S2
MIATIQTTLGTIKIELFADKAPITVENFKKYAETGFFDGTIFHRVIKGFMVQGGGFTKDGIQKETFAPIKNEAKNGLSNKRGTIAMARTNVVDSATSQFFINTVDNMFLNYQNDANYGYAVFGEMIDGFEVLDKIAAVKTGNRGYFADWPVEDVIIEKVTVE

SEQ ID NO: 1254 - DNA, 600 bp, Yersinia pestis biovar Microtus str. 91001
  CDS (1)..(600): transl_table=11
ttgtccgcatcccatagaaaggaaccgttaatgtttaaacgtactttagtgaccttcattgccctatgttccctcagcgccgtagcgcctgctgctttagctgccggtgagcctcatgtgttgttaacaacgtcggccgggaatattgagctggagctcaatagccagaaggcacccatttcaacccagaatttcgttgattatgttaacaatggttactataacaacactattttccaccgtgttatccctggctttatgattcaaggcggcggttttaccgcagatttcaaagaaaaaacgcctaaaacaccaatcaaaaatgaagcagataatggcctgcgtaacctacgtggtaccatttcgatggcccgtactgcagataaagacagcgccaccagtcagttcttcttgaacgtggcagacaatgctttccttgaccacggccaacgtgactttggttatgcggtattcggtaaagtcgttaaaggcatggatgtcgtcgaaaaaatttctcaggttcagacagaaaacgtcggcccttatcagaatgtacccgttaaaccgatcactatcctgtcagcaaaagttttaccttaa

SEQ ID NO: 1255 - protein, 199 aa, Yersinia pestis biovar Microtus str. 91001
MSASHRKEPLMFKRTLVTFIALCSLSAVAPAALAAGEPHVLLTTSAGNIELELNSQKAPISTQNFVDYVNNGYYNNTIFHRVIPGFMIQGGGFTADFKEKTPKTPIKNEADNGLRNLRGTISMARTADKDSATSQFFLNVADNAFLDHGQRDFGYAVFGKVVKGMDVVEKISQVQTENVGPYQNVPVKPITILSAKVLP

SEQ ID NO: 1256 - DNA, 489 bp, Herminiimonas arsenicoxydans
  CDS (1)..(489): transl_table=11
atggctgtcatcctcaccaccaaccacggcaaaatcacaattgaactcgacgcagaaaaagcgccgaaaacggtagaaaactttcttgcctacgtcaactccggccattacgccggcaccatctttcatcgcgtgatcgatggcttcatgatccagggcggcggctttgaaccgggcatgaaacagaaaccgaccaacgatccggttgaaaacgaagcgaagaacggcctcaagaacgatatgtacacgctggcaatggcacgtacttcggcaccgcattcggcttctgcccagttcttcatcaacatcaacaacaacagcttcctcgactatccgggtcaggatggctggggttactgcgtattcggcaaagtcactgacggcaccgatgttgtagaaaaaatcaaatccgtcaaaaccacgcgcagcggcatgttcgccgatgtaccagtggaagacgtgatcatcgaaaaagcagaagtcatctga

SEQ ID NO: 1257 - protein, 162 aa, Herminiimonas arsenicoxydans
MAVILTTNHGKITIELDAEKAPKTVENFLAYVNSGHYAGTIFHRVIDGFMIQGGGFEPGMKQKPTNDPVENEAKNGLKNDMYTLAMARTSAPHSASAQFFININNNSFLDYPGQDGWGYCVFGKVTDGTDVVEKIKSVKTTRSGMFADVPVEDVIIEKAEVI

SEQ ID NO: 1258 - DNA, 579 bp, Herminiimonas arsenicoxydans
  CDS (1)..(579): transl_table=11
atgaaattttcccgtcgtcgcgccctctccatcgccttcgccctgtcgctgtcaggcaccctgcaactggcacatgcaaccgatgcaccgcgagttttgctgaaaacaaatatgggcgatatcgtgctggaactgaatcaggacaaggccccgaaaaccgtagacaattttctgcaatacgtaaaaagcggccagtacaacggtacgatttttcatcgcgtcatagccgacttcatgattcagggcggcggtttcgacaaggacatgcgtgaaaaagtcacccgcgcgcctatccagaatgaagcgcaaaacggtttgaaaaacgatatctacacgatcgccatggcacgtaccggcaatccgcattccgccactgcacaatttttcatcaacacgcaaaccaacaacatgctgaactatccgggtcaggatggctggggttatacagtattcggcaaagtcgtcaaaggcacggaagtcgtcaacaagatcaagcaggtcaataccggtaatcgcgggccgcatcaaaatgtaccggcacagccggtgatcatcgaatccgctaccattacacaataa

SEQ ID NO: 1259 - protein, 192 aa, Herminiimonas arsenicoxydans
MKFSRRRALSIAFALSLSGTLQLAHATDAPRVLLKTNMGDIVLELNQDKAPKTVDNFLQYVKSGQYNGTIFHRVIADFMIQGGGFDKDMREKVTRAPIQNEAQNGLKNDIYTIAMARTGNPHSATAQFFINTQTNNMLNYPGQDGWGYTVFGKVVKGTEVVNKIKQVNTGNRGPHQNVPAQPVIIESATITQ

SEQ ID NO: 1260 - DNA, 576 bp, Burkholderia vietnamiensis G4
  CDS (1)..(576): transl_table=11
atgaaacgtctgttgctggcgcttggcggcgccgcccttgtcgcgaccgcgcctgcttttgcgcaatcggctaccgcgcaccccgtcgtgcagctgaagacctcgcagggcgacattcgcgtcgagctctacccggagaaggcgccgaaaacggtcgccaacttcctcgattacgtgaaggccggccaatacaacggcacgatcttccatcgcgtgatcaagggcttcatgatccagggcggcggctacaagaccaacttcgaggaaaagccgacgcgtgcgccgatcccgctggaaagccgcaatggtctgaagaacctgacgggcacgatcgcgatggcgcgcaccagcgatccgaattcggccaccgagcagttcttcatcaataccgtcgacaacagcggcctcgactacccgaacccggacggcaacggctatgccgtgttcggcaaggtcgtgtccggcctcgacgtcgtgaagaagatcgaaggcgtggccacgacctcgcgcggcccgatgcaggacgtgccggcccagccggtcgtgatcgaatcggccagcgtcgtctcgaaataa

SEQ ID NO: 1261 - protein, 191 aa, Burkholderia vietnamiensis G4
MKRLLLALGGAALVATAPAFAQSATAHPVVQLKTSQGDIRVELYPEKAPKTVANFLDYVKAGQYNGTIFHRVIKGFMIQGGGYKTNFEEKPTRAPIPLESRNGLKNLTGTIAMARTSDPNSATEQFFINTVDNSGLDYPNPDGNGYAVFGKVVSGLDVVKKIEGVATTSRGPMQDVPAQPVVIESASVVSK

SEQ ID NO: 1262 - DNA, 492 bp, Burkholderia vietnamiensis G4
  CDS (1)..(492): transl_table=11
atggttgaactgcatacgaaccacggcgtgatcaagctcgagctggacgccgcgaaggcaccgaagacggtcgagaacttcctgaactacgtgaagaagggccactatgacggcacggtgttccaccgcgtgatcaacggcttcatgatccagggcggcggcttcgagccgggcctgaagcaaaagccgaccgacgcgccgatcgacaacgaagcgaacaacggcctgaagaacgacacgtacacgatcgcgatggcgcgcaccaacgatccgcattcggccaccgcgcagttcttcatcaacgtgaacgacaacgacttcctgaaccactcgtcgccgacgccgcagggctggggctacgcggtgttcggcaaggtcgtcgaaggccaggacgtggtcgacaagatcaaggccgtgaagacgggcaacgctggcttccaccaggacgtgccggccgacgacgtcgtgatcgaaaaggccgtggtggtctaa

SEQ ID NO: 1263 - protein, 163 aa, Burkholderia vietnamiensis G4
MVELHTNHGVIKLELDAAKAPKTVENFLNYVKKGHYDGTVFHRVINGFMIQGGGFEPGLKQKPTDAPIDNEANNGLKNDTYTIAMARTNDPHSATAQFFINVNDNDFLNHSSPTPQGWGYAVFGKVVEGQDVVDKIKAVKTGNAGFHQDVPADDVVIEKAVVV

SEQ ID NO: 1264 - DNA, 501 bp, Dichelobacter nodosus VCS1703A
  CDS (1)..(501): transl_table=11
atgaataccaattatggggaaattgttattgaattggacgaagtgcgcgcgccggaaaccgttgataattttataaaatatgttaattcaggtttttacgacggcaccatttttcaccgcgtgattgcaggttttatgattcaaggcggtggatttacggcagattttcaacaaaaacccacgcgcagccccattgccagcgaatcgcaaaatggtttgaaaaatcaacgggcaacgattgcgatggcgcgcaccaatgatccgcattctgccaccgcgcagttttttattaatgtggttgataatgatgcgctcaatcctaacggcgcggataaatatggttataccgtttttggcgcagtaaaaaaaggcatggacgttgtcgataaaatcgcgcaaatgcccaccggcgccggcggtatttttgaacaagatgttccgcaatcaccggttttaattgaaaaagtacgcattattgatgcgcccaatgcaaaaaattaa

SEQ ID NO: 1265 - protein, 166 aa, Dichelobacter nodosus VCS1703A
MNTNYGEIVIELDEVRAPETVDNFIKYVNSGFYDGTIFHRVIAGFMIQGGGFTADFQQKPTRSPIASESQNGLKNQRATIAMARTNDPHSATAQFFINVVDNDALNPNGADKYGYTVFGAVKKGMDVVDKIAQMPTGAGGIFEQDVPQSPVLIEKVRIIDAPNAKN

SEQ ID NO: 1266 - DNA, 495 bp, Dichelobacter nodosus VCS1703A
  CDS (1)..(495): transl_table=11
atgattcgtttacatactaataaaggcacaattgatattgaattggatcacgaaaaagcgccaaaaacggcagcgaacttccaacaatacgtcaccgaaggtttttatgacggcactatttttcaccgcgtaattgcgggttttatgattcaaggcggcggtatgaccgctggacttaaagaaaaaaagacccgcgaacccattgaaaatgaagctgataatggtttacaaaatctccgtggtacgattgcgatggcgcgcactgccaatccgcattctgccagcgctcaattcttcatcaatcttgttgataacgattttttaaatcacaccggcaaaaatgcgcacggttggggttatgccgtatttgggaaagtggtttccggcatggaagtggttgatgctattgccaaaacaaaaaccggacgcatgggtttttatgatgacgtgcccacagaagaaatcattattgaacgggctgaactcatcgcataa

SEQ ID NO: 1267 - protein, 164 aa, Dichelobacter nodosus VCS1703A
MIRLHTNKGTIDIELDHEKAPKTAANFQQYVTEGFYDGTIFHRVIAGFMIQGGGMTAGLKEKKTREPIENEADNGLQNLRGTIAMARTANPHSASAQFFINLVDNDFLNHTGKNAHGWGYAVFGKVVSGMEVVDAIAKTKTGRMGFYDDVPTEEIIIERAELIA

SEQ ID NO: 1268 - DNA, 531 bp, Klebsiella pneumoniae subsp. pneumoniae MGH 78578
  CDS (1)..(531): transl_table=11
gtgctggcaccacactcatcggaacaggatgcaaaaatggttactttccacaccaatcatggcgatatcgtaatcaaaacgtttgacgacaaagcgccggaaacagttaaaaacttcctggactactgccgcgaaggtttctacgacaacaccattttccaccgtgttatcaacggcttcatgattcagggcggcggttttgaacctggcatgaaacaaaaagcgaccaaatctccgattcagaacgaagcgaacaacggtctgaaaaacacccgcggcacgctggcgatggcccgtactcaggcgccgcactctgccaccgcgcagttcttcatcaacgtggttgacaacgacttcctgaacttctccggcgaaagcctgcagggttggggctactgcgtcttcgcggaagtggttgaaggcatggacgtggtagacaaaatcaaagcggttgccaccggccgcagcggcatgcaccaggatgtgccgaaagatgatgtgatcatcaaaagcgtcaccgtcagcgagtaa

SEQ ID NO: 1269 - protein, 176 aa, Klebsiella pneumoniae subsp. pneumoniae MGH 78578
MLAPHSSEQDAKMVTFHTNHGDIVIKTFDDKAPETVKNFLDYCREGFYDNTIFHRVINGFMIQGGGFEPGMKQKATKSPIQNEANNGLKNTRGTLAMARTQAPHSATAQFFINVVDNDFLNFSGESLQGWGYCVFAEVVEGMDVVDKIKAVATGRSGMHQDVPKDDVIIKSVTVSE

SEQ ID NO: 1270 - DNA, 570 bp, Klebsiella pneumoniae subsp. pneumoniae MGH 78578
  CDS (1)..(570): transl_table=11
atgctcaaatcaacactggcggcgatggctgccgttttcgctatttcagcgttctccccggccatggcggcaaagggcgatccgcatgtgctgctgaccacttcggcaggtaacattgagcttgagttaaacagccagaaagccccgatttccgtggataacttcctgaagtacgtcaacagcggcttctacaacaacaccacctttcaccgcgtgatcccgggattcatggtgcagggcggcggctttaacgaacagatgcagcagaagcagcctaacccgccgatcaagaatgaagcagacaacggcctgcgcaacacccgcggcaccatcgcgatggcgcgtaccgccgatcaggatagcgccaccagtcagttcttcatcaacgtggcggataacgccttcctcgaccatggccagcgcgactttggctatgcggtattcggcaaagtggtgaaggggatggatgttgcggataagatctcccaggtccagacccataacgttggtccgtatcagaatgtgccgaccaaaccggtcgttatcctctctgcgaaagtgctgccctaa

SEQ ID NO: 1271 - protein, 189 aa, Klebsiella pneumoniae subsp. pneumoniae MGH 78578
MLKSTLAAMAAVFAISAFSPAMAAKGDPHVLLTTSAGNIELELNSQKAPISVDNFLKYVNSGFYNNTTFHRVIPGFMVQGGGFNEQMQQKQPNPPIKNEADNGLRNTRGTIAMARTADQDSATSQFFINVADNAFLDHGQRDFGYAVFGKVVKGMDVADKISQVQTHNVGPYQNVPTKPVVILSAKVLP

SEQ ID NO: 1272 - DNA, 501 bp, Desulfococcus oleovorans Hxd3
  CDS (1)..(501): transl_table=11
atgaacgtcagactggataccagcatgggagagatcgaactggagctttttgaggataaggcgccgaaaaccacggccaactttgtttcatatgtcaggtcagggcattatgatggaaccatttttcaccgggttatcgacggattcatgattcagggcggcggtatggatgtggacatgaaggaaaagcccaccggcccgcccattgaaaacgaggcggacaatggattgaaaaatgacgcctatgccgtggccatggcccgcacaccggatccgaacagtgccacggcccagttttttatcaatgtgaagaaaaatgattttctcaaccacaccgccaaaaatccccaggggtggggatacgcggtctttggcaaggtggtcaagggccatggtgtggtcaacaagatcaagggcgtggccaccggcagaaagggcatgcatgatgacgtgccccagaccccggtggtgatcaacaaggccgaggtgattgaagcgtag

SEQ ID NO: 1273 - protein, 166 aa, Desulfococcus oleovorans Hxd3
MNVRLDTSMGEIELELFEDKAPKTTANFVSYVRSGHYDGTIFHRVIDGFMIQGGGMDVDMKEKPTGPPIENEADNGLKNDAYAVAMARTPDPNSATAQFFINVKKNDFLNHTAKNPQGWGYAVFGKVVKGHGVVNKIKGVATGRKGMHDDVPQTPVVINKAEVIEA

SEQ ID NO: 1274 - DNA, 573 bp, Salmonella enterica subsp. arizonae serovar 62:z4,z23:--
  CDS (1)..(573): transl_table=11
atgctcaaatcgactctggcggctgtcgcagctgctttcgctctttctgctctttctcccgcagcgttggcagcaaaaggcgatcctcatgtactgttagccacctccgccgggaatatcgagctggagctgaacagccagaaagcgccggtttccgtgaaaaactttgtcgattacgtcaatagtggtttctataacaacactacctttcaccgcgttattcctggctttatgattcagggcggtggttttaacgagcagatgcagcagaagaaaccgaatccgccaattaagaatgaagccgataacggtctgcgtaatactcgcggcacgatcgctatggcgcgtaccgcagataaagacagcgccaccagccagttctttattaacgtcgcggataacgcttttctcgaccatggccagcgtgactttggctatgcggtatttggtaaagtggtaaaaggcatggatgtcgccgataaaatctcccaggtgccgacgcacgatgttgggccttatcagaatgtgccgacaaaacccgtcgttatcctttccgcgaaagtcctgccataa

SEQ ID NO: 1275 - protein, 190 aa, Salmonella enterica subsp. arizonae serovar 62:z4,z23:--
MLKSTLAAVAAAFALSALSPAALAAKGDPHVLLATSAGNIELELNSQKAPVSVKNFVDYVNSGFYNNTTFHRVIPGFMIQGGGFNEQMQQKKPNPPIKNEADNGLRNTRGTIAMARTADKDSATSQFFINVADNAFLDHGQRDFGYAVFGKVVKGMDVADKISQVPTHDVGPYQNVPTKPVVILSAKVLP

SEQ ID NO: 1276 - DNA, 573 bp, Salmonella enterica subsp. enterica serovar Paratyphi B str. SPB7
  CDS (1)..(573): transl_table=11
atgctcaaatcgactctggcggctgtcgcagctgttttcgctctttctgctctttctcccgtagcgttggcagcaaaaggtgatcctcatgtgctgttaaccacctccgccgggaatattgagctggagctgaacagccagaaagcgccgatttctgtgaaaaactttgtcgattacgtcaacagtggtttctataacaacactacgtttcaccgcgttattcctggctttatgattcagggcggtggttttaacgagcagatgcagcagaagaaaccgaatccgccgattaagaatgaagccgacaacggtctgcgtaatactcgcggcacgatcgcgatggcgcgcaccgcagataaagacagcgccaccagccagttctttattaacgtcgcggataacgcttttctcgaccacggccagcgcgactttggctatgcggtatttggtaaagtggtaaaaggtatggatgtcgccgataaaatctcacaggtaccgacgcacgatgtcggaccttatcagaatgtgccgacaaaaccagtcgttatcctttccgcgaaagtcctgccataa

SEQ ID NO: 1277 - protein, 190 aa, Salmonella enterica subsp. enterica serovar Paratyphi B str. SPB7
MLKSTLAAVAAVFALSALSPVALAAKGDPHVLLTTSAGNIELELNSQKAPISVKNFVDYVNSGFYNNTTFHRVIPGFMIQGGGFNEQMQQKKPNPPIKNEADNGLRNTRGTIAMARTADKDSATSQFFINVADNAFLDHGQRDFGYAVFGKVVKGMDVADKISQVPTHDVGPYQNVPTKPVVILSAKVLP

SEQ ID NO: 1278 - DNA, 501 bp, Pseudomonas putida GB-1
  CDS (1)..(501): transl_table=11
atgtccaaagtcaaactgagcaccaaccacggcgacatcgtcctgcagctggacgccgagaaagcgcctctgactaccgaaaacttcgttcagtacgtcaaggaaggccactacgatggcaccgtattccaccgtgtcatcaagggcttcatgatccagggcggcggcttcgaggccggcatgagccagaagaaaacccgcgccagcatccagaacgaagccgacaacggcctgaagaacaagaagtacagcatcgccatggcccgcaccatggagccgcactccgcctcggcgcagttcttcatcaacgcctccgacaacgacttcctcaaccacagcggcaagaacgtgcagggctggggctacgccgtgttcggcgaagtgatcgaaggccgtgaaattgtcgacgctatcgaaaaagtcgccaccggctccaaagcgggtcaccaggacgtaccgaaagacgacgtgatcatcgagaaagccgagatcattgagtga

SEQ ID NO: 1279 - protein, 166 aa, Pseudomonas putida GB-1
MSKVKLSTNHGDIVLQLDAEKAPLTTENFVQYVKEGHYDGTVFHRVIKGFMIQGGGFEAGMSQKKTRASIQNEADNGLKNKKYSIAMARTMEPHSASAQFFINASDNDFLNHSGKNVQGWGYAVFGEVIEGREIVDAIEKVATGSKAGHQDVPKDDVIIEKAEIIE

SEQ ID NO: 1280 - DNA, 558 bp, Pseudomonas putida GB-1
  CDS (1)..(558): transl_table=11
atgctgaaaaaactcctgctcaccgcctgttcggtcgccttcgccaccagcgtcatggcctctgacaagaccccgcacgttctgctggacaccagcttcggccaggtcgaaatcgagctgaacgccgagaaggcaccggtcagcacgaagaatttcctgcaatacgtcgacagcggtttctacaacaacacgattttccaccgggtgatcccgggcttcatggtgcagggcggcggcttcactgaccagatggtgcagaagaacaccaacgacccgatcaagaacgaagccagcaatggcctgctgaacacccgtggcaccctgtcgatggcgcgcacctcggacccgaactccgccaccagccagttcttcatcaacgtggccgacaacgatttcctcaacccagggcgtgaccgtggctacgccgtattcggcaaggtgaccaagggcatggaagtggtcgaccagatcgtcaattcgccgaccaccatcaagaaaggcatgcgcgatgtaccggcggacccggtgtacatcaagtcggccaaacgcatcgactga

SEQ ID NO: 1281 - protein, 185 aa, Pseudomonas putida GB-1
MLKKLLLTACSVAFATSVMASDKTPHVLLDTSFGQVEIELNAEKAPVSTKNFLQYVDSGFYNNTIFHRVIPGFMVQGGGFTDQMVQKNTNDPIKNEASNGLLNTRGTLSMARTSDPNSATSQFFINVADNDFLNPGRDRGYAVFGKVTKGMEVVDQIVNSPTTIKKGMRDVPADPVYIKSAKRID

SEQ ID NO: 1282 - DNA, 510 bp, Haemophilus somnus 2336
  CDS (1)..(510): transl_table=11
atgattacattacacacaaattttggtgatattaaattagcattaaattttgaaaaagcaccaattacagcggaaaactttctaacatattgcaaagagggtttctataataacacaattttccaccgtgttattgatggatttatgatccaaggtggtggtatggaaagtggcttacgtgaaaaaaatactaaagcaccaattaaaaacgaagcaagtaatggacttagcaataaacgtggcacaattgccatggcaagaacatcggatcctcattcggcgacagctcaatttttcatcaatgtagcagacaacacattccttgattatcgagcaaaagaaatgtttggtaaaaccgttgtgcaagaatggggctatgctgtatttggtgaagtcgttgaaggaatggatattgtcgataaaattaaaggtgtcaaaacaggaaacaaaggttttcaccaagatgtgcctgttgaagatgtaattattacttctgttaccattgaataa

SEQ ID NO: 1283 - protein, 169 aa, Haemophilus somnus 2336
MITLHTNFGDIKLALNFEKAPITAENFLTYCKEGFYNNTIFHRVIDGFMIQGGGMESGLREKNTKAPIKNEASNGLSNKRGTIAMARTSDPHSATAQFFINVADNTFLDYRAKEMFGKTVVQEWGYAVFGEVVEGMDIVDKIKGVKTGNKGFHQDVPVEDVIITSVTIE

SEQ ID NO: 1284 - DNA, 495 bp, Desulfovibrio vulgaris subsp. vulgaris str. Hildenborough
  CDS (1)..(495): transl_table=11
atgatccttatggagacctcgtccggcgacatcctcgtcgaacttttcgcagacaaggcccccgccacggtcgagaactttctcgcgtatgtggatgaagggttctacaagaacacggtgttccaccgcgtcatcaaggacttcatgattcagggcggcggctacaccgtgcgcatggacgagaagcccacccgtgcacccgtgcgcaacgaggccgacaacggcctgaagaacctgcgcggcaccctcgccatggcgcgtaccgccgaaccgcacagcgctgctgcccagttcttcatcaacaccgtcgacaacgaagacctcgaccacaccgcccccactgacgaaggctacggctactgcgtcttcggacaggtggtggagggccttgagattgtggacaagattcagaaggtgaagaccaagccgcagggcatccactccgactgtccggtggacatggtggtcatcactggcatgagtcgcttcgactag

SEQ ID NO: 1285 - protein, 164 aa, Desulfovibrio vulgaris subsp. vulgaris str. Hildenborough
MILMETSSGDILVELFADKAPATVENFLAYVDEGFYKNTVFHRVIKDFMIQGGGYTVRMDEKPTRAPVRNEADNGLKNLRGTLAMARTAEPHSAAAQFFINTVDNEDLDHTAPTDEGYGYCVFGQVVEGLEIVDKIQKVKTKPQGIHSDCPVDMVVITGMSRFD

SEQ ID NO: 1286 - DNA, 495 bp, Desulfovibrio vulgaris subsp. vulgaris str. Hildenborough
  CDS (1)..(495): transl_table=11
atgatcaagctcgaaaccagcatgggtgacatcgtcatcgaactcgacgatgaaaaggctcccaagaccgccgctaacttccgccagtacgtggaagaaggtcactatgacggcaccatcttccatcgcgtcatggatggcttcatgattcagggtggtggctacgacgccaacatggtcgagaagaagacccgcgcccctatcgaaaacgaggcgtccaacggtcttggcaacaagaagtacacgctggccatggcgcgcaccaacgaccctcattccgccacggcccagttcttcatcaacgtgaaggacaacgacttcctcaacttccgtgcacctgcggggcagggttggggctacgccgtcttcgggcgtgtggttgaaggcactgacgttgtcgacaagatcaagggcgttcccactggcagctatggcttccatgagaatgttccgcgtactcctgtggtcatcaccaaggctaccgtactgaaatag

SEQ ID NO: 1287 - protein, 164 aa, Desulfovibrio vulgaris subsp. vulgaris str. Hildenborough
MIKLETSMGDIVIELDDEKAPKTAANFRQYVEEGHYDGTIFHRVMDGFMIQGGGYDANMVEKKTRAPIENEASNGLGNKKYTLAMARTNDPHSATAQFFINVKDNDFLNFRAPAGQGWGYAVFGRVVEGTDVVDKIKGVPTGSYGFHENVPRTPVVITKATVLK

SEQ ID NO: 1288 - DNA, 510 bp, Acinetobacter sp. ADP1
  CDS (1)..(510): transl_table=11
atgagttttcctcaagtcgaattaaacaccaataaaggtcgtattgttcttgagcttaaccctgaaaaagcgcctaaaacagttgctaacttcttggaatatgttcgtgatggtttctatgacggcgtgatttttcaccgcgtcattgatggttttatgatccaaggcggcggcatggacgaaaacttcaaagaaaaagccactcgtgatgcaattgaaaacgaagctgacaatggtttgagcaatgatgaaggtacgattgctatggcacgtactcaagcacctcactctgcttctgctcaattctttattaatgtgaaaaacaactctttccttaaccacacaggtaaaactgcgcaaggttggggttatgcggtgtttggtaaagttgttgaaggtctggacgttgtaactgcaattaaaaacgttcgtactggcaaccgtggctatcacgctgatgtacctttagaaaatgttgtcattgaatctgctaaaattatcgctgaataa

SEQ ID NO: 1289 - protein, 169 aa, Acinetobacter sp. ADP1
MSFPQVELNTNKGRIVLELNPEKAPKTVANFLEYVRDGFYDGVIFHRVIDGFMIQGGGMDENFKEKATRDAIENEADNGLSNDEGTIAMARTQAPHSASAQFFINVKNNSFLNHTGKTAQGWGYAVFGKVVEGLDVVTAIKNVRTGNRGYHADVPLENVVIESAKIIAE

SEQ ID NO: 1290 - DNA, 495 bp, Pectobacterium atrosepticum SCRI1043
  CDS (1)..(495): transl_table=11
atgattacgcttcataccaaccacggcgatatcgttattaacacgtttgcagacaaggcgccggttactgtagaaaacttcctgaactactgccgcagcggtttttatgacaacacgatttttcaccgcgtgattaatggttttatgattcagggtggcggcttcgctgctggcatggatcaaaaagaaaccaatgcgacaatcaaaaatgaagccaacaatggcctgaaaaatacccgtggcacgctggcgatggctcgtaccaacgatccacattctgctactgcccagttctttatcaacctcattgataacgatttcctgaacttccgttcagagcgtgccgatggttggggctactgcgtattcgccgaagtgactgaaggtatggacgttgttgataaaatcaaaggcgttgcaaccggccgcagcggcatgcaccaggacgtaccgaaagaagacgtggtgatcacccacgtaacggtcagcgaataa

SEQ ID NO: 1291 - protein, 164 aa, Pectobacterium atrosepticum SCRI1043
MITLHTNHGDIVINTFADKAPVTVENFLNYCRSGFYDNTIFHRVINGFMIQGGGFAAGMDQKETNATIKNEANNGLKNTRGTLAMARTNDPHSATAQFFINLIDNDFLNFRSERADGWGYCVFAEVTEGMDVVDKIKGVATGRSGMHQDVPKEDVVITHVTVSE

SEQ ID NO: 1292 - DNA, 570 bp, Pectobacterium atrosepticum SCRI1043
  CDS (1)..(570): transl_table=11
atgtttaaacgtactctggttgctgcggcggcccttatttcactgacggcattttccccagcctttgcggcttccggcactactcatgtgctgttgacgacgtccgcaggcaatatcgaactgtctttagataatcaaaaggcaccgatttcggtaaaaaatttcgtcgagtacgttaacaacggcttttataacgggacgacatttcaccgtgtgatcccaggctttatggtgcagggtggcggcttttctggcgaaatgaaccagaaagcgccgaatgcgccgatcaagaatgaagccgataacggtttgcgtaaccaacgcggcacgattgccatggcgcgcacgtccgacaaagacagtgcgactagccagttctttatcaacatagcggacaacgctttcctcgatcacggccagcgtgattttggctatgccgtgttcggtaaagtggtgaaaggtatggaagtcgtggataagatctctcaggtaccaacgaaaaacgtcgggccttatcagaacgtaccgactacgccgatcgtgattcagtcagtgaaagtgttgccttga

SEQ ID NO: 1293 - protein, 189 aa, Pectobacterium atrosepticum SCRI1043
MFKRTLVAAAALISLTAFSPAFAASGTTHVLLTTSAGNIELSLDNQKAPISVKNFVEYVNNGFYNGTTFHRVIPGFMVQGGGFSGEMNQKAPNAPIKNEADNGLRNQRGTIAMARTSDKDSATSQFFINIADNAFLDHGQRDFGYAVFGKVVKGMEVVDKISQVPTKNVGPYQNVPTTPIVIQSVKVLP

SEQ ID NO: 1294 - DNA, 552 bp, Mannheimia succiniciproducens MBEL55E
  CDS (1)..(552): transl_table=11
atgcgcaaccaaattcccattcatttttataaggaaaacacaatggttacattacataccaatttcggcgacatcaaaatcgctttaaatcatgaaaaagcaccggaaactgcggcaaattttgaagcttattgtaaagagggtttttataataacacaattttccaccgtgttattgacggttttatgattcagggcggcggtatggaaccggggatgcgtgaaaaaaataccaaagcgccaatcaaaaacgaagcgaacaaccgtttaagcaacaaacgcggcaccattgcgatggcgcgtacttccgatccgcattccgcaacggcgcaattttttattaacgtggcggacaacgctttccttgattatcgcgcgaaagaaatgttcggacgtgaagttgtgcaggaatggggctatgccgtattcggtgaagtggttgaaggcatggatgtagtggataaaatcaaaggcgtaaaaacaggtaatgccggttttcatcaggacgtgccgaaagaagatgtagttattacttcggtgacggtggaataa

SEQ ID NO: 1295 - protein, 183 aa, Mannheimia succiniciproducens MBEL55E
MRNQIPIHFYKENTMVTLHTNFGDIKIALNHEKAPETAANFEAYCKEGFYNNTIFHRVIDGFMIQGGGMEPGMREKNTKAPIKNEANNRLSNKRGTIAMARTSDPHSATAQFFINVADNAFLDYRAKEMFGREVVQEWGYAVFGEVVEGMDVVDKIKGVKTGNAGFHQDVPKEDVVITSVTVE

SEQ ID NO: 1296 - DNA, 558 bp, Mannheimia succiniciproducens MBEL55E
  CDS (1)..(558): transl_table=11
atgaaaaaatttaaatttttgaccgcactttttgccttatttttcgtgtttaacgcgaatgcaaaaaatgtaaccttacataccaattatggcgatataaaaattgcgcttaatgaaaaaaaagcgccggtttccagtaaaaatttcttggattacgcacaaacgggcttttatgataatacgatttttcatcgtgttattgacggatttatgattcagggcggtggctttgagccgggtatgaatcagaaaaaaacgaatgaagccatccgaaatgaagctaataacgggttgaaaaatctgcgaggtactattgccatggcgcgcacatcggcgcctcattccgccactgcacagttttttattaatctgcaggataacgatttcctgaattttaccgaagaaagccagcaaggttggggttatgcggtattcggtaaggtaacggaaggcatgaacgtcgtggataaaatcgccaaagtggcgaccggtcgggtgggaatgcaccgggatgtgcctaaggaagacgtcgttattaaatcggtaactgttgaataa

SEQ ID NO: 1297 - protein, 185 aa, Mannheimia succiniciproducens MBEL55E
MKKFKFLTALFALFFVFNANAKNVTLHTNYGDIKIALNEKKAPVSSKNFLDYAQTGFYDNTIFHRVIDGFMIQGGGFEPGMNQKKTNEAIRNEANNGLKNLRGTIAMARTSAPHSATAQFFINLQDNDFLNFTEESQQGWGYAVFGKVTEGMNVVDKIAKVATGRVGMHRDVPKEDVVIKSVTVE

SEQ ID NO: 1298 - DNA, 498 bp, Methylococcus capsulatus str. Bath
  CDS (1)..(498): transl_table=11
gtgcagctccacaccaacctgggtgatatcgtgattcgcctcgatgccgaaaaggcgcccgtcagcactgcgaacttcctggcttacgtcaaggaagggttttacgacggcaccatcttccaccgtgtgattcccggcttcatggcccaggggggcggtttcacccaggattacaagcagaagagcacccatgcgccgatcaagaacgaagccgacaacgggcttaccaacaggcgtggcaccgtcgccatggcccgcacgccggatccgaactcggccactgcccagttcttcatcaactacgtcgacaacaacttcctcaattacaagagtcccaccccacagggttggggttatgccgtatttggtgaggtcgtgaaagggatggaagtggtcgacgaaatggcgaaggtgccgaccggcgccggtgggccgtttccgaccgacgtcccgcagaaggccatcgtgatcgagaaggcgaccgtcgtttcaccctga

SEQ ID NO: 1299 - protein, 165 aa, Methylococcus capsulatus str. Bath
MQLHTNLGDIVIRLDAEKAPVSTANFLAYVKEGFYDGTIFHRVIPGFMAQGGGFTQDYKQKSTHAPIKNEADNGLTNRRGTVAMARTPDPNSATAQFFINYVDNNFLNYKSPTPQGWGYAVFGEVVKGMEVVDEMAKVPTGAGGPFPTDVPQKAIVIEKATVVSP

SEQ ID NO: 1300 - DNA, 495 bp, Azoarcus sp. EbN1
  CDS (1)..(495): transl_table=11
atggcagtcaagcttcataccaaccacggtacgatcaccctcgaactggattccgagaaagctccggaaacggtcgagaattttctcgcctacgttacagccgggcattacgacaacacgatctttcatcgcgtgatcaagggtttcatgatccagggtggaggtttcgaacccggcatggtgcagaaacccactcgcgagccgatcaagaacgaagccgacaacggcctgaagaacgtcaccggcacggtcgcgatggcccgcacgcaggccccgcactccgctacggcacagtttttcatcaacgtgaccgataacgacttcctcgatttccgttcggcggacacccagggctggggctactgcgtgttcggccgggttaccgaaggcatggatgtcgtgaatgcgatccgctcggtcaagaccggctccagcggttttcatcaggatgtgccggtcgaggacgtcgtgatcgagcgtgccgaaatcgtctga

SEQ ID NO: 1301 - protein, 164 aa, Azoarcus sp. EbN1
MAVKLHTNHGTITLELDSEKAPETVENFLAYVTAGHYDNTIFHRVIKGFMIQGGGFEPGMVQKPTREPIKNEADNGLKNVTGTVAMARTQAPHSATAQFFINVTDNDFLDFRSADTQGWGYCVFGRVTEGMDVVNAIRSVKTGSSGFHQDVPVEDVVIERAEIV

SEQ ID NO: 1302 - DNA, 582 bp, Azoarcus sp. EbN1
  CDS (1)..(582): transl_table=11
atgaagcgcctgctcgcctctctctttctgttcggttggctcgtttccgccggcgcagccaacccggttgtcgagatgcggaccagcgaaggtccggtaatggtcgagcttttcgccgacaaggcacctaaatcggtcgcgaacttcattgagtacgtgaagagcggccacttcaacggcaccattttccatcgcgtcatcgatggattcatggttcagggcggcggcttcgacgcggcgatgcgacagaaacctacccgtgccccgatcgagaacgaagcgaaaaacggcctgcgcaacgaagccggcacgctcgcgatggctcgcacggccgatcctcattcggccagcgcacagttcttcgtcaacctcgtcgacaaccgctttctcgactacccgtcccgcgacggctgggggtatgccgttttcggcaaggtcaccgaggggttcgacgtcgtgcagaaaatcggccggcttccgacccacaccgtgaatggcatgcagaacgttcccgagcagccggtcatgatcgaatcgatccgcatcgtggatgcggtgccggcaaaatccacccagcagtaa

SEQ ID NO: 1303 - protein, 193 aa, Azoarcus sp. EbN1
MKRLLASLFLFGWLVSAGAANPVVEMRTSEGPVMVELFADKAPKSVANFIEYVKSGHFNGTIFHRVIDGFMVQGGGFDAAMRQKPTRAPIENEAKNGLRNEAGTLAMARTADPHSASAQFFVNLVDNRFLDYPSRDGWGYAVFGKVTEGFDVVQKIGRLPTHTVNGMQNVPEQPVMIESIRIVDAVPAKSTQQ

SEQ ID NO: 1304 - DNA, 558 bp, Neisseria gonorrhoeae FA 1090
  CDS (1)..(558): transl_table=11
atgaaacccaaattcaaaaccgttttaaccgcgctgcttttggcggtttccctgccgtctatggcggcaacccgcgtcctgatggaaaccgatatgggcaatatccgtttggttttggacgaatccaaagcctccaaaaccgttgccaatttcgtgcgctatgcccgaaaaggcttttacgacaacacgattttccaccgcgtcatcggcggcttcgtcatccaaggcgacggattgaccgaggacttggtgcaaaaggcaaccgataaggccgttgccaacgaatccggcaacggcttgaaaaacaccgtcggcaccatcgcaatggcgcggacggcagcccccgattccgccgccgcccaattctttatcaatctggcggacaacggttcgctcgactacaaaaacggacaatacggctacaccgttttcggcagggtagaaagcggaatggacaccgtttccaaaatcgcccgcgtcaaaaccgccacgcgcggcttttatcaaaacgtacccgtacagcccgtcaaaatccgtcgcgttgttgtcgggcagtaa

SEQ ID NO: 1305 - protein, 185 aa, Neisseria gonorrhoeae FA 1090
MKPKFKTVLTALLLAVSLPSMAATRVLMETDMGNIRLVLDESKASKTVANFVRYARKGFYDNTIFHRVIGGFVIQGDGLTEDLVQKATDKAVANESGNGLKNTVGTIAMARTAAPDSAAAQFFINLADNGSLDYKNGQYGYTVFGRVESGMDTVSKIARVKTATRGFYQNVPVQPVKIRRVVVGQ

SEQ ID NO: 1306 - DNA, 504 bp, Pseudomonas syringae pv. syringae B728a
  CDS (1)..(504): transl_table=11
atgcctaatgtaaagctgactaccaaccacggcgacatcgtgctgcaactgaacgaagaaaaagcgccgctgaccgttgccaacttcatcgaatacgttaaagccggccactacgaaaacacggttttccaccgtgtgatcggcaatttcatggttcagggcggcggtttcgagcctggcatgaaagaaaagaaagacaagcgcccgagcatccagaacgaagccgacaacggtctgccgaacaagaagtacagcgtcgccatggcccgtaccatggaaccgcattcggcctctgcgcagttcttcatcaacgtcgctgacaacgcctttctgaaccacagcgccaagaccgttcagggctggggttacgctgtgttcggtgaagtgatcgaaggcaccgacgtggtcgacaagatcaaaggcgtggcgacttccagcaaggccggccatcaggacgtcccggtagaagacgtgatcatcgagaaagccgagatcgttgagtga

SEQ ID NO: 1307 - protein, 167 aa, Pseudomonas syringae pv. syringae B728a
MPNVKLTTNHGDIVLQLNEEKAPLTVANFIEYVKAGHYENTVFHRVIGNFMVQGGGFEPGMKEKKDKRPSIQNEADNGLPNKKYSVAMARTMEPHSASAQFFINVADNAFLNHSAKTVQGWGYAVFGEVIEGTDVVDKIKGVATSSKAGHQDVPVEDVIIEKAEIVE

SEQ ID NO: 1308 - DNA, 564 bp, Pseudomonas syringae pv. syringae B728a
  CDS (1)..(564): transl_table=11
atgctgaaaaaaatcgctctcgccgcctgctccgtgctgttcgccgccaacctgatggctgccccggataaagccacgcacgtggtgctcgacaccagtttcggccagattgaaatcgaactcgcagacaccaaggcgccggtcagcacccagaactttctgggttatgtcgacagcggcttctacaccaacaccatctttcaccgggtgattccgggcttcatggtgcaaggcggtggcttcaccccgcagatggttcagaagcagaccaaggatccgatcaagaacgaagcccagaacggtttgcataacgtccgcggcaccattgccatggcgcgtacctcggacgtgaactcggccaccagtcaattcttcatcaacaccaacgacaatgccatgctcgacaacggcgcacgcgacttcggttacgcagtgttcggcaaagtcgtcaagggcatggacgtcgtcgacaacatcgtcaacgcccgcaccactactcagaaaggcatgcaaaacgtgccagtcgacccgatcctgatcaagtccgccaaacgcgtcaactga

SEQ ID NO: 1309 - protein, 187 aa, Pseudomonas syringae pv. syringae B728a
MLKKIALAACSVLFAANLMAAPDKATHVVLDTSFGQIEIELADTKAPVSTQNFLGYVDSGFYTNTIFHRVIPGFMVQGGGFTPQMVQKQTKDPIKNEAQNGLHNVRGTIAMARTSDVNSATSQFFINTNDNAMLDNGARDFGYAVFGKVVKGMDVVDNIVNARTTTQKGMQNVPVDPILIKSAKRVN

SEQ ID NO: 1310 - DNA, 510 bp, Haemophilus influenzae 86-028NP
  CDS (1)..(510): transl_table=11
atggttacattacacacaaattttggcgacattaaaattaaattggattttgataaagctccagttacagcagaaaatttcttaaattactgcaaagaaggtttttataataacacaatttttcatcgtgttattgatggctttatgattcaaggtggcggtatggaaagcggtatgcatgaaaaagcaaccaaagcaccaatccaaaatgaagcgaacaatcgtttaagcaacaaacgtggaaccattgcaatggcacgcacgtcagatccacattcagcgaccgcacaatttttcattaacgtggcagacaatgatttcttaaattatcgttcaaaagaaatgtttggtcgagaagtcgttcaagaatggggctatgcggtatttggtgaagtggttgaagggatggatgttgttgataaaatcaaaaaagtgaaaacaggcaacaaaggctttcatcaagatgttcctactgaagatgtagtgattacattggtttctattgagtaa

SEQ ID NO: 1311 - protein, 169 aa, Haemophilus influenzae 86-028NP
MVTLHTNFGDIKIKLDFDKAPVTAENFLNYCKEGFYNNTIFHRVIDGFMIQGGGMESGMHEKATKAPIQNEANNRLSNKRGTIAMARTSDPHSATAQFFINVADNDFLNYRSKEMFGREVVQEWGYAVFGEVVEGMDVVDKIKKVKTGNKGFHQDVPTEDVVITLVSIE

SEQ ID NO: 1312 - DNA, 564 bp, Pseudomonas fluorescens Pf-5
  CDS (1)..(564): transl_table=11
atgctgaaaaaaatcgccctcgtcgccggctccgtactcttcgcggccaacctgatggccgcgcaaccggccaaggcgccccacgtcctgctggacaccagcttcggcaagatcgaagtggaactggacccggtcaaggcaccgatctccagcaagaacttcctcgactacgtcgacagcggcttctacaccaacaccatcttccaccgggtgatcccggggttcatggtccagggcggtggcttcaccgcgcagatggtgcagaaagacacccgcgacccgatcaagaacgaagcctccaacggcctgcataacgtgcgtggcaccctgtccatggcccgtacctcgaaccccaactcggccaccagccagttcttcatcaacgtcgccgacaacgccttcctcgacccgggccgcgatgccggctacgccgtattcgccaaggtggtgagcggcatggacgtggtggaccagatcgtcaactcccagaccaccaccaagcagggcatgcagaacgtgccgatcgacccggtactgatcaagtcggccaagcgtatcgactga

SEQ ID NO: 1313 - protein, 187 aa, Pseudomonas fluorescens Pf-5
MLKKIALVAGSVLFAANLMAAQPAKAPHVLLDTSFGKIEVELDPVKAPISSKNFLDYVDSGFYTNTIFHRVIPGFMVQGGGFTAQMVQKDTRDPIKNEASNGLHNVRGTLSMARTSNPNSATSQFFINVADNAFLDPGRDAGYAVFAKVVSGMDVVDQIVNSQTTTKQGMQNVPIDPVLIKSAKRID

SEQ ID NO: 1314 - DNA, 504 bp, Pseudomonas fluorescens Pf-5
  CDS (1)..(504): transl_table=11
atgacccaagtcaaactgaccaccaaccacggcgagatcgtgctggaactgaacgccgagaaagccccgttgaccgtggccaacttcgtcgaatacgtgaaagccggtcactatgaaaacaccgtttttcaccgcgtcatcggtaacttcatgatccagggcggcggcttcgaacctggcatgaaagaaaagaaagacaagcgtccaagcatccagaacgaagctgacaacggcctttccaacgacaagtacaccgttgccatggcccgcaccatggagccgcattcggcttccgcgcagttcttcatcaacgttgccgacaacagcttcctcaaccacagcggcaagaccgtgcagggctggggctacgccgtattcggcaaagtgatcgccggcaccgaggtggtcgacaagatcaagggcgtggccaccaccatgaagtccggccaccaggacgtacccgcagacgacgtgatcatcgagaaagccgagatcattgagtga

SEQ ID NO: 1315 - protein, 167 aa, Pseudomonas fluorescens Pf-5
MTQVKLTTNHGEIVLELNAEKAPLTVANFVEYVKAGHYENTVFHRVIGNFMIQGGGFEPGMKEKKDKRPSIQNEADNGLSNDKYTVAMARTMEPHSASAQFFINVADNSFLNHSGKTVQGWGYAVFGKVIAGTEVVDKIKGVATTMKSGHQDVPADDVIIEKAEIIE

SEQ ID NO: 1316 - DNA, 516 bp, Psychrobacter arcticus 273-4
  CDS (1)..(516): transl_table=11
atggtagacatgccaccagtagtagaacttgacaccagtatgggtgcgatcgttatcgaactcaacgaagaaaaagcaccaaaaacagtagaaaattttttaaactatgtaaaatctggtcattatgatggcacgattttccatcgcattattgatggttttatgattcaaggcggcggcatggacgctgatatgaatgaaaaagccaccaacaagccagtagaaaatgaagcagacaatggtctaaaaaacaacgctggtacgattgctatggcacgtacgcaagatccacattcagcgactagccagtttttcgttaacgtaaaagacaacgatttcttaaaccattctggcaaaaacatgcaaggttggggttataccgtatttggtaaagtaacaagcggtatggacgtgatcgaaaaaatgcgcggcgtaccaaccggtcgtttcggcatgcatgctgacgtgccaaaagagccagtggttatcaactcagcaaccatcatcactcagtaa

SEQ ID NO: 1317 - protein, 171 aa, Psychrobacter arcticus 273-4
MVDMPPVVELDTSMGAIVIELNEEKAPKTVENFLNYVKSGHYDGTIFHRIIDGFMIQGGGMDADMNEKATNKPVENEADNGLKNNAGTIAMARTQDPHSATSQFFVNVKDNDFLNHSGKNMQGWGYTVFGKVTSGMDVIEKMRGVPTGRFGMHADVPKEPVVINSATIITQ

SEQ ID NO: 1318 - DNA, 588 bp, Colwellia psychrerythraea 34H
  CDS (1)..(588): transl_table=11
gtgaaaaatatcgttcaatttattataacaagcaccttgctaatcttaagtagttttagctatgcggttgatccaactaatatttatcctaaagtaaaattagaaacatctatgggcgttattgtggttgaactcgatagagtgaaagcacccattacggtgaataattttctggagtatgtggtaaaaggtgaatataacaacactatatttcatcgcataatagacgactttattgtacagggtggtgcttatgacgctaaatttaccgccaaagaattaggcaaaaatattgttaacgaatcaggaaatggcctgaaaaatgaaatgggcactatcgcgatggcgaaagaaaatagaccccatactgccaaccgccaattcttctttaatcttgcggataatacaacgttagacccgggaagaaaatggggttacgcggtttttggcgctattattgagggtgaagaagtactagaagccatcgcaaaagtaccaacagattataacgaaactatggcttggaatgatgtcccgataaaacacgtcactttaattaaagccacattattacctgctgatgagtag

SEQ ID NO: 1319 - protein, 195 aa, Colwellia psychrerythraea 34H
MKNIVQFIITSTLLILSSFSYAVDPTNIYPKVKLETSMGVIVVELDRVKAPITVNNFLEYVVKGEYNNTIFHRIIDDFIVQGGAYDAKFTAKELGKNIVNESGNGLKNEMGTIAMAKENRPHTANRQFFFNLADNTTLDPGRKWGYAVFGAIIEGEEVLEAIAKVPTDYNETMAWNDVPIKHVTLIKATLLPADE

SEQ ID NO: 1320 - DNA, 492 bp, Colwellia psychrerythraea 34H
  CDS (1)..(492): transl_table=11
atgatcatactaaaaaccagccttggcgatattaaaattgaattagactttgaaaatgctcctgttacagcaaaaaatttccaacaatatgttgaagatggacattacaatggcactatttttcatcgcgtgattaaaggttttatggcacaaggcggcggctttgctccaggcttagaagaaaaagaaactcgcgcaagcattaagaatgaagcaaacaatggcttaagtaataaactaggctctttagccatggcacgaactcaagagcctcattcagcttctgcgcagttcttcattaatctaactgataataacttcttagatttcactagtgagtctatgcaaggttggggttattgtgtttttggtaacgtagttgaaggtatggatatagtcgataaaatggctttagttgaaacgggcaacatgtatggtcatggtgacgttccaaaagacgacattttaattgaatctgcgattgttgaataa

SEQ ID NO: 1321 - protein, 163 aa, Colwellia psychrerythraea 34H
MIILKTSLGDIKIELDFENAPVTAKNFQQYVEDGHYNGTIFHRVIKGFMAQGGGFAPGLEEKETRASIKNEANNGLSNKLGSLAMARTQEPHSASAQFFINLTDNNFLDFTSESMQGWGYCVFGNVVEGMDIVDKMALVETGNMYGHGDVPKDDILIESAIVE

SEQ ID NO: 1322 - DNA, 609 bp, Pseudomonas syringae pv. phaseolicola 1448A
  CDS (1)..(609): transl_table=11
ttgccggccacagtcgatatctcttaccgaaggacctgttgccacatgctgaaaaaaatcgccctcaccgcctgcttcgtattgttcgccgccaacctgatggctgccccggataaagccacgcacgtggtactcgataccagcttcggccagattgaaatcgaactcgcagacaccaaggcaccggtcagcacccagaactttctgggttacgtcgacagcggcttctacagcaacactatttttcaccgtgtgattccgggcttcatggtgcaaggtggcggtttcacccagcaactggttcagaagccgaccaaggacccgatcaagaacgaagcacagaacggtttgcacaacgtgcgtggcaccattgccatggcccgtacttcggacgttaactcggccaccagtcaattcttcatcaacaccaacgacaatgccatgctcgacaacggcacacgtgacttcggttacgcggtgttcggtaaagtcgtcaagggtatggacgtggtcgacaacatcgtcaacgcccgcaccactactacgaaaggcatgcaaaacgtgccaatcgacccgatcctgatcaagtccgccaaacgcgtcgactaa

SEQ ID NO: 1323 - protein, 202 aa, Pseudomonas syringae pv. phaseolicola 1448A
MPATVDISYRRTCCHMLKKIALTACFVLFAANLMAAPDKATHVVLDTSFGQIEIELADTKAPVSTQNFLGYVDSGFYSNTIFHRVIPGFMVQGGGFTQQLVQKPTKDPIKNEAQNGLHNVRGTIAMARTSDVNSATSQFFINTNDNAMLDNGTRDFGYAVFGKVVKGMDVVDNIVNARTTTTKGMQNVPIDPILIKSAKRVD

SEQ ID NO: 1324 - DNA, 543 bp, Pseudomonas syringae pv. phaseolicola 1448A
  CDS (1)..(543): transl_table=11
atgtgcccattcatgcatgactatagagcgactttccacatgtccaaagtaaagctgaccaccaaccacggcgacatcgttctgcaactgaacgcagaaaaggcgccactgaccgtagccaacttcatcgaatacgttaacgctggccactacgaaaacacggttttccaccgtgtaatcggtaacttcatggttcagggcggcggtttcgagcctggcatgaaagaaaagaaagacaagcgcccaagcatccagaacgaagccgacaacggtctgccgaacaagaagtacagcgtcgccatggcccgcaccatggagccgcattcggcctctgcgcagttcttcatcaacgtggctgacaacgccttcctgaaccacagcgccaagaccgttcagggctggggttacgctgtattcggtgaagtgatcgaaggcactgatgtcgtcgacaagatcaagggcgttgcgactaccagcaaagccggtcatcaggacgtgcctgcagaagacgtgatcatcgagaaagccgagatcgttgagtga

SEQ ID NO: 1325 - protein, 180 aa, Pseudomonas syringae pv. phaseolicola 1448A
MCPFMHDYRATFHMSKVKLTTNHGDIVLQLNAEKAPLTVANFIEYVNAGHYENTVFHRVIGNFMVQGGGFEPGMKEKKDKRPSIQNEADNGLPNKKYSVAMARTMEPHSASAQFFINVADNAFLNHSAKTVQGWGYAVFGEVIEGTDVVDKIKGVATTSKAGHQDVPAEDVIIEKAEIVE

SEQ ID NO: 1326 - DNA, 492 bp, Dechloromonas aromatica RCB
  CDS (1)..(492): transl_table=11
atgatcaagctcaccaccaaccacggtgtaatcaccctcaacctggatgccgagaaggcgccaaagacggttgcaaacttcatctcctacgttgaagccggccactacaacaacaccatcttccaccgcgtcatcaagaacttcatgatccagggtggcggcatggaaccgggcatgggccagaagccctgccaggcaccgatcgagaatgaggccgccaatggcctcaagaacaagcgcggcacgattgccatggctcgcaccaacgatccgcactcggccactgcccagttcttcatcaataccgtcgataacgacttcctcgacttcaagtcgccgtccggccagggctggggctactgcgtgttcggcgaagtggttgaaggcatggacgtcgtcgacaagattcgcgccgtcaagaccggcaacaagggcttccatcaggacgttccggctgaagatgtgatcatcgagaaggccgagatcgtttga

SEQ ID NO: 1327 - protein, 163 aa, Dechloromonas aromatica RCB
MIKLTTNHGVITLNLDAEKAPKTVANFISYVEAGHYNNTIFHRVIKNFMIQGGGMEPGMGQKPCQAPIENEAANGLKNKRGTIAMARTNDPHSATAQFFINTVDNDFLDFKSPSGQGWGYCVFGEVVEGMDVVDKIRAVKTGNKGFHQDVPAEDVIIEKAEIV

SEQ ID NO: 1328 - DNA, 573 bp, Dechloromonas aromatica RCB
  CDS (1)..(573): transl_table=11
atgttgaaaaaaatttctgttctcgccgctggcctgctggcttcagcaatggtgtgggctgccccaaccgtcgaaatgacgaccaatctgggcaagttcacgcttgaactgttcccggaaaaggccccgaaaacggttgaaatgtttctctataacgccaagcacggtttttatgaggcgaccatcttccaccgcgtgattgatggcttcatgatccagggtggcggtttcagccgggccatggaagagaaaaagaccctgaccccggcgctgcagaacgaagccaccaacggcctgaccaatgaccgtggcacggtggccatggcacgcacgcaggacccgcattcagctcgcgtccagttcttcatcaatctgaaggacaacgagttcctgaaccatcgcaactctaccgacccacgcggctggggctatgccgtctttggcaaagtgacccagggcatggatgtcgtcgacaagattgccaaggtgccgaccggcaacgctggctattacgaaaacgttccgacgacaccggttgtcattcagaacgtcaaaatcatctctgaaaaataa

SEQ ID NO: 1329 - protein, 190 aa, Dechloromonas aromatica RCB
MLKKISVLAAGLLASAMVWAAPTVEMTTNLGKFTLELFPEKAPKTVEMFLYNAKHGFYEATIFHRVIDGFMIQGGGFSRAMEEKKTLTPALQNEATNGLTNDRGTVAMARTQDPHSARVQFFINLKDNEFLNHRNSTDPRGWGYAVFGKVTQGMDVVDKIAKVPTGNAGYYENVPTTPVVIQNVKIISEK

SEQ ID NO: 1330 - DNA, 501 bp, Ralstonia eutropha JMP134
  CDS (1)..(501): transl_table=11
atgtccaaggtccagctccaaaccaaccagggtgtcatcaccatcgaactcgacgccgagaaggctccgaagtcggtcgagaacttcctgtcgtatgtccgcaaaggccactatgacaacaccatcttccaccgcgtgatcaagaacttcatgatccagggcggcggcttcgagccgggcatgaagcaaaagggcaccgatgccccgatcgaaaacgaggccggcaacggcctgaagaacgacaagtacaccgtggccatggcgcgcaccaacgcaccgcattccgccacggcccagttcttcatcaacgtggtcgacaacgacttcctgaacttcagctcgccgacgccgcaaggtttcggctacgccgtgttcggcaaggtcgttgaaggcaccgacgtggtcgaccagatcaagggcgtgcgcaccggcagctcgggcttccatcaggacgtgccgctggaagacgtcgtgatcgaaaaggctgtggtcgtcgagtaa

SEQ ID NO: 1331 - protein, 166 aa, Ralstonia eutropha JMP134
MSKVQLQTNQGVITIELDAEKAPKSVENFLSYVRKGHYDNTIFHRVIKNFMIQGGGFEPGMKQKGTDAPIENEAGNGLKNDKYTVAMARTNAPHSATAQFFINVVDNDFLNFSSPTPQGFGYAVFGKVVEGTDVVDQIKGVRTGSSGFHQDVPLEDVVIEKAVVVE

SEQ ID NO: 1332 - DNA, 588 bp, Ralstonia eutropha JMP134
  CDS (1)..(588): transl_table=11
atgatccgttcccgccgcatcctcctggccggcctgagcgccgccgcgctggcgctgtccgcattgccgtcgatggcacagcagacgcagaaagccgaacgtgtgcagttcgtcaccaaccaaggcaagttcaccgtcgaggtctatcccgacgcggcgcccaagaccgtcgccaacttcatggaatatgtgaagagcggcttctacagcggcaccatcttccaccgcgtgatcaacggcttcatggtccagggcgggggcttcgaccgcgagatgaaggaaaagccgacgcgtgctccgatcccgctcgaagcgcagaacggcctgaagaacaaggctggcaccgtggccatggcccgcaccgcaaacccgaattccgccaccgctcagttcttcgtcaatgtggtggataatccgaatctcgactacccgcagccggacggcaacggctacgcagtattcggcaaggtggtggaaggcatggatacgatcgagaagatcaagaacgtgccgaccacggcctacggccccatgcgcaatgtgccggctgcgcccattgtgatcgagtcggccagcgtcattcaataa

SEQ ID NO: 1333 - protein, 195 aa, Ralstonia eutropha JMP134
MIRSRRILLAGLSAAALALSALPSMAQQTQKAERVQFVTNQGKFTVEVYPDAAPKTVANFMEYVKSGFYSGTIFHRVINGFMVQGGGFDREMKEKPTRAPIPLEAQNGLKNKAGTVAMARTANPNSATAQFFVNVVDNPNLDYPQPDGNGYAVFGKVVEGMDTIEKIKNVPTTAYGPMRNVPAAPIVIESASVIQ

SEQ ID NO: 1334 - DNA, 492 bp, Thiobacillus denitrificans ATCC 25259
  CDS (1)..(492): transl_table=11
atggtcaagctgcatacgaatcacggcaccatcacactcgaactcgacgccgagaaggctcccaagaccgtcgagaattttctccagtacgtccgtgacggcttcttcgacggcacgatcttccaccgtgtgatcgacggattcatgatccagggcggcggcttcgagccgggcctcgcgcagaaaccgacgcgcgacgcgatcgagaacgaagcctccaacggcctcaagaacgacgcctataccgtcgcgatggcgcgcacgccgaaccccaattcggccaccgcgcagttcttcatcaacgtcgccaacaacagcttcctgaacttcacttcgccgaccccgcagggctacggctatgccgtcttcggcaaggtcgtcgaggggaccgacgtcgtcgacaagatcaagaaggtcaagaccggaagccgcggcggccaccaggacgtgccgctggaagacgtcgtcatcacgaaggccgaaatcatctga

SEQ ID NO: 1335 - protein, 163 aa, Thiobacillus denitrificans ATCC 25259
MVKLHTNHGTITLELDAEKAPKTVENFLQYVRDGFFDGTIFHRVIDGFMIQGGGFEPGLAQKPTRDAIENEASNGLKNDAYTVAMARTPNPNSATAQFFINVANNSFLNFTSPTPQGYGYAVFGKVVEGTDVVDKIKKVKTGSRGGHQDVPLEDVVITKAEII

SEQ ID NO: 1336 - DNA, 660 bp, Thiobacillus denitrificans ATCC 25259
  CDS (1)..(660): transl_table=11
atgaaccgcctgtcccgcttcttctcccccctcttcgtcgtcgcgctgatgctcggcatgtcgggctgcggcgccagcgagcccggcaagcagaacgtctcgaccgcaccggcggcagggcagcccgccaacccgcgcgtgctgatcgaaacctcgaaaggcaacatcacggtcgaactcttcgccgccaacgccccgcggtcgaccgccaatttcctcgactacgtcgggcagggtttctacgacggcacgatcttccaccgcgtgattccgggtttcatgatccagggcggcggcatgacggcggacatgaatgaaaaacccaacggcgagccgatcccgaacgaggccgacaacggcctcaagaacctgcgcgggacgcttgcgatggcgcgcaccggcgacccacactcggcgacctcgcagttcttcatcaacgtcgtcgacaacgcgctgctcaaccaccgcggcaagagcgtccagggctgggggtatgcggtcttcggccaggtcgtcgacggcatggacgtcgtcgacgcgatcgtcgcggtgccacgcggcccctggggaccgcacgacgacgtcccggtcgagccggtcgtgatgcggcgcgtgagcctgttgccgccagccgcgtcggcagcagccggcaagccataa

SEQ ID NO: 1337 - protein, 219 aa, Thiobacillus denitrificans ATCC 25259
MNRLSRFFSPLFVVALMLGMSGCGASEPGKQNVSTAPAAGQPANPRVLIETSKGNITVELFAANAPRSTANFLDYVGQGFYDGTIFHRVIPGFMIQGGGMTADMNEKPNGEPIPNEADNGLKNLRGTLAMARTGDPHSATSQFFINVVDNALLNHRGKSVQGWGYAVFGQVVDGMDVVDAIVAVPRGPWGPHDDVPVEPVVMRRVSLLPPAASAAAGKP

SEQ ID NO: 1338 - DNA, 564 bp, Pseudomonas fluorescens PfO-1
  CDS (1)..(564): transl_table=11
atgctgaaaaaactcgccctcgccgccggcaccgtgctgttcgctgccaacctgatggctgccacgccggcaaaagcaccgcacgtgctgctggacaccaccaacggccagatcgaaatcgagctggacccggtcaaggcgccgatcagtaccaagaatttcctcgagtacgtcgacagcggcttttacaacaacacgattttccaccgcgtgatcccgggcttcatggcccagggcggcggcttcacccagcagatgcagcaaaaagacaccaaggcgccgatcaagaacgaagccagcaacggcctgcataacgttcgtggcaccctgtcgatggcccgtacttccaacccggattcggccaccagccagttcttcatcaacgtcgccgacaacgctttcctcgatccgggccgtgacgccggttacgcggtgttcgccaaagtggtcaagggcatggacgtggtcgacatcatcgtcaactcccagaccaccaccaaacagggcatgcaaaacgtgccggtcgaccctgtgatcatcaagtcggccaagcgcatcgactaa

SEQ ID NO: 1339 - protein, 187 aa, Pseudomonas fluorescens PfO-1
MLKKLALAAGTVLFAANLMAATPAKAPHVLLDTTNGQIEIELDPVKAPISTKNFLEYVDSGFYNNTIFHRVIPGFMAQGGGFTQQMQQKDTKAPIKNEASNGLHNVRGTLSMARTSNPDSATSQFFINVADNAFLDPGRDAGYAVFAKVVKGMDVVDIIVNSQTTTKQGMQNVPVDPVIIKSAKRID

SEQ ID NO: 1340 - DNA, 507 bp, Pseudomonas fluorescens PfO-1
  CDS (1)..(507): transl_table=11
atgactcaagttaaattgaccaccaacttcggtgacatcgtcatcgaactgaacgctgaaaaggcgcctctcaccaccgccaacttcatcgaatacgtcaagaaaggtcactacgagaacgtcgtgttccaccgcgtcatcaaaggcttcatgatccagggcggcggtttcgagccaggcatgaaagaaaagaaagacaagagcccgagcatccagaacgaagccgacaacggtctgaagaacgacaagtacaccatcgcgatggcccgtaccatggacccgcattcggcttcggcgcagttcttcatcaacgcctccgacaacagcttcctgaaccacaccgccaagaccgcccagggctggggttatgccgtgttcggtaaagtggttgcgggcaccgacgttgtcgacaagatcgaaggcgtttccaccacgtccaaggcaggccaccaggacgtacccgcagacgacgtgatcatcgagaaagccgagatcatcgaagcgtga

SEQ ID NO: 1341 - protein, 168 aa, Pseudomonas fluorescens PfO-1
MTQVKLTTNFGDIVIELNAEKAPLTTANFIEYVKKGHYENVVFHRVIKGFMIQGGGFEPGMKEKKDKSPSIQNEADNGLKNDKYTIAMARTMDPHSASAQFFINASDNSFLNHTAKTAQGWGYAVFGKVVAGTDVVDKIEGVSTTSKAGHQDVPADDVIIEKAEIIEA

SEQ ID NO: 1342 - DNA, 582 bp, Burkholderia sp. 383
  CDS (1)..(582): transl_table=11
atgaaacgtctgttgctggcgcttggcggcgccgcccttctcgcgaccgcgaccgcacctgcgttcgcgcaatcggctaccgcgcaccccgtcgtgcagctgaagacctcgcagggcgacatccgcgtcgagctctacccggagaaggcgccgaagtccgtcgccaacttcctcgattacgtgaaggccggccagtacaacggcacgatcttccatcgcgtgatcaagggcttcatgatccagggcggcggctacaagaccaacttcgaggagaagccgacccgcgcgccgatcccgctggagagccgcaatggtctgaagaacctgacgggcacgatcgcgatggcacgcacgagcgatccgaactcggccaccgcgcagttcttcatcaacacggtcgacaacagcggcctcgactacccgaacccggacggcaacggctatgcggtgttcggcaaggtcgtgtcgggtctcgacgtcgtgaagaagatcgaaggcgtcgcgacgacctcgcgcggcccgatgcaagacgtgcccgcgcaaccgatcgtgatcgaatcggccagcatcgtctcgaagtaa

SEQ ID NO: 1343 - protein, 193 aa, Burkholderia sp. 383
MKRLLLALGGAALLATATAPAFAQSATAHPVVQLKTSQGDIRVELYPEKAPKSVANFLDYVKAGQYNGTIFHRVIKGFMIQGGGYKTNFEEKPTRAPIPLESRNGLKNLTGTIAMARTSDPNSATAQFFINTVDNSGLDYPNPDGNGYAVFGKVVSGLDVVKKIEGVATTSRGPMQDVPAQPIVIESASIVSK

SEQ ID NO: 1344 - DNA, 492 bp, Burkholderia sp. 383
  CDS (1)..(492): transl_table=11
atggttgaactgcatacgaaccacggcgtgatcaagctcgagctcgacgccgcgaaggcaccgaagacggtcgagaacttcctgaactacgtgaagaagggccactacgacggcaccgtgttccatcgcgtgatcaacggcttcatgatccagggcggcggcttcgagccgggcctgaagcagaagccgaccgatgcgccgatcgacaacgaggcgaacaacggcctgaagaacgacaactacacggtcgcgatggcgcgcacgaacgatccgcactcggcgaccgcccagttcttcatcaacgtgaacgacaacgacttcctgaaccactcgtcgccgacgccgcaaggctggggctacgcggtgttcggcaaggtcgtcgaaggccaggacgtggtcgacaagatcaagggcgtcaagacgggcaacgctggtttccaccaggacgtgccggctgacgacgtcgtgatcgagaaggccgtcgtggtctga

SEQ ID NO: 1345 - protein, 163 aa, Burkholderia sp. 383
MVELHTNHGVIKLELDAAKAPKTVENFLNYVKKGHYDGTVFHRVINGFMIQGGGFEPGLKQKPTDAPIDNEANNGLKNDNYTVAMARTNDPHSATAQFFINVNDNDFLNHSSPTPQGWGYAVFGKVVEGQDVVDKIKGVKTGNAGFHQDVPADDVVIEKAVVV

SEQ ID NO: 1346 - DNA, 600 bp, Geobacter metallireducens GS-15
  CDS (1)..(600): transl_table=11
atgttcaaacggattatcctggccctgacaatctgcggtcttttcagcgtgcttctcatcgccggcaatgccgatgccgcggcaaaggccgaaaaggccaagaaccccgtggttctcatggagacgaccctcggtcccgtgaagatcgagctctaccccgacaaggcgccggtatcggtgaagaacttcctcgactacgtgaacagcggcttctacaacggcaccatcttccaccgggtcatccccggcttcatggcccaggggggcggcttcaccgccgaccggaagcagaaggaaacgaaggcccccatcaagaacgaagccgctaacggcctcaagaacgaccgggggaccatcgccatggcccgcaccgccaaccccgacagcgccacggcccagttcttcatcaacgtggtgaacaacgacggtctcaaccgcccgaacccggacggcttcggctacgccgtcttcggcaaggtggtcgaagggatggacgtggtggacaaaatcgtcgccacccccacccagcgcctcaacatggtctttgccaacctcccggtgacgccggtggtcatcacgtcgatgaaggccgtcaaataa

SEQ ID NO: 1347 - protein, 199 aa, Geobacter metallireducens GS-15
MFKRIILALTICGLFSVLLIAGNADAAAKAEKAKNPVVLMETTLGPVKIELYPDKAPVSVKNFLDYVNSGFYNGTIFHRVIPGFMAQGGGFTADRKQKETKAPIKNEAANGLKNDRGTIAMARTANPDSATAQFFINVVNNDGLNRPNPDGFGYAVFGKVVEGMDVVDKIVATPTQRLNMVFANLPVTPVVITSMKAVK

SEQ ID NO: 1348 - DNA, 516 bp, Geobacter metallireducens GS-15
  CDS (1)..(516): transl_table=11
atgggcgaagaaaccaatccccgcgtcgtcatcgagacatcccaggggaacatcaccgtcgaactgttcaaggacaaggcccccatcaccgtccgcaacttcatctcctacgtgaaggaagggttctatgacggcctcatcttccaccgggtcatcaagaatttcatggtccaggggggcggactcgacgagaatatgcagcagaaaaaatacaaatttgccatcaagaacgaggccgccaacggtctcaagaacaacaggggaaccctggccatggcccggaccgccgtggtggacagcgccacctgccagtttttcatcaacctggtggataacgccttcctcgatcacaaggggaaaacccctgatatgttcggctatgccgtgttcggccaggttgtggaggggatggatgcggtggatgccattgcccaggtgaagaccggcaataaggccggccactccgatgtgccggtggagccggtattcatcaccaaggcttccgtggtggagtag

SEQ ID NO: 1349 - protein, 171 aa, Geobacter metallireducens GS-15
MGEETNPRVVIETSQGNITVELFKDKAPITVRNFISYVKEGFYDGLIFHRVIKNFMVQGGGLDENMQQKKYKFAIKNEAANGLKNNRGTLAMARTAVVDSATCQFFINLVDNAFLDHKGKTPDMFGYAVFGQVVEGMDAVDAIAQVKTGNKAGHSDVPVEPVFITKASVVE

SEQ ID NO: 1350 - DNA, 510 bp, Desulfovibrio desulfuricans subsp. desulfuricans str. G20
  CDS (1)..(510): transl_table=11
atgagcaatcccatggtgctgctggaaacatcttccggcgatatgctgatagaactctatgccgacaaggcccctgaaaccgtgaaaaactttctgcgctatgtggaggaaggtttttacgaaaacaccatcttccaccgtgtcattaaaaatttcatgattcagggcggtggcgttaccatgcgcatggaagacaaaaaaggccacgaacccattgccaacgaggcaggcaacggccttaaaaacgtccgcggcaccattgccatggcgcgcaccgcagccccccacagcgcgacttcacagtttttcatcaaccttgtggacaaccccgaccttgaccatcaggacgattccgatgccggattcggctactgcgttttcggtgccgtggttgaaggcatggacgtggttgatgccataggcaagctgaaaaccaaacccatgggtgagcacgatgatgttcccgtggattcggtggtcatcaccggcgcaggccttttcgacctgtag

SEQ ID NO: 1351 - protein, 169 aa, Desulfovibrio desulfuricans subsp. desulfuricans str. G20
MSNPMVLLETSSGDMLIELYADKAPETVKNFLRYVEEGFYENTIFHRVIKNFMIQGGGVTMRMEDKKGHEPIANEAGNGLKNVRGTIAMARTAAPHSATSQFFINLVDNPDLDHQDDSDAGFGYCVFGAVVEGMDVVDAIGKLKTKPMGEHDDVPVDSVVITGAGLFDL

SEQ ID NO: 1352 - DNA, 495 bp, Desulfovibrio desulfuricans subsp. desulfuricans str. G20
  CDS (1)..(495): transl_table=11
atggttcgttttgagactagcatgggtgactttgttgtggaacttgacgcggaaaaggctcccgccacctgcgaaaactttttgcagtatgtgcgtgacggcttttacgatggtaccatttttcaccgtgtcatggacggcttcatggtgcagggcggcggtttcacggaaaatatgaagcagaaggaaacccgcgagcctgtacagaacgaagccgataacggcttgaaaaatgaagaatataccgttgccatggcccgtacgcaggatccgcattccgccacagcgcagtttttcattaacgtgaaggacaatgcgtttctgaatcatcgcggaaagtccctgtccggctggggctatgcagttttcggcaaggtggttaaaggcaaaagcaccattgacgccatcaagggagtacctacgggcagctacggaccttttgaaaatgttcctctggtacccgttgtaatcaacaaagctgtggtcatggactga

SEQ ID NO: 1353 - protein, 164 aa, Desulfovibrio desulfuricans subsp. desulfuricans str. G20
MVRFETSMGDFVVELDAEKAPATCENFLQYVRDGFYDGTIFHRVMDGFMVQGGGFTENMKQKETREPVQNEADNGLKNEEYTVAMARTQDPHSATAQFFINVKDNAFLNHRGKSLSGWGYAVFGKVVKGKSTIDAIKGVPTGSYGPFENVPLVPVVINKAVVMD

SEQ ID NO: 1354 - DNA, 507 bp, Rhodospirillum rubrum ATCC 11170
  CDS (1)..(507): transl_table=11
atgaccgacaccaaggccgccgaccctgaaaacaccctctacatggacctcaaagatggtcgcgtggtgatcgagctgcggcccgatcttgcgcccaagcatgtggagcgcatcaagctgctggtccgcaagggcttttacgatggcacgccgttccatcgggtgatcgatggcttcatggtccagggcggcgacccgaccgggaccggccgtggcggctccgatctgcccgatctgcccgccgagttcagcccgccgtcgaaggcccgccatctgcgcggcgtgacctcgatggcccgcaccgccgatcccgacagcgccaacagccagttcttcatcatgctggccccgtcgtcgcatctggatggccagtacaccatctggggccaggtgaccaagggcatggacttcgtggacatgatcaagaagggcgattcgcgggccaatggctcggtgagcgatcccgaccgcatcgtcaaggttcaggtcgccgccgacgtgaagtag

SEQ ID NO: 1355 - protein, 168 aa, Rhodospirillum rubrum ATCC 11170
MTDTKAADPENTLYMDLKDGRVVIELRPDLAPKHVERIKLLVRKGFYDGTPFHRVIDGFMVQGGDPTGTGRGGSDLPDLPAEFSPPSKARHLRGVTSMARTADPDSANSQFFIMLAPSSHLDGQYTIWGQVTKGMDFVDMIKKGDSRANGSVSDPDRIVKVQVAADVK

SEQ ID NO: 1356 - DNA, 492 bp, Burkholderia thailandensis E264
  CDS (1)..(492): transl_table=11
atggtcgaactgcatacgaaccacggcgtcatcaagctcgaactcgacgaggcgaaggcgccgaagacggtcgagaacttcctgaactacgtgaagaagggccactacgacggcacgatcttccaccgcgtgatcaacggcttcatgatccagggcggcggcttcgagccgggcctgaagcaaaagccgaccgacgcgccgatcgcgaacgaggcgaacaacggcctgaagaacgatacgtacaccatcgcgatggcgcgcacgaacgatccgcactcggcgaccgcgcagttcttcatcaacgtgaacgacaacgacttcctgaaccactcgtcgccgacgccgcagggctggggctacgcggtgttcggcaaggtcgtcgaaggccaggacatcgtcgacaagatcaaagccgtcaagacgggcagcaagggcttccaccaggacgtgccgaacgacgacgtcgtgatcgagaaggccgtcgtggtctga

SEQ ID NO: 1357 - protein, 163 aa, Burkholderia thailandensis E264
MVELHTNHGVIKLELDEAKAPKTVENFLNYVKKGHYDGTIFHRVINGFMIQGGGFEPGLKQKPTDAPIANEANNGLKNDTYTIAMARTNDPHSATAQFFINVNDNDFLNHSSPTPQGWGYAVFGKVVEGQDIVDKIKAVKTGSKGFHQDVPNDDVVIEKAVVV

SEQ ID NO: 1358 - DNA, 627 bp, Burkholderia thailandensis E264
  CDS (1)..(627): transl_table=11
atgacgcgcggcggccgccgcgcctttccttcacccacccagaggaccgttatgaaacgtctgttgctggcgctcggcagcgccgccctcctcgcgaccgcccccgcgttcgcgcaatcggccgcgacgcaccccgtcgtgcagctgaagaccacgcagggcgacatccgcgtcgagctgtacccggagaaggcgccgaagaccgtcgccaacttcctcgattacgtgaaggcgggccagtacaacggcacgatcttccatcgcgtgatcaagggcttcatgatccagggcggcggctacaagacgaatttcgacgagaagccgactcgcgcaccgatcccgctcgagagcaagaacggcctgaagaacgcgacgggcaccatcgcgatggcgcgcacgagcgatccgaactcggcgaccgcgcagttcttcatcaacaccgtcgacaacgcgggcctcgactatccgaatccggacggcaacggctacgcggtgttcggcaaggtcgtgtcgggcatggacgtcgtgaagaagatcgaggccacgccgacgacggtgcgcggcccgatgcgcgacgtgccggaaaagccgatcgtgatcgaatcggcgacgatcgtctcgaaataa

SEQ ID NO: 1359 - protein, 208 aa, Burkholderia thailandensis E264
MTRGGRRAFPSPTQRTVMKRLLLALGSAALLATAPAFAQSAATHPVVQLKTTQGDIRVELYPEKAPKTVANFLDYVKAGQYNGTIFHRVIKGFMIQGGGYKTNFDEKPTRAPIPLESKNGLKNATGTIAMARTSDPNSATAQFFINTVDNAGLDYPNPDGNGYAVFGKVVSGMDVVKKIEATPTTVRGPMRDVPEKPIVIESATIVSK

SEQ ID NO: 1360 - DNA, 516 bp, Syntrophus aciditrophicus SB
  CDS (1)..(516): transl_table=11
atggaaaatcaggacaaaagtcagaatcccaccgtcatcatcaaaaccagtatgggcactttcgaggcgattctttacaaagacaaagcccccattaccgtggataattttctgcaatatgtgaaggatcatttttttgatggaaccctgttccaccggattatcccgggattcatggcccagggaggaggattcgataaagactgccggcagaaacccacccgcgccccgatcaagaatgaagcggaaaacggtttgaaaaacgagcgcggcacactggccatggcccggaccatggtggtcgactccgccacctcccagtttttcatcaatttcacggacaacgattttctgaactacgccggaaagaacaatttcggctatgcggttttcggcaaagtcacagaaggaatggatatcgtggatgtcatggctaaagtcagaaccggttcccggggtccttttcaggactggcccattgacgacgtggtgatcgaatccgtcacggtgaaataa

SEQ ID NO: 1361 - protein, 171 aa, Syntrophus aciditrophicus SB
MENQDKSQNPTVIIKTSMGTFEAILYKDKAPITVDNFLQYVKDHFFDGTLFHRIIPGFMAQGGGFDKDCRQKPTRAPIKNEAENGLKNERGTLAMARTMVVDSATSQFFINFTDNDFLNYAGKNNFGYAVFGKVTEGMDIVDVMAKVRTGSRGPFQDWPIDDVVIESVTVK

SEQ ID NO: 1362 - DNA, 570 bp, Saccharophagus degradans 2-40
  CDS (1)..(570): transl_table=11
atgcctttaattactcgatttatcgcaattttgcttttatgtagtgcaacgctttgctacgcagccgacaccaaacagggtaacccgactgtcgagttgcgcaccgatctcggtgtgattgtattagagctttttcctaaaaaagcccctatcaccgttgaaaactttttagggtatgtcgattcaggtttttacgatggcaccatatttcacagagtaatccctggttttgttattcaagggggcggcttaacctatgactttcaaaacaaacccacactcagcccgattaaaaacgaatcggataatggcttaaaaaacaccataggtacattatccatggctcgtacatccaacccggatagcgccacctcgcaattttttatcaatattaacgacaacgctcacttagacccacaaggcggacgaccaggttacgcggtgttcgctaaagttatatcgggtttcgaggtattagacaaaattgtgaaagaaccaagaggcctttacaagaaccacaaagatgcccccaattttgcagtacgcattttaaaagcaaaaaggctttaa

SEQ ID NO: 1363 - protein, 189 aa, Saccharophagus degradans 2-40
MPLITRFIAILLLCSATLCYAADTKQGNPTVELRTDLGVIVLELFPKKAPITVENFLGYVDSGFYDGTIFHRVIPGFVIQGGGLTYDFQNKPTLSPIKNESDNGLKNTIGTLSMARTSNPDSATSQFFININDNAHLDPQGGRPGYAVFAKVISGFEVLDKIVKEPRGLYKNHKDAPNFAVRILKAKRL

SEQ ID NO: 1364 - DNA, 492 bp, Saccharophagus degradans 2-40
  CDS (1)..(492): transl_table=11
atgattactttacatacaaatttcggtgacatcaccctagagcttgatttcgacaaggcgccaaagaccgcagctaactttaaagcctatgctgaagaaggcttttacgaaggcacaatatttcaccgtgttattaaagattttatgattcaaggtggtggtttcaccgaagatatgagtcaaaaatcaggtaaagcgcctatacaaaacgaagcagacaacggtttaaaaaatgagcttggcactatcgctatggcccgcaccatggacccacacagtgcttcatctcagttttttatcaacaccaaaaacaacgatttcttaaacttcaaaagtaaagatatgcaaggctggggctactgcgtattcggtaaggtaaccgacggtttagaagtaattaagaaaattgaagcggtttctactggcaagcatggcggccacgctgatgtgcctaacgatgcagttatcattgaaaaagtaaccgtagcctaa

SEQ ID NO: 1365 - protein, 163 aa, Saccharophagus degradans 2-40
MITLHTNFGDITLELDFDKAPKTAANFKAYAEEGFYEGTIFHRVIKDFMIQGGGFTEDMSQKSGKAPIQNEADNGLKNELGTIAMARTMDPHSASSQFFINTKNNDFLNFKSKDMQGWGYCVFGKVTDGLEVIKKIEAVSTGKHGGHADVPNDAVIIEKVTVA

SEQ ID NO: 1366 - DNA, 492 bp, Methylobacillus flagellatus KT
  CDS (1)..(492): transl_table=11
ttgattaagctacataccaatttcggtgaaatcactctggaactcgatgaagaaaaagcgccggtgacaacggccaactttatccaatatgtcaaagacggcttttatgacaacaccatctttcatcgtgtcattgacggtttcatgatccagggtggcggctttactcccgacatgcaacagaaaccgaccaatgcggcgatcaagaacgaggccaacaacggcctccagaacaagacgtataccattgccatggcgcgcactcctgcgcctgattctgcgagcagccagttcttcatcaatgtggccgacaacgacttcctcaacttcaccgcaccgacctcccaaggctggggctacgccgtattcggcaaggtgacggcaggtactgaagtcgttgaccagatcaagaaggtcaagaccggtagcaagaacggccaccaggatgtgcctctggagccagtcatcatcgaacgcgccgaaatcgtttaa

SEQ ID NO: 1367 - protein, 163 aa, Methylobacillus flagellatus KT
MIKLHTNFGEITLELDEEKAPVTTANFIQYVKDGFYDNTIFHRVIDGFMIQGGGFTPDMQQKPTNAAIKNEANNGLQNKTYTIAMARTPAPDSASSQFFINVADNDFLNFTAPTSQGWGYAVFGKVTAGTEVVDQIKKVKTGSKNGHQDVPLEPVIIERAEIV

SEQ ID NO: 1368 - DNA, 723 bp, Methylobacillus flagellatus KT
  CDS (1)..(723): transl_table=11
atgatgctgacttttaagacattggaggaaattctgatgcgcacatttattacacgtgctttgctcaacccgcttctgtatctttccatgctgggtaccagcctggtagcgaccgccagcgacaatgcgctgccacaactggaaatacagactaaccacggcagcttcgtcattgagctttacccggacaaggcgccaaaaaccgtcgccaactttctccagtacgtcaccagcgacttctataccggcacaacctttcaccgcacagtggatcgcttcatgatccagggtggcggcctcactgccgaaatgagggaaaaatccaccttttcacctattgaaaatgaatccaacaacgggctaaagaatgaatacggctccgtcgccatggctcgggcattcgcccccaattccgcgacctcgcagttcttcatcaacctgtcagacaacaagtttctcaacttccacaagccggaacctgcctatatggggtattgcgtgtttggcaaggtcatcaagggcattgatgtagtcgagcggataggtaaaagccccaccaaagtagtgggcgcccacctcaacgtgccagtggagcctgtcgttatcgagaaggttgcattactggatcaacccatcagcatcgccgaacgcctggattacaagaaagtcaaaaccatcgcgcagacagaagcgccaaccaaaagtaaaggaaagcagccttga

SEQ ID NO: 1369 - protein, 240 aa, Methylobacillus flagellatus KT
MMLTFKTLEEILMRTFITRALLNPLLYLSMLGTSLVATASDNALPQLEIQTNHGSFVIELYPDKAPKTVANFLQYVTSDFYTGTTFHRTVDRFMIQGGGLTAEMREKSTFSPIENESNNGLKNEYGSVAMARAFAPNSATSQFFINLSDNKFLNFHKPEPAYMGYCVFGKVIKGIDVVERIGKSPTKVVGAHLNVPVEPVVIEKVALLDQPISIAERLDYKKVKTIAQTEAPTKSKGKQP

SEQ ID NO: 1370 - DNA, 552 bp, Methylobacillus flagellatus KT
  CDS (1)..(552): transl_table=11
atgctgtccaaacttctgcatctgcctatcattttgagcctgattgccatgccggccatggcacagccgctggctgaaatccagaccagtgaggggttgatcgtggtcgacctcaatagtgaaaaagcccccaacactgtggccaacttcatccgctatgccaaggaaggccattacgcaggcacgatcttccaccgcgtgatcgcaggcttcatgattcagggcggcgggctggacgtcaatttcgaacccaagcccacgcatcctccaatcagaaacgaggctgacaacggcttgaccaacgcgacgggcaccatcgccatggcacgcaccagcgaccctcattccgccaccgaccagttcttcatcaacctcgccaacaatacctcgctgaacttcagcgagcgctccgaaactggctggggctataccgttttcggcagggtgatcaagggcatggatgtggtgcagcgcatcgccatcatgcccaccgacggtggcgatgcgccattccagaacatcgtgatcgagtccgtcacgatcaaggaataa

SEQ ID NO: 1371 - protein, 183 aa, Methylobacillus flagellatus KT
MLSKLLHLPIILSLIAMPAMAQPLAEIQTSEGLIVVDLNSEKAPNTVANFIRYAKEGHYAGTIFHRVIAGFMIQGGGLDVNFEPKPTHPPIRNEADNGLTNATGTIAMARTSDPHSATDQFFINLANNTSLNFSERSETGWGYTVFGRVIKGMDVVQRIAIMPTDGGDAPFQNIVIESVTIKE

SEQ ID NO: 1372 - DNA, 582 bp, Burkholderia xenovorans LB400
  CDS (1)..(582): transl_table=11
atgaaatggttgatgttggcgctcggcagcgccgccctgatcgcaaacgcacccgcctttgcccagtccggttcgcaagccgcgcatccgtccgtcctcttcaagacatcggaaggcgacatccgcgtcgagctgtatcctgagaaagcgcccaagacggtcgccaacttcctcgactacgtgaagtccggccagtacaacggcacgatttttcatcgcgtgattcgcggcttcatgatccagggcggcggctatacgcagagcttcgctgagaagcccacgcgcgcgccaatcgtgctcgaaagccgtaacggtctgaagaacacgaccggcacgctcgcgatggcgcgcaccagcgatccgaattcggccaccgcgcagttcttcatcaacacagtggacaacgccggcctcgactatccgaatccggacggcaacggctatgcggtgttcggcaaggtcacgggcggcatggacgtcgtgaagaagatcgaaggcacgcccaccacctcgcgcggcccgatgagcgacgtgccgcaaaaggcggtcgtgatcgagtcggcaacggtcgtcggcaagtaa

SEQ ID NO: 1373 - protein, 193 aa, Burkholderia xenovorans LB400
MKWLMLALGSAALIANAPAFAQSGSQAAHPSVLFKTSEGDIRVELYPEKAPKTVANFLDYVKSGQYNGTIFHRVIRGFMIQGGGYTQSFAEKPTRAPIVLESRNGLKNTTGTLAMARTSDPNSATAQFFINTVDNAGLDYPNPDGNGYAVFGKVTGGMDVVKKIEGTPTTSRGPMSDVPQKAVVIESATVVGK

SEQ ID NO: 1374 - DNA, 495 bp, Burkholderia xenovorans LB400
  CDS (1)..(495): transl_table=11
atggttgaactgcacacaaaccacggcgtcatcaaactcgaactggacgctgaaaaggcgccgaaatcggttgagaacttcctcaactatgtgaaggccggccactacgacaacacggtgtttcaccgcgtgatcgacggcttcatgatccagggcggcggcttcgaacccggcatgaagcagaagccgacggccgagccgatcaccaacgaagcgaacaacggtctgaagaacgtgaacggctcgatcgcgatggcgcgcacgaacgacccgcattcggccacggcgcagttcttcatcaacgtgaacgacaacgactttctgaaccattcgtcgccgacgccgcagggctggggctacgccgtgttcggcaaggtggtcgaaggcatggacatcgtcgagaagatcaagaaggtcaagacgggctcgaagggcttccatcaggacgtgccggctgacgacgtggtgatcgaaaaggctgtgatcgtcgactga

SEQ ID NO: 1375 - protein, 164 aa, Burkholderia xenovorans LB400
MVELHTNHGVIKLELDAEKAPKSVENFLNYVKAGHYDNTVFHRVIDGFMIQGGGFEPGMKQKPTAEPITNEANNGLKNVNGSIAMARTNDPHSATAQFFINVNDNDFLNHSSPTPQGWGYAVFGKVVEGMDIVEKIKKVKTGSKGFHQDVPADDVVIEKAVIVD

SEQ ID NO: 1376 - DNA, 501 bp, Ralstonia metallidurans CH34
  CDS (1)..(501): transl_table=11
atgagcaaggtacaactccaaaccacgcaaggcgccatcgtcatcgaactggacgccgagaaggccccgaagtcggtcgagaacttcctgtcgtacgtgcgcaagggccactatgacaacacgatcttccaccgcgtcatcaagaacttcatgatccagggcggcggcttcgagccgggcatgaagcagaaggacaccgatgcgccgatcgagaacgaagccggcaacggcctgaagaacgaccgctacacggttgccatggcccgcaccaacgcgccgcactcggccacggcccagttcttcatcaacgtggtggacaacgacttcctgaacttcagctcgcccacgccgcaaggcttcggctatgcggtgttcggcaaggtcgtggaaggcaccgacgtgatcgacgccatcaaaggcgtgcgcaccggcagctcgggcttccatcaggacgtgccgctcgaggacgtcgtgatcgagaaagccacgattgtcgagtaa

SEQ ID NO: 1377 - protein, 166 aa, Ralstonia metallidurans CH34
MSKVQLQTTQGAIVIELDAEKAPKSVENFLSYVRKGHYDNTIFHRVIKNFMIQGGGFEPGMKQKDTDAPIENEAGNGLKNDRYTVAMARTNAPHSATAQFFINVVDNDFLNFSSPTPQGFGYAVFGKVVEGTDVIDAIKGVRTGSSGFHQDVPLEDVVIEKATIVE

SEQ ID NO: 1378 - DNA, 609 bp, Ralstonia metallidurans CH34
  CDS (1)..(609): transl_table=11
atgatcctttcccgccgcatcgtcctgaccggcctgatggccgccgccactgccctgtctccgctggccgcaatggcccagggcgccagccccgccaccgccgcgccgaagaccgagcgcgtgcagttcgtgacgagcgccggcaagttcactatcgagctgtaccccgatgccgccccgaagaccgtggccaacttcatgggctacgtaaaaagcggcttctattccggcacgatcttccatcgcgtgatcaacggcttcatggttcagggcggtggcttcgaccgcgacatgaaggaaaagccgacgctggcgccgatcgcgctggaatcgcagaacggcctgaagaacaaggccgggaccgtcgccatggcacgcacgtcgaacccgaactcggcaaccgcccagttcttcgtcaatgtggtggataatccgaacctcgactacccacagccggacggcaatggatatgccgtctttggcaaggtggtagagggaatggacacgatcgacaagatcaagaccacgccgactacggcgtatggcgccatgcgcaacgtgcctgccgcgccgatcgtgatcgaatcggccaccgtggtcaccaagtga

SEQ ID NO: 1379 - protein, 202 aa, Ralstonia metallidurans CH34
MILSRRIVLTGLMAAATALSPLAAMAQGASPATAAPKTERVQFVTSAGKFTIELYPDAAPKTVANFMGYVKSGFYSGTIFHRVINGFMVQGGGFDRDMKEKPTLAPIALESQNGLKNKAGTVAMARTSNPNSATAQFFVNVVDNPNLDYPQPDGNGYAVFGKVVEGMDTIDKIKTTPTTAYGAMRNVPAAPIVIESATVVTK

SEQ ID NO: 1380 - DNA, 510 bp, Haemophilus somnus 129PT
  CDS (1)..(510): transl_table=11
atgattacattacacacaaattttggtgatattaaattagcattaaattttgaaaaagcaccaattacagcggaaaactttctaacatattgcaaagagggtttctataataacacaattttccaccgtgttattgatggatttatgatccaaggtggtggtatggaaagtggcttgcgtgaaaaaaatactaaagcaccaattaaaaacgaagcaagtaatggacttagcaataaacgtggcacaattgccatggcaagaacatcggatcctcattcggcgacagctcaatttttcatcaatgtagcagacaacacattccttgattatcgagcaaaagaaatgtttggtaaaaccgttgtgcaagaatggggctatgctgtatttggtgaagtcgttgaaggaatggatattgtcgataaaattaaaggtgtcaaaacaggaaacaaaagtttccatcaagatgtgcctgttgaagatgtaattattacttctgttaccattgaataa

SEQ ID NO: 1381 - protein, 169 aa, Haemophilus somnus 129PT
MITLHTNFGDIKLALNFEKAPITAENFLTYCKEGFYNNTIFHRVIDGFMIQGGGMESGLREKNTKAPIKNEASNGLSNKRGTIAMARTSDPHSATAQFFINVADNTFLDYRAKEMFGKTVVQEWGYAVFGEVVEGMDIVDKIKGVKTGNKSFHQDVPVEDVIITSVTIE

SEQ ID NO: 1382 - DNA, 501 bp, Shewanella sp. MR-4
  CDS (1)..(501): transl_table=11
atgacgattatttttacaaccaacttcggtgatatcagtatcgaactcgatatggagcgcgcgcccgttaccgccaaaaactttatccgctactgccaagaaggtttttatgagcacacgattttccatcgagtgatcaaaggctttatgatccaaggcggtggttttaccgccaaaatgaaggaaaagcccacccacgagccgattgtcaacgaagccaacaaaggcctatcgaatgtgttgggcactatcgctatggcccgtaccgatgcaccgcactcggcgaccgcgcagttttttattaatacggccaacaatgagttcctcgaccacacagcaaccacgaacaacggttggggttatgcggtatttggtaaagtcaccgcgggactcgaggtcgtactgcaaattgaaggcgtaaaaaccacccgtgttgcaggccatgaggacgtgccacgtgagccgattattatcgaaaaagtaactattgttgaaaaatag

SEQ ID NO: 1383 - protein, 166 aa, Shewanella sp. MR-4
MTIIFTTNFGDISIELDMERAPVTAKNFIRYCQEGFYEHTIFHRVIKGFMIQGGGFTAKMKEKPTHEPIVNEANKGLSNVLGTIAMARTDAPHSATAQFFINTANNEFLDHTATTNNGWGYAVFGKVTAGLEVVLQIEGVKTTRVAGHEDVPREPIIIEKVTIVEK

SEQ ID NO: 1384 - DNA, 492 bp, Shewanella sp. MR-4
  CDS (1)..(492): transl_table=11
atgatcacattacacactaattttggcgacattaaactgcaactgaacgccgaaaaagcaccgctgaccgtggcaaactttatgaaatatgttgacgaaggtttcttcgacggcaccattttccaccgtgtaattgacggctttatgatccaaggcggtggctttaccgctgaaatgagccaaaaacgttgccatgagccagtgaaaaacgaagccaacaacggtttatcaaaccgtactggtactatcgcgatggcacgtacttctgatccacactcagcgacggctcagttcttcatcaacgtaaacgataacaccttcctcgatttcaaatctgaaagcatgcaaggttggggttactgcgtatttggtgaagtcgttgaaggcatggacatcgttgaaaaaatcaaagctgtcagcactggtaaccgtggcatgcaccaagatgtgccattagaagcggttgtgattgaaaaagtaagtgcggcctaa

SEQ ID NO: 1385 - protein, 163 aa, Shewanella sp. MR-4
MITLHTNFGDIKLQLNAEKAPLTVANFMKYVDEGFFDGTIFHRVIDGFMIQGGGFTAEMSQKRCHEPVKNEANNGLSNRTGTIAMARTSDPHSATAQFFINVNDNTFLDFKSESMQGWGYCVFGEVVEGMDIVEKIKAVSTGNRGMHQDVPLEAVVIEKVSAA

SEQ ID NO: 1386 - DNA, 636 bp, Shewanella sp. MR-4
  CDS (1)..(636): transl_table=11
atgaaaagcatcacgggacttttactcgccagcagtttgagtttagcccttggcgcctgcggcggcagtggcgacgatgaattaacaccaacgatcccgactcccgatccaaccccaccgagcttaagcgccgatgtctgttatttaatgagcaccacaaagggggatttgaccttagccatcgacctcacccatatgccgatcacgggcaagaactttaaacaatatgtcgataagtcattctataacggcactttattccacagaaccatcaataactttgtgatccaaggcggcggtttcaccacgggattacaaagcaagccgaccagcgcgccgattaaaaacgaggccgctgtcggcatcagtaacaaacggggcacgatcgctatggcgcgtaccacagtgccagactcagcgacatcacagttctttatcaatgtgttagataatccacagctcgatgcttcggcgagcagctatggttatgccgtgtttggtaaagtcgttgaaggaatggatgtggtcgatcagataagcattgtgcccaccaaaaccagcgacggctttaacgacacccctgtgaatgaaattttgatcaatagcgtgatggaaacgaactgccccgctgcctag

SEQ ID NO: 1387 - protein, 211 aa, Shewanella sp. MR-4
MKSITGLLLASSLSLALGACGGSGDDELTPTIPTPDPTPPSLSADVCYLMSTTKGDLTLAIDLTHMPITGKNFKQYVDKSFYNGTLFHRTINNFVIQGGGFTTGLQSKPTSAPIKNEAAVGISNKRGTIAMARTTVPDSATSQFFINVLDNPQLDASASSYGYAVFGKVVEGMDVVDQISIVPTKTSDGFNDTPVNEILINSVMETNCPAA

SEQ ID NO: 1388 - DNA, 588 bp, Shewanella sp. MR-4
  CDS (1)..(588): transl_table=11
atgtttcgttggatatctgcactcttagttctgtgtgccagctatagcagctgggcggcaatcgacattcaacccgataccttgtatccacaagtcgagtttgataccagcctaggtaagattgtggtcgaactcgatagaacccgcgcaccgattaccgtcgataactttctgacctatgtggtcaaaggcgagtacaacaacacgattttccaccgtattatcagtgactttgtcgttcaaggtggcggactaaacccacaattagaagagttacccgcaggcaagccgatatttaacgagtctggcaacggcttatccaacagcatgggcacgattgcgatggctcgcgacaacgatccccactcggctacccgtcagttttacttcaacgtggcggataacactaagctggatccatccaaacgtcgttggggttatgcggtatttggtgaagtgattgagggcaaacaagtgcttgaagcgatggccgtggtcgagaccactaccaatgcgaaactcaattggcccgatgtgccagtgacacctatcatattgaaaacagctaaattactgccgaaaaaataa

SEQ ID NO: 1389 - protein, 195 aa, Shewanella sp. MR-4
MFRWISALLVLCASYSSWAAIDIQPDTLYPQVEFDTSLGKIVVELDRTRAPITVDNFLTYVVKGEYNNTIFHRIISDFVVQGGGLNPQLEELPAGKPIFNESGNGLSNSMGTIAMARDNDPHSATRQFYFNVADNTKLDPSKRRWGYAVFGEVIEGKQVLEAMAVVETTTNAKLNWPDVPVTPIILKTAKLLPKK

SEQ ID NO: 1390 - DNA, 588 bp, Shewanella sp. MR-7
  CDS (1)..(588): transl_table=11
atgtttcgttggatatctgcactcttagttctctgtgccagctatagcagttgggcggcaatcgacattcaacccgataccttgtatccccaagtcgagtttgataccagcctaggtaagattgtggtcgaactcgatagaacccgcgcaccgattaccgttgataactttctgacctatgtggtcaaaggcgagtacaacaacacgattttccaccgtattatcagtgactttgtcgttcaaggtggcggactaaacccacaattagaagagttacccgcaggcaagccgatagttaacgagtctggcaacggcttatccaacagcatgggcacgattgcgatggcgcgcgacaacgatccccactcggctacccgtcagttttacttcaacgtggcggataacactaagctggatccatccaaacgtcgttggggttatgcggtatttggtgaagtgattgagggcaaacaagtgctggaagcgatggccgtggtcgagaccacgaccaatgcgaaactcaattggcccgatgtgccagtgacacctatcatattgaaaacagctaaattactgccgaaaaaataa

SEQ ID NO: 1391 - protein, 195 aa, Shewanella sp. MR-7
MFRWISALLVLCASYSSWAAIDIQPDTLYPQVEFDTSLGKIVVELDRTRAPITVDNFLTYVVKGEYNNTIFHRIISDFVVQGGGLNPQLEELPAGKPIVNESGNGLSNSMGTIAMARDNDPHSATRQFYFNVADNTKLDPSKRRWGYAVFGEVIEGKQVLEAMAVVETTTNAKLNWPDVPVTPIILKTAKLLPKK

SEQ ID NO: 1392 - DNA, 501 bp, Shewanella sp. MR-7
  CDS (1)..(501): transl_table=11
atgacgattatttttacaaccaacctcggtgatatcagtatcgaactcgatatggagcgtgcccccgttaccgccaaaaactttatccgctactgccaggaaggtttttatgagcacacgattttccatcgagtgatcaaaggctttatgatccaaggcggtggttttaccgccaaaatgaaggaaaagcgcacccacgagccgattgtcaacgaagccaacaaaggcctatcgaatgtgtttggcacaattgccatggcccgtaccgatgcaccgcactcggcgaccgcgcagttttttatcaatacggccaacaatgagttcctcgaccacacggcaaccacgaacaacggttggggttatgcggtatttggtaaagtcaccgcgggactcgaggtcgtgctgcaaattgaaggcgtaaaaaccacccgtgttgcaggccatgaggacgtgccccgtgagccgattattatcgaaaaagtgactattgttgaaaaatag

SEQ ID NO: 1393 - protein, 166 aa, Shewanella sp. MR-7
MTIIFTTNLGDISIELDMERAPVTAKNFIRYCQEGFYEHTIFHRVIKGFMIQGGGFTAKMKEKRTHEPIVNEANKGLSNVFGTIAMARTDAPHSATAQFFINTANNEFLDHTATTNNGWGYAVFGKVTAGLEVVLQIEGVKTTRVAGHEDVPREPIIIEKVTIVEK

SEQ ID NO: 1394 - DNA, 492 bp, Shewanella sp. MR-7
  CDS (1)..(492): transl_table=11
atgatcacattacacactaattttggcgacattaaactgcaactgaacgccgaaaaagcaccgctgaccgtggcaaactttatgaaatatgttgacgaaggtttcttcgacggcaccattttccaccgtgtaattgacggctttatgatccaaggtggtggcttcaccactgaaatgagccaaaaacgttgccatgagccagtgaaaaacgaagccaacaacggtttatcaaaccgtactggtactatcgcgatggcgcgtacttctgatccgcactcagcgacggctcagttcttcatcaacgtaaacgataacaccttcctcgatttcaaatctgaaagcatgcaaggctggggttactgcgtatttggtgaagtggttgaaggcatggacatcgttgaaaaaatcaaagctgtcagcactggtaaccgtggcatgcaccaagatgtgccattagaagcggttgtgattgaaaaagtaagtgcggcctaa

SEQ ID NO: 1395 - protein, 163 aa, Shewanella sp. MR-7
MITLHTNFGDIKLQLNAEKAPLTVANFMKYVDEGFFDGTIFHRVIDGFMIQGGGFTTEMSQKRCHEPVKNEANNGLSNRTGTIAMARTSDPHSATAQFFINVNDNTFLDFKSESMQGWGYCVFGEVVEGMDIVEKIKAVSTGNRGMHQDVPLEAVVIEKVSAA

SEQ ID NO: 1396 - DNA, 630 bp, Alkalilimnicola ehrlichei MLHE-1
  CDS (1)..(630): transl_table=11
atggcgttacgctcagcccacaaactgatcgctttcatgcttttcgtgattttcgccgtcctgttggtcgtcggcgccaaggccgtcggcggtgaacgggatgatcaggacagccagcacgcgcaaatggagacccccatggttgtattcgagaccagccacggcaacctcaccctggaactctttccggacgaggcccccatcaccgttgagaatttcctgcagtacgtggatgacgggttctacgacggcaccatcttccaccgggttatccccggtttcgtggtgcagggtggcggtttcgacgaggagttccggcagaaggagacccgtgccccgatcaagaacgaggccgataacggcctgcggaacgaacgcggcacgctgtcgatggcccggacccagcagaaagacagcgccacctcccagttcttcatcaacctggccgacaacgcctttctcgaccacggtacccgcgacttcggttacgccgtcttcgcccgggtggccgagggcatggaggtggtcgacaagatcgcccaagtgcgcaccggcaaccggggtatgcaccaggacgtcccggtggaggatatcgtggtcaagcgggcctaccgccagggcgacgactaa

SEQ ID NO: 1397 - protein, 209 aa, Alkalilimnicola ehrlichei MLHE-1
MALRSAHKLIAFMLFVIFAVLLVVGAKAVGGERDDQDSQHAQMETPMVVFETSHGNLTLELFPDEAPITVENFLQYVDDGFYDGTIFHRVIPGFVVQGGGFDEEFRQKETRAPIKNEADNGLRNERGTLSMARTQQKDSATSQFFINLADNAFLDHGTRDFGYAVFARVAEGMEVVDKIAQVRTGNRGMHQDVPVEDIVVKRAYRQGDD

SEQ ID NO: 1398 - DNA, 564 bp, Pseudomonas aeruginosa UCBPP-PA14
  CDS (1)..(564): transl_table=11
atgctcaaacgtctcctgatcgccacctgcaccctgctcttcgccggttccctgctggccgccacgcctgccgccaagccgcacgtcctgatcgccaccagcctcggcgagatcgaggtagaactcgatccgaccaaggcgccgatcagcgtgaagaacttcctcgagtacgtcgacagcggctactacgacggcaccctgttccaccgcgtgatcccgggcttcatggtgcagaccggcggcttcagcgccggcatgcaggagaagaagacccgcgcaccgatcaagaacgaggccgacaacggcctgctcaacgagcgcggcaccctcgccatggcccgcaccggcgtggtcgattcggccaccagccagttcttcatcaacctgaccgacaacgacttcctcaaccatggtgcccgcgacttcggctatgcggtgttcggcaaggtggtgcgtggcatgggcgtggtcgaccagatcgccaaggttcccaccacccgccgcaacggcttcgccgacgtgccgagcgacgacgtggtgatcctgtccgccaaacgcctctga

SEQ ID NO: 1399 - protein, 187 aa, Pseudomonas aeruginosa UCBPP-PA14
MLKRLLIATCTLLFAGSLLAATPAAKPHVLIATSLGEIEVELDPTKAPISVKNFLEYVDSGYYDGTLFHRVIPGFMVQTGGFSAGMQEKKTRAPIKNEADNGLLNERGTLAMARTGVVDSATSQFFINLTDNDFLNHGARDFGYAVFGKVVRGMGVVDQIAKVPTTRRNGFADVPSDDVVILSAKRL

SEQ ID NO: 1400 - DNA, 498 bp, Pseudomonas aeruginosa UCBPP-PA14
  CDS (1)..(498): transl_table=11
atgatcaagctgcataccaaccatggcgtcatcaccctgaagctcgatgaagagaaagccccggaaaccgcggcgaacttcaaggagtacgtgaaaagtggccactacgacaacaccgtcttccaccgcgtgatcaacaacttcatgatccagggtggcggtttcgagccgggcatgaagcagaagcccactcgcgcaccgatcaagaacgaagccaacaacggcctgaccaacaaggtcggcagcatcgccatggcccgtaccatggacccgcattcggccagcgcgcagttcttcatcaacgtcgccgacaacgacttcctcaaccacaccgcccccaccacccagggctggggctatgccgtcttcggcgaagtggtcgagggcatggacgtggtcaacaagatcaagggcgtggccaccaccatgcgcagcggccaccaggacgtgccggccgaggacgtgatcatcgagaaggccgaaatcgtcgaagaatga

SEQ ID NO: 1401 - protein, 165 aa, Pseudomonas aeruginosa UCBPP-PA14
MIKLHTNHGVITLKLDEEKAPETAANFKEYVKSGHYDNTVFHRVINNFMIQGGGFEPGMKQKPTRAPIKNEANNGLTNKVGSIAMARTMDPHSASAQFFINVADNDFLNHTAPTTQGWGYAVFGEVVEGMDVVNKIKGVATTMRSGHQDVPAEDVIIEKAEIVEE

SEQ ID NO: 1402 - DNA, 597 bp, Magnetococcus sp. MC-1
  CDS (1)..(597): transl_table=11
atgttttttactcgattcttccaaccttcggcatggtggatgacgctgggactgctgttagtcgtcacctctccaaccatggcgggtgcgcaaggcaaaggagccaacccggtgattgtaaagctttctacctctatgggcgacatcaaactacagttggatgccgaaaaagcccccattagcactgaaaactttctcagctatgtgaaaaagggccactatgacggcaccatctttcaccgtgtcattcccggctttatggtgcagggtggtggcatggatgccaatatgaaagagaaatccaccgatgcccccattaaaaacgaggccgataatggtttagtcaataagcgcggtagcgtcgctatggcccgcacgcaggttgttgacagcgccaccagccagttttttatcaacgtcaacaacaacgatttcctcaaccatggtggccgtgattttggctatgcggtgtttggtgaggtgattgaaggcatggatgtggtggatcaaatcacggcgcagcccacaggcaacaagggctaccaccaagatgttcccaccacccccattaccattaatagcgccacgcaggagtaa

SEQ ID NO: 1403 - protein, 198 aa, Magnetococcus sp. MC-1
MFFTRFFQPSAWWMTLGLLLVVTSPTMAGAQGKGANPVIVKLSTSMGDIKLQLDAEKAPISTENFLSYVKKGHYDGTIFHRVIPGFMVQGGGMDANMKEKSTDAPIKNEADNGLVNKRGSVAMARTQVVDSATSQFFINVNNNDFLNHGGRDFGYAVFGEVIEGMDVVDQITAQPTGNKGYHQDVPTTPITINSATQE

SEQ ID NO: 1404 - DNA, 501 bp, Shewanella sp. ANA-3
  CDS (1)..(501): transl_table=11
atgacgattatttttacaaccaacctaggtgatatcagtatcgaactcgatatggagcgtgcgcccgttaccgccaaaaactttatccgctactgccaggaaggtttttatgagcacactattttccatcgagtggtcaaaggctttatgatccaaggcggtggttttaccgccaaaatgaaggaaaagcccacccacgagccgattgttaacgaagccaataaaggcctatcgaatgtgtttgccacaattgccatggcccgcaccgatgcaccgcactcggcaaccgcgcagttttttatcaatacggccaacaacgagttcctcgaccacactgcaaccacgaacaacggttggggttatgcggtatttggtaaagtcaccgcaggactcgaggtcttgctgcaaattgaaggcgtaaaaaccacccgtgttgcaggccatgaggacgtgccccgtgagccgattattatcgaaaaagtgactattattgaaaaatag

SEQ ID NO: 1405 - protein, 166 aa, Shewanella sp. ANA-3
MTIIFTTNLGDISIELDMERAPVTAKNFIRYCQEGFYEHTIFHRVVKGFMIQGGGFTAKMKEKPTHEPIVNEANKGLSNVFATIAMARTDAPHSATAQFFINTANNEFLDHTATTNNGWGYAVFGKVTAGLEVLLQIEGVKTTRVAGHEDVPREPIIIEKVTIIEK

SEQ ID NO: 1406 - DNA, 636 bp, Shewanella sp. ANA-3
  CDS (1)..(636): transl_table=11
atgaaaagaatcacgggacttttactcgccagcagtttgagcttagcccttggcgcctgcggcggcagtggcgacgatgaattaacaccaacgatcccgactcccgatccgaccccaccgagcttaagcgccgatgtctgttatttaatgagcaccacaaagggagatttgaccttagccatcgacctcacccatatgccgatcacgggtaagaactttaaacaatatgtcgataagtcattctataacggtactttattccacagaaccatcaacaactttgtgatccaaggcggtggtttcaccacgggattacaaagcaagccgaccagcgcgccgattaaaaacgaggccgccgtcggcatcagcaacaaacgcggcactatcgcaatggcgcgaaccacagtgccagactcagcgacatcacagttctttatcaatgtgttagataatcctcagctcgatgcttcggcgagcagctatggttatgccgtgtttggtaaagttgtcgaaggaatggatgtggtcgatcagataagcattgtgccaaccaaaaccagcaatggttttagcgacacacctgtgaatgaaattttgatcaatagcgtgatggaaacgacctgtcccgccgcctag

SEQ ID NO: 1407 - protein, 211 aa, Shewanella sp. ANA-3
MKRITGLLLASSLSLALGACGGSGDDELTPTIPTPDPTPPSLSADVCYLMSTTKGDLTLAIDLTHMPITGKNFKQYVDKSFYNGTLFHRTINNFVIQGGGFTTGLQSKPTSAPIKNEAAVGISNKRGTIAMARTTVPDSATSQFFINVLDNPQLDASASSYGYAVFGKVVEGMDVVDQISIVPTKTSNGFSDTPVNEILINSVMETTCPAA

SEQ ID NO: 1408 - DNA, 495 bp, Azoarcus sp. BH72
  CDS (1)..(495): transl_table=11
atggcagtgaacctgcacaccaactacggcgtcatcaccctcgaactcgacgccgagaaggcgccggtgaccgtcgagaacttcctgacctacgtgaaggacggccactacgacaacaccgtcttccaccgcgtcatcgacggcttcatgatccagggcggcggcttcgagcccggcatgaagcaaaagccgacccgcgagccgatcaagaacgaagccgacaacggcctcaagaacgaacgcggcaccatcgccatggcgcgcacccaggcgccccactccgcctctgcgcagttcttcatcaatgtcgccgacaacgacttcctcaacttccgttcgcaggacctgcagggctggggctactgcgtgttcggccgcgttaccgccggactggacgtggtcgatgcgatccgcaaggtcaagacgggctcgagcggcttccatcaggatgtgccgaaggaagacgtgatcatcgagcgggccgaagttgtctga

SEQ ID NO: 1409 - protein, 164 aa, Azoarcus sp. BH72
MAVNLHTNYGVITLELDAEKAPVTVENFLTYVKDGHYDNTVFHRVIDGFMIQGGGFEPGMKQKPTREPIKNEADNGLKNERGTIAMARTQAPHSASAQFFINVADNDFLNFRSQDLQGWGYCVFGRVTAGLDVVDAIRKVKTGSSGFHQDVPKEDVIIERAEVV

SEQ ID NO: 1410 - DNA, 582 bp, Azoarcus sp. BH72
  CDS (1)..(582): transl_table=11
atgaaacgcctcatcgccttccttgccctgtccacctggctcgggctcgccgccgccgccaacccgcaggtgctgttcaccaccaaccagggcgaactcgtcgtcgagctgtaccccgagaaggcaccgaagacggtcgccaacttcctgcagtacgtgaaggacaagcactacgacggcacgatcttccaccgcgtcatcaacggcttcatgatccagggcggtggcatggacgcggcgatgaaggaaaaatccacccgcgccccgatcgagaacgaagcgaaaaacggcctgcgcaacgaacccggcacgctggcgatggcccgcaccggcgacccgcactccgccaccgcgcagttcttcatcaacgtggcccccaacagcttcctcgactacccttcccgtgacggctggggttacgcggtgttcggcaaggtggtgcgcggcctcgacgtcgtcgacaccatcgcccgcgtgccgacgcgcaatgtcggcttccaccagaatgtcccggccgagccggtcgtcatccagtcggcgcgcgtgatcgaagcgcagccggccggccccgcagcccgataa

SEQ ID NO: 1411 - protein, 193 aa, Azoarcus sp. BH72
MKRLIAFLALSTWLGLAAAANPQVLFTTNQGELVVELYPEKAPKTVANFLQYVKDKHYDGTIFHRVINGFMIQGGGMDAAMKEKSTRAPIENEAKNGLRNEPGTLAMARTGDPHSATAQFFINVAPNSFLDYPSRDGWGYAVFGKVVRGLDVVDTIARVPTRNVGFHQNVPAEPVVIQSARVIEAQPAGPAAR

SEQ ID NO: 1412 - DNA, 558 bp, Neisseria meningitidis FAM18
  CDS (1)..(558): transl_table=11
atgaaacccaaattcaaaaccgttttaaccgcgctgcttttggcggtttccctgccgtctatggcggcaacccatgttttgatggaaaccgatatgggcaatatccgtttggttttggacgagtccaaagcccccaaaaccgttgctaatttcgtgcgctatgcccgaaaaggcttttacgacgacaccgtttttcaccgcgttatcgacggtttcgttatccagggcggcggatttaccgaagacttggtacaaaaggcaaccgataaggccgttgccaacgaatccggtaacggcttgaaaaacactgccggtaccatcgccatggcgcggacggccgatccggattccgccaccagccaattctttatcaatctggcggacaatgattcactcaactacaaaaacggacaatacggctataccgttttcggcagggtcgaaagcggcatgaacaccgtttccaaaatcgcccgcgtcaaaaccgccacgcacggcctttatcaaaacgtacccgtacagcccgtcaaaatccgtcgcattgttgtcggacagtaa

SEQ ID NO: 1413 - protein, 185 aa, Neisseria meningitidis FAM18
MKPKFKTVLTALLLAVSLPSMAATHVLMETDMGNIRLVLDESKAPKTVANFVRYARKGFYDDTVFHRVIDGFVIQGGGFTEDLVQKATDKAVANESGNGLKNTAGTIAMARTADPDSATSQFFINLADNDSLNYKNGQYGYTVFGRVESGMNTVSKIARVKTATHGLYQNVPVQPVKIRRIVVGQ

SEQ ID NO: 1414 - DNA, 540 bp, Acidovorax sp. JS42
  CDS (1)..(540): transl_table=11
atgagcaacccacaagtcgaactgcacgtcaccatcaacggtgccgaaacggccacccaaggcgtcatcacgctggaactggacgccgtgaacgcccccaagtccaccgccaacttcctgaactacgtgaacaagggcttctacgacggcacgatctttcaccgcgtgatcaagaacttcatggcccagggcggcggcttcacggccgatatgaagcaaaagccgaccgatgcgcccatcgagaacgaggccgccaacggcctgaagaacgacaagtacaccatcgccatggcccgcaccggcgacccgcacagcgccacggcacagttcttcatcaacgtggtggacaacgccttcctgaaccacacctcccccacaccacagggctggggctacgccgtgttcggcaaggtggtcaagggcgaggacgtggtcgacgccatcaagaaggtgcgcaccacgcgcaagggcttccacgacgacgtgcccttcgacgccgtggtgatcgacaaggctgtggcgctgtcagccctgcgatga

SEQ ID NO: 1415 - protein, 179 aa, Acidovorax sp. JS42
MSNPQVELHVTINGAETATQGVITLELDAVNAPKSTANFLNYVNKGFYDGTIFHRVIKNFMAQGGGFTADMKQKPTDAPIENEAANGLKNDKYTIAMARTGDPHSATAQFFINVVDNAFLNHTSPTPQGWGYAVFGKVVKGEDVVDAIKKVRTTRKGFHDDVPFDAVVIDKAVALSALR

SEQ ID NO: 1416 - DNA, 588 bp, Acidovorax sp. JS42
  CDS (1)..(588): transl_table=11
atgatttccagaagaaatatcacgcaaacgcttgctggatgtgcgctagcagctattgttacagtagcaaatgcccagaccgccggtgccgcagcaccccaggtcaagctcgccaccagcctgggtgacatcgtggtgcaactggacccggccaaggcgcccaagacggtggagaacttcctggcctacgtggccgacaagcactatgacggcacggtctttcaccgcgtgatcgatggcttcatggtccagggtggcggcttcacggccgacatgcagcaaaagcccaccaaggccccgatcccgctggaagccgccaacgggctgaagaacgacaagtacaccatcgccatggcccgcacggccaaccccaattcggcgaccagccagttcttcatcaacgtggcgaacaacgccatgctcaacgcgccccagcccgacggccacggctacgccgtgttcggcaaggtggtgagcggcaccgaggtggtggacaagatcaaggccgtggccaccggcaaccgcggcatgcaccagaacgtgcccacgacccccgtggtcatccaatccgcaaccctggtcaagtaa

SEQ ID NO: 1417 - protein, 195 aa, Acidovorax sp. JS42
MISRRNITQTLAGCALAAIVTVANAQTAGAAAPQVKLATSLGDIVVQLDPAKAPKTVENFLAYVADKHYDGTVFHRVIDGFMVQGGGFTADMQQKPTKAPIPLEAANGLKNDKYTIAMARTANPNSATSQFFINVANNAMLNAPQPDGHGYAVFGKVVSGTEVVDKIKAVATGNRGMHQNVPTTPVVIQSATLVK

SEQ ID NO: 1418 - DNA, 510 bp, Haemophilus influenzae R2846
  CDS (1)..(510): transl_table=11
atggttacattacacacaaactttggcgacattaaaattaaattggattttgataaagctccagttacagcagaaaacttcttaaattactgcaaagaaggtttttataataacacaatttttcatcgtgttattgatggctttatgattcaaggtggcggtatggaaagcggtatgcgcgaaaaagcaactaaagccccaatccaaaatgaagcgaacaatcgtttaagtaacaaacgtggaaccattgcaatggctcgcacttcagatccacattcagcgacagcacaatttttcattaacgtggcagacaatgatttcttaaattatcgttcaaaagaaatgtttggtcgagaagtcgttcaagaatggggctatgcggtatttggtgaagtggttgaagggatggatgttgttgataaaatcaaaaaagtgaaaacaggcaacaaaggttttcatcaagatgttccaactgaagatgtagtgattacatcggtttcagtagaataa

SEQ ID NO: 1419 - protein, 169 aa, Haemophilus influenzae R2846
MVTLHTNFGDIKIKLDFDKAPVTAENFLNYCKEGFYNNTIFHRVIDGFMIQGGGMESGMREKATKAPIQNEANNRLSNKRGTIAMARTSDPHSATAQFFINVADNDFLNYRSKEMFGREVVQEWGYAVFGEVVEGMDVVDKIKKVKTGNKGFHQDVPTEDVVITSVSVE

SEQ ID NO: 1420 - DNA, 498 bp, Pseudoalteromonas tunicata D2
  CDS (1)..(498): transl_table=11
atgattatttttactacaaacttaggtgatatcgaattcaaacttgattttgaaaccacgccagttactgccaaaaactttttacaatattgccaagatggcttttatgaaggtactattttccatcgtgtgatcaaagggtttatgatccaaggtggtggctttaccgccaaaatgaaagaaaaaccaacccaagctcctattgtgaatgaagcaaataaaggcttaaaaaataaactcggcacaattgccatggcgcgtaccgacgctccgcactcagcaacggcacaattttttattaatgtagctgataacgactttttagatcacagcaaaaccaccaatgcaggttggggttactgtgtttttggtgaagttattgcgggcatggacatcatcaaacaaattgaaaaagtaagaaccgcacgagttgcaggccatgaagatgtgccatttgagccaattatcgtcgaaaaagtaacgataaaaagcgaataa

SEQ ID NO: 1421 - protein, 165 aa, Pseudoalteromonas tunicata D2
MIIFTTNLGDIEFKLDFETTPVTAKNFLQYCQDGFYEGTIFHRVIKGFMIQGGGFTAKMKEKPTQAPIVNEANKGLKNKLGTIAMARTDAPHSATAQFFINVADNDFLDHSKTTNAGWGYCVFGEVIAGMDIIKQIEKVRTARVAGHEDVPFEPIIVEKVTIKSE

SEQ ID NO: 1422 - DNA, 495 bp, Pseudoalteromonas tunicata D2
  CDS (1)..(495): transl_table=11
atggttgttttacatactaactttggtgatatcaaacttgcgatgcatcaaaatgaagctccaaagactgttgaaaactttttaaactacgctaactcaggtttttacaacggcactatttttcaccgtgtaattgatggttttatggttcaaggtggtggatttgcaccgggtatggaacaaaaagaagtcggtgagccaatagagaatgaagctaacaatgggctaacgaacaaagttggtaccgttgcaatggcacgtacaccggatcctcattcggcaacagctcaattctttatcaatgtaaataacaattcattcttaaacttctcaagtgcaacatcacaaggctatggctactgtgtatttgccgaagtcgttgaaggcatggatattgttgaaaaaatcaaatcagtagcaactggcagcaacggttttcaccaagatgttcctcttgaagatgtgatcatccaaagcgtaactgtagacgcttaa

SEQ ID NO: 1423 - protein, 164 aa, Pseudoalteromonas tunicata D2
MVVLHTNFGDIKLAMHQNEAPKTVENFLNYANSGFYNGTIFHRVIDGFMVQGGGFAPGMEQKEVGEPIENEANNGLTNKVGTVAMARTPDPHSATAQFFINVNNNSFLNFSSATSQGYGYCVFAEVVEGMDIVEKIKSVATGSNGFHQDVPLEDVIIQSVTVDA

SEQ ID NO: 1424 - DNA, 552 bp, Photobacterium sp. SKA34
  CDS (1)..(552): transl_table=11
atgacacgttttttacttgcgctatgtttacttatcgctttacctgtcagtgcagcaacacaggtcttagtgacaacaaatttaggggattttactatccaactaaatgaagaaaaagccccaattagtagtaaaaacttcttacgctatgttgaagaaggcaactacaacggaactattttccatcgtgttatcccaggctttatggctcaaggcggtggttttgataaagacatggtaaaacgtccaacccatgctccgattaaaaacgaagcaagtaatggattgaaaaacgattccgctactgttgctatggcacgtacgcaaaatccaaattctgcgactaaccaattctttattaactataaagacaatgcatttttaaatgccgcaggtaataacccaggttatgcggtatttggtaaagtggttaaaggtttttctgttgtgcaagatatggcaaaaattccaacgggctctaatcgtgcaacgggtatgcaagatgtacctcagcaacctataatcattgaatcaatgaaagttattaaataa

SEQ ID NO: 1425 - protein, 183 aa, Photobacterium sp. SKA34
MTRFLLALCLLIALPVSAATQVLVTTNLGDFTIQLNEEKAPISSKNFLRYVEEGNYNGTIFHRVIPGFMAQGGGFDKDMVKRPTHAPIKNEASNGLKNDSATVAMARTQNPNSATNQFFINYKDNAFLNAAGNNPGYAVFGKVVKGFSVVQDMAKIPTGSNRATGMQDVPQQPIIIESMKVIK

SEQ ID NO: 1426 - DNA, 495 bp, Photobacterium sp. SKA34
  CDS (1)..(495): transl_table=11
atgattacccttcacacaaattttggtgacatcaaaattaacatattcgaagacaaagcacctcaaacatgtgcaaacttccttcaatactgccgtgatggtttctacaacggtactattttccaccgtgttattgatggtttcatggttcaaggtggcggcatgcttccaggtatggaagagaaggaaactcgcgctacaattcaaaacgaagcaaataatggcctaagcaataaaacaggcacacttgcaatggcgcgtactaacgctcctcactctgcaagctctcagtttttcatcaacgttaaagacaataacttcctagatttcaccggcgaaaacatgagcggctggggctactgtgtatttgcagcagtcgttgaaggtatggacgtagttaacaagattaaggctgtgaaaacaggccgtaacggttaccactcagatgtacctgttgaagatgttattattgaaaacgtaacaatcgaagaataa

SEQ ID NO: 1427 - protein, 164 aa, Photobacterium sp. SKA34
MITLHTNFGDIKINIFEDKAPQTCANFLQYCRDGFYNGTIFHRVIDGFMVQGGGMLPGMEEKETRATIQNEANNGLSNKTGTLAMARTNAPHSASSQFFINVKDNNFLDFTGENMSGWGYCVFAAVVEGMDVVNKIKAVKTGRNGYHSDVPVEDVIIENVTIEE

SEQ ID NO: 1428 - DNA, 495 bp, Photobacterium sp. SKA34
  CDS (1)..(495): transl_table=11
atgattatttttaccaccaatgttggcaatattacgattgagctgaacaagcaaaaagcgcctgtcacggttaagaacttcttaaaatattgccaagatggtttttacaacggcactatttttcaccgtgtgatcaaaggctttatgatccaaggtggtggttacactgtaaaaatgaaagaaaaaccaacacgcacccccattgttaatgaagcaaaccgtggtctaaaaaatgtgataggtactatcgcaatggcaagaaccgatgccccacattcagcaacagctgagttttttattaatgttgctgacaacgattttcttgatcatacagcaacaacgaatgtgggctggggatacactgtttttggtcaagtaacggcaggaatggatgtagtaaacaaaatttcaaaagtaaaaacactatcggttcgcgatcatgaagatgtacctcgtgatccgattgtgattgaaaaagtcactattgttgaataa

SEQ ID NO: 1429 - protein, 164 aa, Photobacterium sp. SKA34
MIIFTTNVGNITIELNKQKAPVTVKNFLKYCQDGFYNGTIFHRVIKGFMIQGGGYTVKMKEKPTRTPIVNEANRGLKNVIGTIAMARTDAPHSATAEFFINVADNDFLDHTATTNVGWGYTVFGQVTAGMDVVNKISKVKTLSVRDHEDVPRDPIVIEKVTIVE

SEQ ID NO: 1430 - DNA, 567 bp, Neptuniibacter caesariensis
  CDS (1)..(567): transl_table=11
atgttgaagtcactcaccagcctggcactctgtctggcattatttgcaggaaacgctttcgctgaaagcaacccaaaagttctgatgaaaaccaataaaggtgatatcaccctggaactttttcctgagcaggcccctgaaaccgtaaaaaactttttagaatatgtggatagtgatttttatgacggcactattttccaccgcaccatcgcggcatttatgattcagggtggcgggtttacagaagatatgaatcagaaagatgttcacgatccgataaaaaatgaatcaggaaatgggctaagcaacaaacagggaacgattgctatggcgcggactaattatccgcacagtgcaacatcgcagtttttcatcaatgcggtaaacaaccggaacctggatgctcgcggaaatcgttttggttacgcagtattcggtcaggtaactgacgggatggacctggtcattcagatcagtcgcaccccaacaggatcaaaagcaggacatagggatgtacctaaaagccccattatcatcgagtcaattgagagaatcgaagctgaataa

SEQ ID NO: 1431 - protein, 188 aa, Neptuniibacter caesariensis
MLKSLTSLALCLALFAGNAFAESNPKVLMKTNKGDITLELFPEQAPETVKNFLEYVDSDFYDGTIFHRTIAAFMIQGGGFTEDMNQKDVHDPIKNESGNGLSNKQGTIAMARTNYPHSATSQFFINAVNNRNLDARGNRFGYAVFGQVTDGMDLVIQISRTPTGSKAGHRDVPKSPIIIESIERIEAE

SEQ ID NO: 1432 - DNA, 558 bp, Neptuniibacter caesariensis
  CDS (1)..(558): transl_table=11
atggcccggttaaaaggcgaagaagtggacactacaaaaatgattatcctccatactaattttggtgatatctccttggagctagaccatgagaaggctccaaaaaccgcagcaaacttcgagcaatacgtatctgaaggtttctacgacggtgttatttttcaccgcgtaattaatggtttcatgattcagggtggtggttttgaaccaggcatggttcagaaaacaacgcgcgaaactattgagaacgaagctgataacggcctgtctaatgcgaacggcactatcgcaatggcccgtacaatggatccgcacagtgcatcggcgcaattctttatcaacgttgccgataacactttccttgaccacacagctaagacaactgaaggctggggctacgcagtattcggtaaagtcgttgatggcctggagatcgtaaacaagatcaaaacagtttctacaacgatgcgtgcaggtcaccaggatgttccagcagaagatatcattatcgagtctgctgaaatcgtaactgaagacgcggaaagcactgaagagtaa

SEQ ID NO: 1433 - protein, 185 aa, Neptuniibacter caesariensis
MARLKGEEVDTTKMIILHTNFGDISLELDHEKAPKTAANFEQYVSEGFYDGVIFHRVINGFMIQGGGFEPGMVQKTTRETIENEADNGLSNANGTIAMARTMDPHSASAQFFINVADNTFLDHTAKTTEGWGYAVFGKVVDGLEIVNKIKTVSTTMRAGHQDVPAEDIIIESAEIVTEDAESTEE

SEQ ID NO: 1434 - DNA, 612 bp, Oceanobacter sp. RED65
  CDS (1)..(612): transl_table=11
atgcgtttgatactagcttttttactttcaatgtttagttttgctgtgatggccgagtcacaaagcgagccgtctgcagagcaagcagacgtagcgacaccttacgtcacaatgaaaaccaatatgggcgacattattctggaactcaaccctgccaaagcacccataagtgtggctaactttttagagtatgcgcaaaacggttattacgatggcaccttattccaccgagtaattccagactttatgattcaagccggagggttctttactccatctatgattcgtaaagccaccaatgagcccattaaaaacgaagcggataatggcctgtttaataatcgtggcaccatcgcaatggctcgcactgcggctgttgatagcgccaccagtcagttctttattaacgtaaaaaacaatcacttcctcaatcatggattccgtgattttggttatgccgtgttcggaaaggtgatttcaggcatagaagtggtcgatgctatcagtaccgtcgaaacgacgcgtaagagtggccaccagaacgttccagtagaacctgtcgctattgaaagtgttaccgtcagctacgacaagcctgtcgcgacgaactaa

SEQ ID NO: 1435 - protein, 203 aa, Oceanobacter sp. RED65
MRLILAFLLSMFSFAVMAESQSEPSAEQADVATPYVTMKTNMGDIILELNPAKAPISVANFLEYAQNGYYDGTLFHRVIPDFMIQAGGFFTPSMIRKATNEPIKNEADNGLFNNRGTIAMARTAAVDSATSQFFINVKNNHFLNHGFRDFGYAVFGKVISGIEVVDAISTVETTRKSGHQNVPVEPVAIESVTVSYDKPVATN

SEQ ID NO: 1436 - DNA, 504 bp, Oceanobacter sp. RED65
  CDS (1)..(504): transl_table=11
atgacacaagtggtattaaaaaccagctttggcgacatcaagcttgaactaaacgcggaaaaagcgcctaaaactgttgaaaatttcgtcaactacgtgaaggacggtttctacaacggcactatctttcatcgcgttatcgatggcttcatgattcagggtggcggcatgaatgaagacatgtcacaaaagccaaccactcaagacagcattgaaaacgaagcagacaacggcttaagcaacaaagtcggtgcgatcgctatggctcgtaccatggatccgcacagtgcatctagccaattcttcattaacgtgaaagacaacggctttttagatcacacgagtaaaaccgctgaaggctggggttactgcgtgtttggtgaagtagtagaaggcatggatgtggtcaaccgcatcaaaggcgtgcgcacaactatggctgcaggccaccaagacgttcctgctgaaccagttttaattgaaagcgcagaaatcgtcgagtaa

SEQ ID NO: 1437 - protein, 167 aa, Oceanobacter sp. RED65
MTQVVLKTSFGDIKLELNAEKAPKTVENFVNYVKDGFYNGTIFHRVIDGFMIQGGGMNEDMSQKPTTQDSIENEADNGLSNKVGAIAMARTMDPHSASSQFFINVKDNGFLDHTSKTAEGWGYCVFGEVVEGMDVVNRIKGVRTTMAAGHQDVPAEPVLIESAEIVE

SEQ ID NO: 1438 - DNA, 546 bp, Vibrio sp. Ex25
  CDS (1)..(546): transl_table=11
atgttacgcaaggcaattctttctctcgcgctactcagctgcagcgtttgggctggaccaaaagtggcgtttgaaacaacgttaggttcatttactgtcgaactgaatgaagagaaagcgccgattacggtagcgaacttcctgaaatatgtagaagacggtagctatgaaggcactatttttcaccgcgttattccaggctttatggcgcaaggtggtggctttaaccaagatatgcaaatggtgaagacttacgctccaatcaaaaacgagggtaataacggtttaaataacgaccgtgcgacgattgcaatggcacgcaccaacgcgcctgactctgctactcgtcagttttttatcaatttagtcgacaatgattttctaaactacggcgctcgtccaccgggttatgcggtatttggcgaggtcacggaaggattcgacattatccaaaaaatggcaaaacagccaactacgacgactcgcggtatgcgtgatgttcccgagactcaaatcgtcatcactaaagcaacactacttaaatag

SEQ ID NO: 1439 - protein, 181 aa, Vibrio sp. Ex25
MLRKAILSLALLSCSVWAGPKVAFETTLGSFTVELNEEKAPITVANFLKYVEDGSYEGTIFHRVIPGFMAQGGGFNQDMQMVKTYAPIKNEGNNGLNNDRATIAMARTNAPDSATRQFFINLVDNDFLNYGARPPGYAVFGEVTEGFDIIQKMAKQPTTTTRGMRDVPETQIVITKATLLK

SEQ ID NO: 1440 - DNA, 486 bp, Vibrio sp. Ex25
  CDS (1)..(486): transl_table=11
atgaccaccaatttcggtgatatcgagattgaactgaacctagaacgagcgccagttagctcaaagaacttcaaaaaatactgtgaagatggcttctacaacggcaccattttccaccgcgttatcgatggttttatgatccaaggtggcggtcacaccgaagacatggcagaaaagccaacgcgcaccccgattgcgaacgaagcaaaccgtggtctaaagaaccttgttggcactatcgcaatggcgcgtactgatgctccgcactctgcaacagcacagttcttcattaacttggaagacaatgatttcctagaccacaccgcaaccaccaacctaggctggggttacgcggtatttggtaaagtgaccgcgggtatggatgtcgtaaaccgcatcgcgaaagtaaaaacgacctctaaacttggtcacgatgatgtgccatgcgatccaatcattattgagaaagtgacagtcagcgaataa

SEQ ID NO: 1441 - protein, 161 aa, Vibrio sp. Ex25
MTTNFGDIEIELNLERAPVSSKNFKKYCEDGFYNGTIFHRVIDGFMIQGGGHTEDMAEKPTRTPIANEANRGLKNLVGTIAMARTDAPHSATAQFFINLEDNDFLDHTATTNLGWGYAVFGKVTAGMDVVNRIAKVKTTSKLGHDDVPCDPIIIEKVTVSE

SEQ ID NO: 1442 - DNA, 492 bp, Alteromonadales bacterium TW-7
  CDS (1)..(492): transl_table=11
atggttgttctacacacaaactttggtgacatcaccattaaaatgtttgagcaagaagctccaaacacagtaaaaaactttttagagtatgcaaacgcaggtttttacaacggtacaatttttcaccgtgtaattgatggctttatggttcaaggtggtggctttatttcaggtatggaacaaaaagacgttaacgaccctattcaaaacgaagctaacaacggcctatctaataaagtaggtactttagctatggcacgcacgccagatccacactctgctacagcacagttttttattaatgttaacaacaacgattttttaaaccacagcagcgaaacgtctcaaggctggggttactgtgtgtttgctgaagtagttgaaggcatggacattgtagaaaaaattaaaggtgtagctactggtagcaatggctttcaccaagacgtgcctcttgaagatgtgatcatcgaaagcgttactgttaattaa

SEQ ID NO: 1443 - protein, 163 aa, Alteromonadales bacterium TW-7
MVVLHTNFGDITIKMFEQEAPNTVKNFLEYANAGFYNGTIFHRVIDGFMVQGGGFISGMEQKDVNDPIQNEANNGLSNKVGTLAMARTPDPHSATAQFFINVNNNDFLNHSSETSQGWGYCVFAEVVEGMDIVEKIKGVATGSNGFHQDVPLEDVIIESVTVN

SEQ ID NO: 1444 - DNA, 573 bp, marine gamma proteobacterium HTCC2143
  CDS (1)..(573): transl_table=11
atgaattacacccgcaaaatgtttgtcactctgttaatggtcctaagcgccccatcgctttttgctgctgaccgtgttgaaagcaatccgctagccatcattgagaccagcaaaggcacgatcaccctggaactctatcccaatgaagcgccggtcacagttgctaactttgtcgactatgcacaatctaacttctatcgcggcactatcttccatcgcgttatcaagaaatttatgattcaaggcggtggctatacccagcaaatggccgaaaaatacaccaatccaccgatcgttaacgaatctggtaacggcttacacaatgaccggtggactgtggccatggctcgcaccaacgaccctgatagtgcctcgtcccagttttttatcaatacgaaaatgaatgctcgtctggatgctcaggccggtcaacctggctatgcagtattcggtatggtggttgatggtttcgatatcgtaaaaattattgaaaaatcccctaccatgacctttgatggacatcaaaacttcccggtagagcccattattatcgaaagcattaagatcaaataa

SEQ ID NO: 1445 - protein, 190 aa, marine gamma proteobacterium HTCC2143
MNYTRKMFVTLLMVLSAPSLFAADRVESNPLAIIETSKGTITLELYPNEAPVTVANFVDYAQSNFYRGTIFHRVIKKFMIQGGGYTQQMAEKYTNPPIVNESGNGLHNDRWTVAMARTNDPDSASSQFFINTKMNARLDAQAGQPGYAVFGMVVDGFDIVKIIEKSPTMTFDGHQNFPVEPIIIESIKIK

SEQ ID NO: 1446 - DNA, 495 bp, marine gamma proteobacterium HTCC2143
  CDS (1)..(495): transl_table=11
atggtcatttttaaaacaaactatggtgacatcactgtcgagctaaattacgacaaagcccctaaaacagctgaaaattttgcccaatacgtcaaggatggcttttacgatggcactatctttcaccgtgtcatcgagaatttcatgattcaaggcggcggctttgagcccggaatggcacaaaaagaaactcgagaaacaatcgaaaatgaagctgacaatggcctcgccaatgattttggcaccctcgccatggccagaacaatggatccacattcagccagcgctcaattttttattaatattaaagacaatgactttctcaatcataccgccaaaactagccaaggctggggttatgccgtatttggtaaggtagttgaaggaatggatgtcgtcgataagatcaaaaatcaggcgacaacaatgaaaaatggccatcaagatgtgcctgtcgatgacattgttattgagtcagcggtattgaccgactaa

SEQ ID NO: 1447 - protein, 164 aa, marine gamma proteobacterium HTCC2143
MVIFKTNYGDITVELNYDKAPKTAENFAQYVKDGFYDGTIFHRVIENFMIQGGGFEPGMAQKETRETIENEADNGLANDFGTLAMARTMDPHSASAQFFINIKDNDFLNHTAKTSQGWGYAVFGKVVEGMDVVDKIKNQATTMKNGHQDVPVDDIVIESAVLTD

SEQ ID NO: 1448 - DNA, 603 bp, marine gamma proteobacterium HTCC2080
  CDS (1)..(603): transl_table=11
atgaaacacttttgcagaatttttgttttgcttgcgctatttataagttcaggcgcgctgttcgcgcaagaaaatgcgagtaccgtgcgcgtaaagctcgtcacatcagccggggatataaccctcaaactctatccgcaaaaatctccggttacggtgaaaaatttcctcgcctacgtcgacagcgggttttataacgaaaccatatttcatcgcgtcatccgcaatttcatggtgcaaggtggcggctttaccacggcgatgacggaaaaagaatccggcgagcccattgtcaacgagagtcgcaataaactgcacaacatacgtggcacgatcgctatggcaagaaccagtgaacccgattcagcaacggcacagtttttcataaaccagcgcagcaacctccagcttgactgggctccggggaaagaggggtataccgtcttcggcgaagtcgaaaagggaatgggtgtggtcgacttcatcgcgaccgcagacaccgacacgggactaatggttaccaatgcagggcaacgcccctttcaagatgtcccagtagaggcgatcgtgatcaaaaaagtggtacgcattccgggaaaatga

SEQ ID NO: 1449 - protein, 200 aa, marine gamma proteobacterium HTCC2080
MKHFCRIFVLLALFISSGALFAQENASTVRVKLVTSAGDITLKLYPQKSPVTVKNFLAYVDSGFYNETIFHRVIRNFMVQGGGFTTAMTEKESGEPIVNESRNKLHNIRGTIAMARTSEPDSATAQFFINQRSNLQLDWAPGKEGYTVFGEVEKGMGVVDFIATADTDTGLMVTNAGQRPFQDVPVEAIVIKKVVRIPGK

SEQ ID NO: 1450 - DNA, 510 bp, marine gamma proteobacterium HTCC2080
  CDS (1)..(510): transl_table=11
atgtctagcacagtcattgaaatgaaaaccacatttggcgttatcacgttagagctcgatgccgaaaaagcaccaaaaactgtcgagaacttcgtgcgctatgcaacggaaggcttttatgacggcacaatctttcaccgagttattgacaattttatgattcagggcggcggttttgatgccgacatgcagcaaaaagagagcggtgagcctatcgaaaatgaggccgacaatgggctcaaaaacgatcgtggcaccatagccatggcgcgcaccatggatccacattctgcaaccgctcaatttttcctaaacgtaaaagacaacgacttcctaaaccactctggtaaaaacatgcaaggctggggttacaccgtgtttggaaaagtcaccgctggtgatgatgtactggacaaaatccggtcagtagaaactggcaacaagtcgggtcatcaagacgttcccaaagacagtattgtgatcgaatccgtcacggttactgccgcctga

SEQ ID NO: 1451 - protein, 169 aa, marine gamma proteobacterium HTCC2080
MSSTVIEMKTTFGVITLELDAEKAPKTVENFVRYATEGFYDGTIFHRVIDNFMIQGGGFDADMQQKESGEPIENEADNGLKNDRGTIAMARTMDPHSATAQFFLNVKDNDFLNHSGKNMQGWGYTVFGKVTAGDDVLDKIRSVETGNKSGHQDVPKDSIVIESVTVTAA

SEQ ID NO: 1452 - DNA, 510 bp, Marinobacter sp. ELB17
  CDS (1)..(510): transl_table=11
atgattctgctgacaaccaaccacggccctatcaagctggaactggattatgacaaagcaccggaaaccgctaaaaacttcgaaaagtatgtgcgcgagggcttttttaacggcctgatatttcaccgggtgattagcaacttcatggttcagggcggcggcttcgaaccggacatgagcccgcgcaaaacccgcgagacaatcaagagtgaagccgataacggcctcagcaatatgattggcaccgttgccatggctcgcaccatggacccgcactccgcaaccgcgcagtttttcatcaacgttgaaaacaacggtttcctggatcattccgccaaaactgcggaaggctggggttattgcgtctttggcaaagtggctgaaggcatggacgtcgtcgacaaaattcgcgcagtgcgcaccacgatgaaagccggccaccaggatgttcctgctgacgacgtgatcatcgaaaaagccgaagtgcttgaggacggaaacgcagcgtga

SEQ ID NO: 1453 - protein, 169 aa, Marinobacter sp. ELB17
MILLTTNHGPIKLELDYDKAPETAKNFEKYVREGFFNGLIFHRVISNFMVQGGGFEPDMSPRKTRETIKSEADNGLSNMIGTVAMARTMDPHSATAQFFINVENNGFLDHSAKTAEGWGYCVFGKVAEGMDVVDKIRAVRTTMKAGHQDVPADDVIIEKAEVLEDGNAA

SEQ ID NO: 1454 - DNA, 609 bp, Marinobacter sp. ELB17
  CDS (1)..(609): transl_table=11
atgcccgctgtaaaacgttttttgtccgcatttttcttttcagtcctagccgcaagctgcgctctagtgggcaccgtcaacgctgatgatagcgccattcaggatctggttaacgtcgacgtcataacctccgaaggccaatttacacttcagttgaggcccgatgtggcgccggacaccgtggccaattttctggaatacgtgcgctcgggcttttaccaaggcaccgtatttcaccgggttattccaggtttcatggttcaaggcggcggatttagctccgagctgcagtcccaagaaacccgcgcccccatccgcaacgaagccacgccgtcattaccaaacctgcgtggcaccgtggcaatggcgcgaaccaacgcaccagactctgcaaccgcccaattctttgtcaacctgaccgacaacgactttcttaatccaaactcgcgcggtgcaggttacgcggtgtttggcaaagttgtttcaggcatggacgtgatcgacgccattgccaatacaaaaacaggatcgcgcaaaggcatgagtgatgttccgcttcaggcgattacgattgaaagcatgtcgattgttgaaaccatggccccatga

SEQ ID NO: 1455 - protein, 202 aa, Marinobacter sp. ELB17
MPAVKRFLSAFFFSVLAASCALVGTVNADDSAIQDLVNVDVITSEGQFTLQLRPDVAPDTVANFLEYVRSGFYQGTVFHRVIPGFMVQGGGFSSELQSQETRAPIRNEATPSLPNLRGTVAMARTNAPDSATAQFFVNLTDNDFLNPNSRGAGYAVFGKVVSGMDVIDAIANTKTGSRKGMSDVPLQAITIESMSIVETMAP

SEQ ID NO: 1456 - DNA, 492 bp, Moritella sp. PE36
  CDS (1)..(492): transl_table=11
atgattatttttaccacgaacttaggtgacatcgaaattgaactgaatatggagaaagcgcctgtcacgtcaaagaactttctacgctattgcaaagacggtttttatgaaggcactatttttcatcgagtgattaaagacttcatgatccaaggtggtggttttactgaaaatatgcaagagaagaagactcgcccagccattgctaacgaagctaatcgaggccttaaaaatgtgattggttcaattgcaatggcacgtacagattcgccacactctgcaacagcgcaattctttattaacttagatgacaatgcgtttcttgatcatacagcgacgacaaacgctggctggggctacacggcctttggtactgttaccgcgggcatagatgtagttaacatgattgcatgttctagaacagccacagtaaaaggtcacgaagatgtaccaagtgaaaccattataattaaaaaagtagtcatcaaataa

SEQ ID NO: 1457 - protein, 163 aa, Moritella sp. PE36
MIIFTTNLGDIEIELNMEKAPVTSKNFLRYCKDGFYEGTIFHRVIKDFMIQGGGFTENMQEKKTRPAIANEANRGLKNVIGSIAMARTDSPHSATAQFFINLDDNAFLDHTATTNAGWGYTAFGTVTAGIDVVNMIACSRTATVKGHEDVPSETIIIKKVVIK

SEQ ID NO: 1458 - DNA, 525 bp, Moritella sp. PE36
  CDS (1)..(525): transl_table=11
atgtttaatactgcctttgcagcggagactaaagccctaatcaaaaccaatctgggtgatattacggttgagttatacccagaacaagcacctgtatctgttgctaattttatcaactatgttgaaagtgatttttatagtggcattatttttcaccgtgtgatccctggatttatggctcaaacgggtggttttaatgaaaacctagaaaagcagatatcaggaaagccagtcattaatgaagcaaacaatggcttaagtaatgagcgtggtacgctggcgttagcacgtactaacaatcctaactcggcgacatcacagttttttattaatctcaaaaataataactttttaaatcgttcgggttcaagcccatcacaagcgggttatgctgtatttggtcgtgtggtagctggaatggatgtggtggataaaatagcaaaacaaccaacaggtaaaaagaagtattacagtgatgtaccattaacaaacattgtgattaaaagcattacgatgttgaagtag

SEQ ID NO: 1459 - protein, 174 aa, Moritella sp. PE36
MFNTAFAAETKALIKTNLGDITVELYPEQAPVSVANFINYVESDFYSGIIFHRVIPGFMAQTGGFNENLEKQISGKPVINEANNGLSNERGTLALARTNNPNSATSQFFINLKNNNFLNRSGSSPSQAGYAVFGRVVAGMDVVDKIAKQPTGKKKYYSDVPLTNIVIKSITMLK

SEQ ID NO: 1460 - DNA, 588 bp, Thauera sp. MZ1T
  CDS (1)..(588): transl_table=11
atgaaacgacacctgcttgccttcgccaccgcggccagcctagccttcccggtgctcgccgccaacccgacggtcgagctcaagaccagccagggcgatatcgtcgtcgaggtcttcgccgacaaggcgcccaagtccgccgagaacttcgtgcagtatgtgaaggacggcttctacgacggcaccgtgttccaccgcgtgatcgacggcttcatggtgcagggcggcggcttcgacgcaagcatgaaccagaaggccacgcgcgccccgatcgagaacgaggccaaaaacggcctcaagaacgagcgcggcaccctggcgatggcgcgcacctccgacccgcactcggcgagcgcgcagttcttcatcaacctcgtccccaacaccttcctcgactacccgtcgcgcgacggctggggctacgcggtgttcggcaaggtcgtcaagggcatggaggtcgtcgacaagatcgccaagctgcccaccgccaaccgcggcttccaccagaacgtcccggtcgaggcgatcgtcgtcgagagcgcgcgcgtggtcggcaccgccgcgccggcgaagaagcctgcgaagtaa

SEQ ID NO: 1461 - protein, 195 aa, Thauera sp. MZ1T
MKRHLLAFATAASLAFPVLAANPTVELKTSQGDIVVEVFADKAPKSAENFVQYVKDGFYDGTVFHRVIDGFMVQGGGFDASMNQKATRAPIENEAKNGLKNERGTLAMARTSDPHSASAQFFINLVPNTFLDYPSRDGWGYAVFGKVVKGMEVVDKIAKLPTANRGFHQNVPVEAIVVESARVVGTAAPAKKPAK

SEQ ID NO: 1462 - DNA, 495 bp, Thauera sp. MZ1T
  CDS (1)..(495): transl_table=11
atggcagtcaagctgcacaccaaccacggcgtcatcaccctcgaactcgacgccgagaaggcccccgtcaccgtggccaacttcctcgcctacgtcgaggccggccactacgacaacaccgtcttccaccgcgtcatcgacggcttcatgatccagggcggcggcttcgagcccggcatgaagcagaaggccactggcgagcagatcaagaacgaggccgacaacggcctcaagaacgaccgcggcaccatcgccatggcgcgcacccaggccccgcactcggccaccgcgcagttcttcatcaacgtcgccgacaacgccttcctcaaccacacctcgcccgacctgcagggctggggctactgtgtgttcggcaaggtcagcgagggcatggacgtggtcgacagcatccgcaaggtcaagaccggctccagcggcttccaccaggacgtgccgaaggaagacgtgatcatcgagcgcgccgaagtcgtctga

SEQ ID NO: 1463 - protein, 164 aa, Thauera sp. MZ1T
MAVKLHTNHGVITLELDAEKAPVTVANFLAYVEAGHYDNTVFHRVIDGFMIQGGGFEPGMKQKATGEQIKNEADNGLKNDRGTIAMARTQAPHSATAQFFINVADNAFLNHTSPDLQGWGYCVFGKVSEGMDVVDSIRKVKTGSSGFHQDVPKEDVIIERAEVV

SEQ ID NO: 1464 - DNA, 624 bp, Verrucomicrobium spinosum DSM 4136
  CDS (1)..(624): transl_table=11
atgctgcaatcccgccccatgttgaagaaaacctttatcaaaacgctggtggccctcaccatgagcgctaccctcgggctccaggcccaggacgcggcaacacccgccaacaaccaacctgtcaaaggcaaagtgaaagtcaccctcgagacctccaaaggcaacatcgaactggaactggacgccgacaaggccccgatctccgttcagaacttcctcagctacgcgaacaagggtacctacgaaggcaccatcttccaccgcgtgatcccgggcttcatgatccaggggggtggttttaccccagacatgcagcagaagccgaccgacaagcccattgagtgcgagtccaagaacggcctcaagaacgccaagggcaccatcgccatggcccgcaccagcaacccgcacagcgcgacctgccagttcttcatcaacgtgaaggacaacacctccctcgactatccgaatccggatggctggggctacgccgtcttcggcaaggtgaccaagggcatcgagatctgtgacgccatcgtgaacgtgccgaccacccggaagggcccccacggcgacgtcccagtggacccgatcacgatcaacaaggtgaccgtttcccagtag

SEQ ID NO: 1465 - protein, 207 aa, Verrucomicrobium spinosum DSM 4136
MLQSRPMLKKTFIKTLVALTMSATLGLQAQDAATPANNQPVKGKVKVTLETSKGNIELELDADKAPISVQNFLSYANKGTYEGTIFHRVIPGFMIQGGGFTPDMQQKPTDKPIECESKNGLKNAKGTIAMARTSNPHSATCQFFINVKDNTSLDYPNPDGWGYAVFGKVTKGIEICDAIVNVPTTRKGPHGDVPVDPITINKVTVSQ

SEQ ID NO: 1466 - DNA, 498 bp, Cyanothece sp. PCC 8801
  CDS (1)..(498): transl_table=11
atgattacactacataccaattttggtgacatcaaactgacgttatttagcgagcaagctccgaaaaccgtagagaatttcctgcaatactgtcgggatggacactacgataacacaatttttcaccgcgtgattaatgggtttatgattcaaggtggcggattttcgccaggaatgaagcaaaaagccacccgtgctcccatcgaaaacgaagccaataacggtctgtctaataaaactggtactattgccatggcgcgtaccagtgatccccattctgcgtcagcacaattctttattaacgtaaaagataacaattttcttgattttactgcaaaaaacccccaaggttggggctactgcgtctttggggaagttaccgaaggaatggatgtcgtgaaccaaattaaaggggttaaaacaggaaattctggaatgcaccaagatgttcctgtagaagatgtcattattgagcgcgtaaccatcgaagtcgaataa

SEQ ID NO: 1467 - protein, 165 aa, Cyanothece sp. PCC 8801
MITLHTNFGDIKLTLFSEQAPKTVENFLQYCRDGHYDNTIFHRVINGFMIQGGGFSPGMKQKATRAPIENEANNGLSNKTGTIAMARTSDPHSASAQFFINVKDNNFLDFTAKNPQGWGYCVFGEVTEGMDVVNQIKGVKTGNSGMHQDVPVEDVIIERVTIEVE

SEQ ID NO: 1468 - DNA, 489 bp, Herbaspirillum seropedicae
  CDS (1)..(489): transl_table=11
atggcagttctgctcaccaccaaccacggcaccatcaagatcgaactggatgcggaaaaggcgcccaagaccgttgaaaacttcctggcctacgtcaacgccggccactacaacggcaccatcttccaccgcgtcatcgacggtttcatgatccagggcggcggtttcgaacccggcatgaagcagaaggaaacccgcgagccgatcgagaacgaagccaagaatggcttgaagaacgagccctacaccctggccatggcccgcaccgccgctccgcactcggcctcggcgcagttcttcatcaacgtcaagaacaacagcttcctggactacccgggccaggatggctggggctactgcgtcttcggcaaggtcgtcgaaggcactgaagtggtcgacaagatcaagggtgtgaagaccacccgcgccggcatgttcgccgacgtgccggcggaagacgtggtgatcgagaaggcagaagtggtctga

SEQ ID NO: 1469 - protein, 162 aa, Herbaspirillum seropedicae
MAVLLTTNHGTIKIELDAEKAPKTVENFLAYVNAGHYNGTIFHRVIDGFMIQGGGFEPGMKQKETREPIENEAKNGLKNEPYTLAMARTAAPHSASAQFFINVKNNSFLDYPGQDGWGYCVFGKVVEGTEVVDKIKGVKTTRAGMFADVPAEDVVIEKAEVV

SEQ ID NO: 1470 - DNA, 573 bp, Candidatus Kuenenia stuttgartiensis
  CDS (1)..(573): transl_table=11
ttgaaaacaatacttatttgtgctgccattgcaataacctgcttcatacaaaatgcccgggcaaatacggtttatccgaaagttttgctcgaaaccaatcagggagaaatagttctagagctttatcccgaaaaagccccggagacggtagaaaattttctcaaatatgtccgggatggtttttacaacggcacaatctttcatcgtgtaataaagggatttatgatacagggcgggggtatgaccgaaggtatgagtaagaaaaccacactggatcccgttaaaaatgaggcgtataacggactcaaaaatttgaggggtaccgtagcaatggcccgtacgatggacccgcactctgccactgcacagtttttcattaatacggtggataatggttttcttgattttaagggccaaactgcaacagggtggggatattgtgtctttggaaaagtgataaaaggcatggaagtggttgatgctattgaacaaatgcctaccacaaaaaaagagggacatagcgatgttccccgctctacagtagttctgaaaaaagccattgagataaaataa

SEQ ID NO: 1471 - protein, 190 aa, Candidatus Kuenenia stuttgartiensis
MKTILICAAIAITCFIQNARANTVYPKVLLETNQGEIVLELYPEKAPETVENFLKYVRDGFYNGTIFHRVIKGFMIQGGGMTEGMSKKTTLDPVKNEAYNGLKNLRGTVAMARTMDPHSATAQFFINTVDNGFLDFKGQTATGWGYCVFGKVIKGMEVVDAIEQMPTTKKEGHSDVPRSTVVLKKAIEIK

SEQ ID NO: 1472 - DNA, 549 bp, Pseudomonas citronellolis
  CDS (1)..(549): transl_table=11
atgaaaaaactattcctcgcaaccagtttggttttagcaagtggtcagttatttgcaaatacaattattgatatgaaaacctcaatggggaatattgaaattgaactttttaatgataaagcacccgtatcagcaaaaaattttgagaattatgtaaaaagtaacttttatgctggaaccatttttcatcgagtcatcccaggatttatgattcaaggtgggggaatggatgccaatatgattgagagggcaactaaatctccaattattaatgaggcaaataatggtctcaaaaatgcacggggaactttagcaatggcacgcacgagtgatcctaattctgccacgagtcaattttttattaatgttgctgataatagcttcttgaatcgttcagctatggatgcaggttatgccgtatttggtaaagtcaccaaaggaatgaatgttgttgataaaatcgtaaatgtgcctacaggtaattatggaatgcatcaaaatgtaccaaagcaaccgattaaaattatcagtgtgcaaataaagaaataa

SEQ ID NO: 1473 - protein, 182 aa, Pseudomonas citronellolis
MKKLFLATSLVLASGQLFANTIIDMKTSMGNIEIELFNDKAPVSAKNFENYVKSNFYAGTIFHRVIPGFMIQGGGMDANMIERATKSPIINEANNGLKNARGTLAMARTSDPNSATSQFFINVADNSFLNRSAMDAGYAVFGKVTKGMNVVDKIVNVPTGNYGMHQNVPKQPIKIISVQIKK

SEQ ID NO: 1474 - DNA, 567 bp, Acinetobacter sp
  CDS (1)..(567): transl_table=11
atgcttaaacgagtcgcgatagttctgggtggattattgattagtgcacatgctttagcaaataccatggttgagatgaaaaccaatctgggaaatatagaaattgagctttacaacaataaagcaccgatctcagcgaaaaactttgaaagctatgtcaaaaataatttctacaatggcactatttttcatcgcgtcattccaaatttcatgattcaaggaggtggttttgaaaccaatatgaaagagaaggcgactgctgcacctatcaaaaatgaggcgtcaaatggcttggcaaatactcgcggcacattggcaatggcaagaaccagtaatcccgattcagcaaccagccagttttttatcaatgttgcagataacaacttcttaaatgcttcacgtacagatgcaggttatgcagtatttggcaaggtaattaaaggcatggatgtcgtcgataaaattgcgaatgtacctacaagtacctatggtatgcatcaaaatgtacctaaacaacctgtgaaaattataagtgtacaaattaagagcattaatacagcaaaataa

SEQ ID NO: 1475 - protein, 188 aa, Acinetobacter sp
MLKRVAIVLGGLLISAHALANTMVEMKTNLGNIEIELYNNKAPISAKNFESYVKNNFYNGTIFHRVIPNFMIQGGGFETNMKEKATAAPIKNEASNGLANTRGTLAMARTSNPDSATSQFFINVADNNFLNASRTDAGYAVFGKVIKGMDVVDKIANVPTSTYGMHQNVPKQPVKIISVQIKSINTAK

SEQ ID NO: 1476 - DNA, 573 bp, Dickeya dadantii
  CDS (1)..(573): transl_table=11
atgtcaaaacgtatattggcaccggtagtaaccgtactctcgctgaccgcattttcaccggcttttgccgcaaccacgtccacccatgtgttgctgaccacctctgcgggcaacattgaactggctctggatgaccaaaaagcgccggttttcgtgaaaaactttgttgattatgtcaacagtgggttttacaacggcaccattttccaccgtgtcattccgggattcatggttcagggtggtggtttcagcagcgatatgaaacagaaagccaccaatccgccggtcaagaatgaagcggacaatggcctgcgtaacctgcgcggcaccatttccatggcgcgcaccagcgaaaaagacagcgctaccagccagttcttcatcaacgtcgcggacaacgcttttctggatcacggccagcgtgattttggctacgccgtattcggtaaagtggtgaaaggcatggaagtggctgacaagatttctcaggtccagacagaaaatgtagggccatatcagaacgtgccttccaaaccgattgtgattcagtcggcgaaaatcattaagaaataa

SEQ ID NO: 1477 - protein, 190 aa, Dickeya dadantii
MSKRILAPVVTVLSLTAFSPAFAATTSTHVLLTTSAGNIELALDDQKAPVFVKNFVDYVNSGFYNGTIFHRVIPGFMVQGGGFSSDMKQKATNPPVKNEADNGLRNLRGTISMARTSEKDSATSQFFINVADNAFLDHGQRDFGYAVFGKVVKGMEVADKISQVQTENVGPYQNVPSKPIVIQSAKIIKK

SEQ ID NO: 1478 - DNA, 564 bp, Pseudomonas aeruginosa
  CDS (1)..(564): transl_table=11
atgctcaaacgtctcctgatcgccgcctgcaccctgctcttcgccggttccctgctggccgccacgcctgccgccaagccgcacgtcctgatcgccaccagcctcggcgagatcgaggtagaactcgatccggccaaggcgccgatcagcgtgaagaacttcctcgagtacgtcgacagcggctactacgacggcaccctgttccaccgcgtgatcccgggcttcatggtgcagaccggcggcttcagcgccggcatgcaggagaagaagacccgtgcaccgatcaagaacgaggccgacaacggcctgctcaacgagcgcggcaccctcgccatggcccgtaccggagtggtcgattcggccaccagccagttcttcatcaacctgaccgacaacgacttcctcaaccatggtgcccgcgacttcggctatgccgtgttcggcaaggtggtgcgtggcatgggcgtggtcgaccagatcgccaaggttcccaccacccgccgcaacggcttcgccgacgtgccgagcgacgacgtggtgatcctgtccgccaaacgcctctga

SEQ ID NO: 1479 - protein, 187 aa, Pseudomonas aeruginosa
MLKRLLIAACTLLFAGSLLAATPAAKPHVLIATSLGEIEVELDPAKAPISVKNFLEYVDSGYYDGTLFHRVIPGFMVQTGGFSAGMQEKKTRAPIKNEADNGLLNERGTLAMARTGVVDSATSQFFINLTDNDFLNHGARDFGYAVFGKVVRGMGVVDQIAKVPTTRRNGFADVPSDDVVILSAKRL

SEQ ID NO: 1480 - DNA, 573 bp, Salmonella typhimurium
  CDS (1)..(573): transl_table=11
atgctcaaatcgactctggcggctgtcgcagctgttttcgctctttctgctctttctcccgcagcgttggcagcaaaaggcgatcctcatgtgctgttaaccacctccgccgggaatattgagctggagctgaacagccagaaagcgccggtttctgtgaaaaactttgtcgattacgtcaacagtggtttctataacaacactacgtttcaccgcgttattcctggctttatgattcagggtggtggttttaacgagcagatgcagcagaagaaaccgaatccgcctattaagaatgaagccgacaacggtctgcgtaatactcgcggcacgatcgcgatggcgcgcaccgcagataaagacagcgccaccagccagttctttattaacgtcgcggataacgcttttctcgaccacggccagcgcgactttggctatgcggtatttggtaaagtggtaaaaggtatggatgtcgccgataaaatctcacaggtaccgacgcacgatgtcgggccttatcagaatgtgccgacaaaaccagtcgttatcctttccgcgaaagtcctgccataa

SEQ ID NO: 1481 - protein, 190 aa, Salmonella typhimurium
MLKSTLAAVAAVFALSALSPAALAAKGDPHVLLTTSAGNIELELNSQKAPVSVKNFVDYVNSGFYNNTTFHRVIPGFMIQGGGFNEQMQQKKPNPPIKNEADNGLRNTRGTIAMARTADKDSATSQFFINVADNAFLDHGQRDFGYAVFGKVVKGMDVADKISQVPTHDVGPYQNVPTKPVVILSAKVLP

SEQ ID NO: 1482 - DNA, 495 bp, Escherichia coli
  CDS (1)..(495): transl_table=11
atggttactttccacaccaatcacggcgatattgtcatcaaaacttttgacgataaagcacctgaaacagttaaaaacttcctggactactgccgcgaaggtttttacaacaacaccattttccaccgtgttatcaacggctttatgattcagggcggcggttttgaaccgggcatgaaacaaaaagccaccaaagaaccgatcaaaaacgaagccaacaacggcctgaaaaatacccgtggtacgctggcaatggcacgtactcaggctccgcactctgcaactgcacagttcttcatcaacgtggttgataacgacttcctgaacttctctggcgaaagcctgcaaggttggggctactgcgtgtttgctgaagtggttgacggcatggacgtggtagacaaaatcaaaggtgttgcaaccggtcgtagcggtatgcaccaggacgtgccaaaagaagacgttatcattgaaagcgtgaccgttagcgagtaa

SEQ ID NO: 1483 - protein, 164 aa, Escherichia coli
MVTFHTNHGDIVIKTFDDKAPETVKNFLDYCREGFYNNTIFHRVINGFMIQGGGFEPGMKQKATKEPIKNEANNGLKNTRGTLAMARTQAPHSATAQFFINVVDNDFLNFSGESLQGWGYCVFAEVVDGMDVVDKIKGVATGRSGMHQDVPKEDVIIESVTVSE

SEQ ID NO: 1484 - DNA, 510 bp, Haemophilus influenzae
  CDS (1)..(510): transl_table=11
atggttacattacacacaaactttggcgacattaaaattaaattggattttgataaagctccagttacagcagaaaacttcttaaattactgcaaagacggtttttataataacacaatttttcatcgtgttattgatggctttatgattcaaggtggcggtatggaaagcggtatgcgcgaaaaagcaactaaagccccaatccaaaatgaagcgaacaatcgtttaagtaacaaacgtggaaccattgcaatggctcgcacttcagatccacattcagcgacagcacaatttttcattaacgtggcagacaatgatttcttaaattatcgttcaaaagaaatgtttggtcgcgaagtcgttcaagaatggggctatgcagtatttggcgaagtggttgaaggtatggatgttgtggataaaatcaaaaaagtgaaaacaggcaacaaaggctttcatcaagatgttccaactgaagatgtagtgattacatcggtttctattgagtaa

SEQ ID NO: 1485 - protein, 169 aa, Haemophilus influenzae
MVTLHTNFGDIKIKLDFDKAPVTAENFLNYCKDGFYNNTIFHRVIDGFMIQGGGMESGMREKATKAPIQNEANNRLSNKRGTIAMARTSDPHSATAQFFINVADNDFLNYRSKEMFGREVVQEWGYAVFGEVVEGMDVVDKIKKVKTGNKGFHQDVPTEDVVITSVSIE

SEQ ID NO: 1486 - DNA, 501 bp, Streptomyces antibioticus
  CDS (1)..(501): transl_table=11
atgtcgacagtcgagctgaacaccagcgccggccggatcgtgctggagctgaacgacgccgaggcgcccaagacggtcgagaacttcctggcgtatgtgcgcagcggccactacgacggcacgattttccaccgggtcatcagcgacttcatgatccagggcggtggcttcacgccggacatgcagcagaagtccaccctggcgccgatccagaacgaggccgacaacgggctgaggaacgacaactacaccgtggcgatggcgcggacgaacgacccgcactccgcgacggcccagttcttcatcaacgtcaaggacaacgcgttcctgaaccacacctccaagaccccgaacggctggggctacgccgtgttcggccgggtcaccgagggccaggacgtggtcgacgccatcaagggcgtgaagacgggcagcagcaggggtcaccaggacgttcccgtccagccggtggtcatcgagtccgccaagatcctgggctga

SEQ ID NO: 1487 - protein, 166 aa, Streptomyces antibioticus
MSTVELNTSAGRIVLELNDAEAPKTVENFLAYVRSGHYDGTIFHRVISDFMIQGGGFTPDMQQKSTLAPIQNEADNGLRNDNYTVAMARTNDPHSATAQFFINVKDNAFLNHTSKTPNGWGYAVFGRVTEGQDVVDAIKGVKTGSSRGHQDVPVQPVVIESAKILG

SEQ ID NO: 1488 - DNA, 483 bp, Glycine max
  CDS (1)..(483)
atgtcggtgactctgcacacaaacctaggcgacatcaagtgtgaaatcttctgcgacgaggtccctaaaacctccgagaattttttagcgctatgtgcaagtggttactatgatgggactatatttcaccgcaacattaagggttttatgattcaaggtggagatccaactggaactggcaaagggggaaccagtatatggggcaagaaatttaacgatgagataagagaatctctgaagcacaatgcaagaggaatattagcaatggccaatagtggtccaaatactaatggaagccaatttttcttgacttatgcaaagcagcctcatttaaatgggctatacaccgtgtttggcaaagtaattcatggatttgaagttcttgatctcatggagaagacacaaacaggggcaggggaccgaccgcttgcagagataaggctcaatcgtgtaacaatacatgctaatccacttgctggttag

SEQ ID NO: 1489 - protein, 160 aa, Glycine max
MSVTLHTNLGDIKCEIFCDEVPKTSENFLALCASGYYDGTIFHRNIKGFMIQGGDPTGTGKGGTSIWGKKFNDEIRESLKHNARGILAMANSGPNTNGSQFFLTYAKQPHLNGLYTVFGKVIHGFEVLDLMEKTQTGAGDRPLAEIRLNRVTIHANPLAG

SEQ ID NO: 1490 - DNA, 495 bp, Zea mays
  CDS (1)..(495)
atgtggggtagcaccgacggcggaacgccggaggtcaccctcgagacctccatgggcgctgtctctgttgagatgtactacaggcacgcgcccaagacttgccggaacttcgtcgagctcgcgcgacgtggctactacgacaacgttatcttccaccgcatcatcaaagatttcattgtgcaaggtggggatcctacaggaaccggcagaggtggcgagtccatctatggagcaaagtttgaggatgagataaagactgagttaaagcacactggggctggaattctgtccatggcaaacgctggcccaaacacgaatggaagccagttcttcataactcttgccccttgtcagtcacttgatgggaaacatacaatttttgggagggtatgcagaggaatggaaattgttaagcgccttggaagtgtgcagactgacaaaaatgataggcctatccatgaagtgaaaatcttgcgtgccgttgtcaaagactga

SEQ ID NO: 1491 - protein, 164 aa, Zea mays
MWGSTDGGTPEVTLETSMGAVSVEMYYRHAPKTCRNFVELARRGYYDNVIFHRIIKDFIVQGGDPTGTGRGGESIYGAKFEDEIKTELKHTGAGILSMANAGPNTNGSQFFITLAPCQSLDGKHTIFGRVCRGMEIVKRLGSVQTDKNDRPIHEVKILRAVVKD

SEQ ID NO: 1492 - DNA, 483 bp, Hordeum vulgare
  CDS (1)..(483)
atgtcggtgacgctgcacacgaacctgggggacatcaaggtggaggttttctgcgaccaggtgccgcggacggcggagaacttcctggccctgtgcgccagcggctactacgacgggacggtgttccaccgcaacatcaaggggttcatggtgcagggcggcgacccgacggggacgggcaagggcggggcgtccatctggggcggcaagttcgcggacgagttccgggaggcgctcaagcacggggcgaggggcaccctgtccatggccaactcggggcccaacaccaacggcagccagttcttcatcacctacgccaagcagccccacctcaacggccactacaccgtgttcgccaaggtcatccacggcttcgacgtgctcgacctcatggagaagacccccaccggccccgccgaccgccccctcgccgagatccgcctcaaccgcgtcaccgtccacgccaacccgctcgccggataa

SEQ ID NO: 1493 - protein, 160 aa, Hordeum vulgare
MSVTLHTNLGDIKVEVFCDQVPRTAENFLALCASGYYDGTVFHRNIKGFMVQGGDPTGTGKGGASIWGGKFADEFREALKHGARGTLSMANSGPNTNGSQFFITYAKQPHLNGHYTVFAKVIHGFDVLDLMEKTPTGPADRPLAEIRLNRVTVHANPLAG

SEQ ID NO: 1494 - DNA, 492 bp, Helianthus annuus
  CDS (1)..(492)
atgccaggcgcagaaggaggtccaccggaggtaactctcgaaacatccatgggctctttcaccgttgagatgtacgataagcacgcacctaggacttgcaaaaacttcattgaactgtctcgaaggggctactacaacaacgttaagtttcacagaatcattaaggattttattgttcaaggaggtgatcccactggcactggtagaggtggagaatctatttacggttcaaagtttgaggatgagatcaccccaaagttgaagcatacgggagctggtatcttatctatggctaatgctggtccgaatacaaatggaagtcagttctttatcacattggccccagcgcaatcgcttgatggaaagcacacgatatttggaagagtgtgcagaggaatggagattgtcaagagacttggtagtgttcagactgataataccgacaggccaattcatgacgtgaagatactacggacagcagttaaggattga

SEQ ID NO: 1495 - protein, 163 aa, Helianthus annuus
MPGAEGGPPEVTLETSMGSFTVEMYDKHAPRTCKNFIELSRRGYYNNVKFHRIIKDFIVQGGDPTGTGRGGESIYGSKFEDEITPKLKHTGAGILSMANAGPNTNGSQFFITLAPAQSLDGKHTIFGRVCRGMEIVKRLGSVQTDNTDRPIHDVKILRTAVKD

SEQ ID NO: 1496 - DNA, 483 bp, Brassica napus
  CDS (1)..(483)
atgtcagtaacattgcacacgaatctgggggatataaagtgcgagatcttctgtgacgaggttcccaagagtgccgagaactttctggcgctatgtgcaagtgagtattacgatgggacaatctttcacaggaatatcaaaggcttcatgattcaaggcggagacccaaccggaactgggaaaggaggaactagcatctggggaaagaaattcaatgacgagattcgtgactccctcaagcacaatgcaagagggatgctgtcgatggcaaacagtggcccaaacacaaacggaagccagttcttcattacctatgcaaaacaacctcatctcaatggactatacaccatctttggcaaagtcattcatggcttcgaagtacttgacatcatggaaaagactcaaacaggtgcgggagataggccgcttgctgagataaggctaaaccgtgtgacaatccacgccaatccacttgctggttaa

SEQ ID NO: 1497 - protein, 160 aa, Brassica napus
MSVTLHTNLGDIKCEIFCDEVPKSAENFLALCASEYYDGTIFHRNIKGFMIQGGDPTGTGKGGTSIWGKKFNDEIRDSLKHNARGMLSMANSGPNTNGSQFFITYAKQPHLNGLYTIFGKVIHGFEVLDIMEKTQTGAGDRPLAEIRLNRVTIHANPLAG

SEQ ID NO: 1498 - DNA, 495 bp, Brassica napus
  CDS (1)..(495)
atgacggcgagacctgaaggaagtcccccggaggttacacttgaaacctccatgggtccgttcaccgtcgagatgtattacaaacactccccgagaacttgccggaacttcgtggagctatcaaggagaggttactatgacaacgttctctttcacaggatcatcaaggatttcatcgtgcaaggtggagatcctactggaactggaaggggtggccaatccatttacggttccaagtttgaggacgagataaagcctgagttgaagcacacaggagctgggattttgtcaatggcaaacgctggtcccaacaccaacgggagtcagttcttcatcactttagctccggcaccgtccttggatggaaagcacacgatatttggcagagtatgccgtggtatggaggtgatcaagaggctcggtagtgtccaaaccgataacaccgacaggccaatccatgaagtgaagattctgagggccaaagtggttgattag

SEQ ID NO: 1499 - protein, 164 aa, Brassica napus
MTARPEGSPPEVTLETSMGPFTVEMYYKHSPRTCRNFVELSRRGYYDNVLFHRIIKDFIVQGGDPTGTGRGGQSIYGSKFEDEIKPELKHTGAGILSMANAGPNTNGSQFFITLAPAPSLDGKHTIFGRVCRGMEVIKRLGSVQTDNTDRPIHEVKILRAKVVD

SEQ ID NO: 1500 - DNA, 483 bp, Brassica napus
  CDS (1)..(483)
atgtcagtaacattgcacacgaatctgggggatataaagtgcgagatcttctgtgacgaggttcccaagagtgccgagaactttctggcgctatgtgcaagtgggtattacgatgggacaatctttcacaggaatatcaaaggcttcatgattcaaggcggagacccaaccggaactgggaaaggaggaactagcatctggggaaagaaattcaatgacgagattcgtgactcccttaagcacaatgcaagagggatgctgtcgatggcaaacagtggaccaaacacaaacggaagccagttcttcataacctatgcaaaacaacctcatctcaatggactatacaccatctttggcaaagtcattcatggcttcgaagtgcttgacatcatggaaaagactcaaacaggtgcgggagataggccgcttgctgagataaggctaaaccgtgtgacaatccacgccaatccacttgctggttaa

SEQ ID NO: 1501 - protein, 160 aa, Brassica napus
MSVTLHTNLGDIKCEIFCDEVPKSAENFLALCASGYYDGTIFHRNIKGFMIQGGDPTGTGKGGTSIWGKKFNDEIRDSLKHNARGMLSMANSGPNTNGSQFFITYAKQPHLNGLYTIFGKVIHGFEVLDIMEKTQTGAGDRPLAEIRLNRVTIHANPLAG

SEQ ID NO: 1502 - DNA, 537 bp, Helianthus annuus
  CDS (1)..(537)
atgagcttcgcaaacttcccaacatctccgctactgcaatcgaccatgccaggcgcagaaggaggtccaccggaggtaactctcgaaacatccatgggctctttcaccgttgagatgtacgataagcacgcacctaggacttgcaaaaacttcattgaactgtctcgaaggggctactacaacaacgttaagtttcacagaatcattaaggattttattgttcaaggaggggatcccactggcactggtagaggtggagaatctatttacggctcaaagtttgaggatgagatcaccccaaagttgaagcatacgggagctggtatcttatctatggctaatgctggcccgaatacaaatggaagtcagttctttatcacattggccccagcgcaatcgcttgatggaaagcacacgatatttggaagagtgtgcagaggaatggagattgtcaagagacttggtagtgttcagactgataataccgacaggccaattcatgacgtgaagatactacggacagcagttaaggattga

SEQ ID NO: 1503 - protein, 178 aa, Helianthus annuus
MSFANFPTSPLLQSTMPGAEGGPPEVTLETSMGSFTVEMYDKHAPRTCKNFIELSRRGYYNNVKFHRIIKDFIVQGGDPTGTGRGGESIYGSKFEDEITPKLKHTGAGILSMANAGPNTNGSQFFITLAPAQSLDGKHTIFGRVCRGMEIVKRLGSVQTDNTDRPIHDVKILRTAVKD

SEQ ID NO: 1504 - DNA, 486 bp, Helianthus annuus
  CDS (1)..(486)
atgtcggttactcttcacactaatctcggagacatcaagtgcgaaatcgcctgtgatgaagtgcctaaggcatcagagaattttcttgcattatgtgcaagcggatactatgatggcaccattttccacagaaacataaagggatttatgatccaaggcggagatcccactgggactggcaaaggagggacaagtatttggggcaaaaagttcaatgatgagatacgtgagtctctcaagcacaatgccagaggggtgctatcaatggctaatagtgggcccaacaccaatgggagccaattcttcattacttatgctaaacaaccacatctcaatggggtatatactatctttggcaaagtaattcatgggtttgaagttcttgatctcatggaaaagactccaacagcaggagctggggaccggccactggcggagattaggattaaccgtataacaattcattctaatccactagctggctag

SEQ ID NO: 1505 - protein, 161 aa, Helianthus annuus
MSVTLHTNLGDIKCEIACDEVPKASENFLALCASGYYDGTIFHRNIKGFMIQGGDPTGTGKGGTSIWGKKFNDEIRESLKHNARGVLSMANSGPNTNGSQFFITYAKQPHLNGVYTIFGKVIHGFEVLDLMEKTPTAGAGDRPLAEIRINRITIHSNPLAG

SEQ ID NO: 1506 - DNA, 495 bp, Linum usitatissimum
  CDS (1)..(495)
atgtggaaagccgccgatggaggagcacctgaggtgactctggagacttccatgggagctttcaccgttgagttgtactacaagcacgctccaaagacttgcaggaacttcattgagctgtccaggagaggatactacgacaatgtgaaattccaccggattatcaaggatttcatagtgcaaggtggggatccgacggggacaggaagaggtggagagtctatattcggaaagaagtttgaggacgagataaagaaggagttgaagcacactggggctgggattctatccatggcaaatgctggtcctgatacaaatggaagccagttcttcattacattggcgccatgcctttcactagatgggaaacatactattttcggaagagtatgctcagggatggagataatcaaaagacttgggagcgtccaaactgataacagtgacaggcccattcatgacgtgaagatactaaggacgtctgtcaaagattaa

SEQ ID NO: 1507 - protein, 164 aa, Linum usitatissimum
MWKAADGGAPEVTLETSMGAFTVELYYKHAPKTCRNFIELSRRGYYDNVKFHRIIKDFIVQGGDPTGTGRGGESIFGKKFEDEIKKELKHTGAGILSMANAGPDTNGSQFFITLAPCLSLDGKHTIFGRVCSGMEIIKRLGSVQTDNSDRPIHDVKILRTSVKD

SEQ ID NO: 1508 - DNA, 483 bp, Zea mays
  CDS (1)..(483)
atgtcggtgacgctgcacacgaacctgggcgacatcaagtgcgaggtgttctgcgaccaggtgccgcgcacggcggagaacttcctggcgctctgcggcagcggctactacgacggcaccgtgttccaccgcaacatcaagggcttcatggtccagggcggcgaccccaccggcaccggcaagggcgggtcgtccatctggggcgccaagttcgcggacgagttgagggagtcgctcaagcacaacgcgcgcgggatcatgtcgatggccaacagcgggcccaacaccaacggcagccagttcttcatcacctacgccaagcagccgcacctcaacggtcactacaccgtgttcgccaaggtcatccacggcttcgaggtgctggacctcatggagaaggcgcagacgggacccggggacaggccgctcgccgagatcaggctcaaccgcgtcaccatccacgccaacccgctcgccgtctga

SEQ ID NO: 1509 - protein, 160 aa, Zea mays
MSVTLHTNLGDIKCEVFCDQVPRTAENFLALCGSGYYDGTVFHRNIKGFMVQGGDPTGTGKGGSSIWGAKFADELRESLKHNARGIMSMANSGPNTNGSQFFITYAKQPHLNGHYTVFAKVIHGFEVLDLMEKAQTGPGDRPLAEIRLNRVTIHANPLAV

SEQ ID NO: 1510 - DNA, 483 bp, Zea mays
  CDS (1)..(483)
atgtcggtgacgctgcacacgaacctgggcgacatcaagtgcgaggtgttctgcgaccaggtgccgcgcacggcggagaacttcctggcgctctgcggcagcggctactacgacggcaccgtgttccaccgcaacatcaagggcttcatggtccagggcggcgaccccaccggcaccggcaagggcgggtcgtccatctggggcggcaagttcgcggacgagttgagggagtcgctcaagcacaacgcgcgcgggatcatgtcgatggccaacagcgggcccaacaccaacggcagccagttcttcatcacctacgccaagcagccgcacctcaacggccactacaccgtgttcgccaaggtcatccacggcttcgaggtgctggacctcatggagaaggcgcagacgggacccggggacaggccgctcgccgagatcaggctcaaccgcgtcaccatccacgccaacccgctcgccgtctga

SEQ ID NO: 1511 - protein, 160 aa, Zea mays
MSVTLHTNLGDIKCEVFCDQVPRTAENFLALCGSGYYDGTVFHRNIKGFMVQGGDPTGTGKGGSSIWGGKFADELRESLKHNARGIMSMANSGPNTNGSQFFITYAKQPHLNGHYTVFAKVIHGFEVLDLMEKAQTGPGDRPLAEIRLNRVTIHANPLAV

SEQ ID NO: 1512 - DNA, 483 bp, Zea mays
  CDS (1)..(483)
atgtcggtgacgctgcacacgaacctgggcgacatcaagtgcgaggtgttctgcgaccaggtgccccgcacggcggagaacttcctggccctctgcgccagcggctactacgacggcaccgtgttccaccgaaacatcaagggcttcatgatccagggcggcgaccccaccggctccggcaagggcggctcctccatctggggcaccaagttcgcggacgagttcagggagtccctcaagcacaacgcacgggggatcatgtcgatggccaacaacgggcccaacaccaacggcagccagttcttcatcacctacgccaagcagccgcacctcaacggccactacaccgtgttcgccaaggtcatccacggcttcgaggtgctggacctcatggagaaggcgcagacgggacccggggacaggccgctcgccgagatcaggctcaaccgcgtcaccatccacgccaacccgctagccgtctga

SEQ ID NO: 1513 - protein, 160 aa, Zea mays
MSVTLHTNLGDIKCEVFCDQVPRTAENFLALCASGYYDGTVFHRNIKGFMIQGGDPTGSGKGGSSIWGTKFADEFRESLKHNARGIMSMANNGPNTNGSQFFITYAKQPHLNGHYTVFAKVIHGFEVLDLMEKAQTGPGDRPLAEIRLNRVTIHANPLAV

SEQ ID NO: 1514 - DNA, 21 bp, Artificial sequence
  primer
atgttcaaatcgaccctggcg

SEQ ID NO: 1515 - DNA, 23 bp, Artificial sequence
  primer
ttacggcaggactttagcggaaa

SEQ ID NO: 1516 - protein, 178 aa, Artificial sequence
  consensus sequence
  Variant (2)..(3): Xaa in position 2 to 3 is any amino acid
  Variant (4)..(11): Xaa in position 4 to 11 is any or no amino acid
  Variant (13)..(13): Xaa in position 13 is any amino acid
  Variant (15)..(17): Xaa in position 15 to 17 is any amino acid
  Variant (19)..(22): Xaa in position 19 to 22 is any amino acid
  Variant (25)..(28): Xaa in position 25 to 28 is any amino acid
  Variant (31)..(32): Xaa in position 31 to 32 is any amino acid
  Variant (34)..(36): Xaa in position 34 to 36 is any amino acid
  Variant (38)..(38): Xaa in position 38 is any amino acid
  Variant (40)..(41): Xaa in position 40 to 41 is any amino acid
  Variant (43)..(43): Xaa in position 43 is any amino acid
  Variant (49)..(50): Xaa in position 49 to 50 is any amino acid
  Variant (53)..(53): Xaa in position 53 is any amino acid
  Variant (58)..(64): Xaa in position 58 to 64 is any amino acid
  Variant (65)..(66): Xaa in position 65 to 66 is any or no amino acid
  Variant (68)..(72): Xaa in position 68 to 72 is any amino acid
  Variant (73)..(74): Xaa in position 73 to 74 is any or no amino acid
  Variant (76)..(76): Xaa in position 76 is any amino acid
  Variant (79)..(80): Xaa in position 79 to 80 is any amino acid
  Variant (84)..(84): Xaa in position 84 is any amino acid
  Variant (86)..(88): Xaa in position 86 to 88 is any amino acid
  Variant (90)..(90): Xaa in position 90 is any amino acid
  Variant (96)..(97): Xaa in position 96 to 97 is any amino acid
  Variant (99)..(99): Xaa in position 99 is any amino acid
  Variant (102)..(103): Xaa in position 102 to 103 is any amino acid
  Variant (109)..(111): Xaa in position 109 to 111 is any amino acid
  Variant (113)..(114): Xaa in position 113 to 114 is any amino acid
  Variant (116)..(117): Xaa in position 116 to 117 is any amino acid
  Variant (118)..(131): Xaa in position 118 to 131 is any or no amino acid
  Variant (134)..(134): Xaa in position 134 is any amino acid
  Variant (138)..(138): Xaa in position 138 is any amino acid
  Variant (140)..(141): Xaa in position 140 to 141 is any amino acid
  Variant (143)..(148): Xaa in position 143 to 148 is any amino acid
  Variant (150)..(153): Xaa in position 150 to 153 is any amino acid
  Variant (155)..(158): Xaa in position 155 to 158 is any amino acid
  Variant (159)..(170): Xaa in position 159 to 170 is any or no amino acid
  Variant (173)..(177): Xaa in position 173 to 177 is any amino acid
TXXXXXXXXXXGXIXXXLXXXXAPXXXXNFXXYXXXGXYXXTXFHRVIXXFMXQGGGXXXXXXXXXKXXXXXXXIXNEXXNGLXNXXXTXAMARTXXPXSAXXQFFINXXXNXXLXXXXXXXXXXXXXXXXGYXVFGXVXXGXXXXXXIXXXXTXXXXXXXXXXXXXXXXVPXXXXXI

SEQ ID NO: 1517 - protein, 34 aa, Artificial sequence
  protein pattern
  Variant (2)..(2): Xaa in position 2 is any amino acid
  Variant (3)..(3): Xaa in position 3 is Ser or Thr
  Variant (4)..(4): Xaa in position 4 is Ala, Ser, Thr or Val
  Variant (5)..(5): Xaa in position 5 is any amino acid
  Variant (7)..(7): Xaa in position 7 is Phe or Val
  Variant (8)..(9): Xaa in position 8 to 9 is any amino acid
  Variant (11)..(11): Xaa in position 11 is Ala, Cys, Ser, Thr or Val
  Variant (12)..(15): Xaa in position 12 to 15 is any amino acid
  Variant (16)..(16): Xaa in position 16 is Phe or Tyr
  Variant (17)..(20): Xaa in position 17 to 20 is any amino acid
  Variant (26)..(27): Xaa in position 26 to 27 is any amino acid
  Variant (29)..(29): Xaa in position 29 is Met or Val
  Variant (30)..(30): Xaa in position 30 is Ala, Ile or Val
  Variant (32)..(32): Xaa in position 32 is any or no amino acid
PXXXXNXXXYXXXXXXXXXXFHRVIXXFXXQXGG

SEQ ID NO: 1518 - protein, 22 aa, Artificial sequence
  protein pattern
  Variant (2)..(5): Xaa in position 2 to 5 is any amino acid
  Variant (8)..(8): Xaa in position 8 is Ser or Thr
  Variant (9)..(9): Xaa in position 9 is any amino acid
  Variant (15)..(17): Xaa in position 15 to 17 is any amino acid
  Variant (19)..(20): Xaa in position 19 to 20 is any amino acid
  Variant (22)..(22): Xaa in position 22 is Asp or Asn
TXXXXSAXXQFFINXXXNXXLX

SEQ ID NO: 1519 - protein, 13 aa, Artificial sequence
  protein pattern
  Variant (3)..(3): Xaa in position 3 is Ala or Cys
  Variant (6)..(6): Xaa in position 6 is Ala or Gly
  Variant (7)..(7): Xaa in position 7 is any amino acid
  Variant (9)..(10): Xaa in position 9 to 10 is any amino acid
  Variant (12)..(12): Xaa in position 12 is any amino acid
  Variant (13)..(13): Xaa in position 13 is Asp, Glu, Gly, Gln or Ser
GYXVFXXVXXGXX

SEQ ID NO: 1520 - protein, 15 aa, Artificial sequence
  protein pattern
  Variant (2)..(2): Xaa in position 2 is any amino acid
  Variant (3)..(3): Xaa in position 3 is any or no amino acid
  Variant (5)..(5): Xaa in position 5 is any amino acid
  Variant (7)..(9): Xaa in position 7 to 9 is any amino acid
  Variant (10)..(10): Xaa in position 10 is Ser or Thr
  Variant (11)..(11): Xaa in position 11 is Ile, Leu or Val
NXXLXNXXXXXAMAR

SEQ ID NO: 1521 - DNA, 864 bp, Escherichia coli
  CDS (1)..(864): transl_table=11
atgatccgcagtatgaccgcctacgcccggcgtgaaatcaagggtgaatgggggagcgcaacctgggaaatgcgctcggtaaaccagcgttatctggaaacttactttcgtctgccggagcagttccgtagccttgaacctgtcgttcgcgagcgtattcgttctcgcctgacgcgcggtaaagtggaatgtaccctgcgctatgagccagatgttagcgcgcaaggtgagctgatcctcaacgaaaaactggctaaacagctggtaactgccgcgaactgggtaaaaatgcagagtgacgaaggggaaatcaacccggttgatattctacgctggccgggcgtgatggcagcccaggagcaggatcttgacgccattgccgctgaaattctcgcggcgctggatggtacgctggacgactttattgtcgcgcgcgaaaccgaaggtcaggcactgaaagcattgatcgagcagcgtctggaaggcgtcaccgccgaagtggtcaaagtccgctcccatatgccggaaatcctgcaatggcagcgtgagcgtctggtcgcgaagctggaagatgctcaggtgcaactggaaaacaaccgtctggagcaggaactggttctgctggcacaacgaattgacgttgccgaagaactggatcgcctcgaagcgcatgtcaaagagacctacaacattctgaagaaaaaagaagcggttggtcgtcgtctggattttatgatgcaggagttcaaccgcgagtcgaacactcttgcgtcgaagtctatcaatgccgaagtgacaaactccgccatcgagctgaaagtgttgattgagcagatgcgcgagcagattcagaacatcgaataa

SEQ ID NO: 1522 - protein, 287 aa, Escherichia coli
MIRSMTAYARREIKGEWGSATWEMRSVNQRYLETYFRLPEQFRSLEPVVRERIRSRLTRGKVECTLRYEPDVSAQGELILNEKLAKQLVTAANWVKMQSDEGEINPVDILRWPGVMAAQEQDLDAIAAEILAALDGTLDDFIVARETEGQALKALIEQRLEGVTAEVVKVRSHMPEILQWQRERLVAKLEDAQVQLENNRLEQELVLLAQRIDVAEELDRLEAHVKETYNILKKKEAVGRRLDFMMQEFNRESNTLASKSINAEVTNSAIELKVLIEQMREQIQNIE

SEQ ID NO: 1523 - DNA, 864 bp, Salmonella typhimurium LT2
  CDS (1)..(864): transl_table=11
atgatccgcagtatgaccgcctacgcccggcgtgaaatcaagggtgaatggggtagcgcgacctgggaaatgcgctcggtaaaccagcgttatctggaaacttactttcgtctgccggaacagttccgtagtcttgaacccgtcgtgcgcgaacgcattcgtacacgcctgacgcgcggcaaagtcgaatgtatgctgcgttttgaacccgatgccagcgcgcaaggcgagcttattctgaatgaaaagctagcgaaacaattagttagcgccgcaaactgggtcaaaatgcagagcgacgaaggggaaatcaatccggttgatattttgcgctggccaggtgtcatggcggcgcaagagcaggatctggacgcgattgccgcagaaattttagccgcactggacggtacgctggatgactttatcgtcgcgcgcgaaacggaaggccaggcgctgaaagcgctgattgaacaacggctggaaggcgtcagcgccgaagtagcgaaagtccgcgcgcatatgccggaaatcctgcaatggcagcgtgagcgcctggtcgcgaagctggaagatgctcaggttcagttggaaaacaaccgtctggagcaagagctggtgatgatggcgcaacgcattgatgtggcggaagagctggatcgtctggaagcgcacgtcaaagagacttacaacattctgaagaaaaaagaggcggtaggtcgccgtctggacttcatgatgcaagaatttaaccgtgagtcgaacaccctggcctccaaatccatcaacgctgatgtaactaactccgctattgaattaaaagtgttgatcgagcaaatgcgcgagcaaatccagaatattgaataa

SEQ ID NO: 1524 - protein, 287 aa, Salmonella typhimurium LT2
MIRSMTAYARREIKGEWGSATWEMRSVNQRYLETYFRLPEQFRSLEPVVRERIRTRLTRGKVECMLRFEPDASAQGELILNEKLAKQLVSAANWVKMQSDEGEINPVDILRWPGVMAAQEQDLDAIAAEILAALDGTLDDFIVARETEGQALKALIEQRLEGVSAEVAKVRAHMPEILQWQRERLVAKLEDAQVQLENNRLEQELVMMAQRIDVAEELDRLEAHVKETYNILKKKEAVGRRLDFMMQEFNRESNTLASKSINADVTNSAIELKVLIEQMREQIQNIE

SEQ ID NO: 1525 - DNA, 864 bp, Shewanella oneidensis MR-1
  CDS (1)..(864): transl_table=11
atgatccaaagcatgacagcctacgctcgcattgagcacaaagcacaatggggcactgcctcttgggaaattcgctcagttaaccagcgttatctcgaaacttaccttcgcctacccgaacaatttcgcagttttgagccagtgctgcgcgatcgcctacgcaaccgcttaagccgcggtaaagttgaggtgaacttacgctacgagttagccgacaatagcaataacgaacttaaattaaatcaagggttagccaaacagctgctcgacgctgccagttggctcaaacaagaagccggacaaggcgaagtcaacctcaccgatattttgcgctggccaggtgtactctcgagtgctgagcaagatatggacgcaattggcgccgatttaatgaccgcatttgacttagctatcgaccaatttatcgaagcccgtggccgtgagggcgcagccatcaaagacatgctgctaagtcgtttagatggcgtcagcgagcaaatcgccatcgtgcgtgagcatatgcctaaagtcatggaatatcagcgtgataaactcaccaaccgcctcgctgaaattaagggtgagctcgatcctgctcgcatcgagcaagaaatgattcttttagcccaaaaacaagatgtcgccgaagaaatggacagactcgaagcccacgttaacgaagcccgtcgcatcctcaaaaaaggcggcagtgaaggtcgtcgtttagattttatgatgcaagaatttaaccgcgaatcgaacaccctagcctctaaatccatcagcaccgaaatcacagccgccgcggttgatcttaaagttcttatcgagcagatgagagagcagatccagaatgtggaataa

SEQ ID NO: 1526 - protein, 287 aa, Shewanella oneidensis MR-1
MIQSMTAYARIEHKAQWGTASWEIRSVNQRYLETYLRLPEQFRSFEPVLRDRLRNRLSRGKVEVNLRYELADNSNNELKLNQGLAKQLLDAASWLKQEAGQGEVNLTDILRWPGVLSSAEQDMDAIGADLMTAFDLAIDQFIEARGREGAAIKDMLLSRLDGVSEQIAIVREHMPKVMEYQRDKLTNRLAEIKGELDPARIEQEMILLAQKQDVAEEMDRLEAHVNEARRILKKGGSEGRRLDFMMQEFNRESNTLASKSISTEITAAAVDLKVLIEQMREQIQNVE

SEQ ID NO: 1527 - DNA, 864 bp, Photobacterium profundum SS9
  CDS (1)..(864): transl_table=11
atgattcatagcatgaccgcttatgctcgtcgcgaaattaaaggcgattggggcactgccgtttgggaaattcgttcagttaaccaacgttacctagaaacctaccttcgcatgccagagcaattccgtagtttagagcctgtactacgtgagcgttttcgtaagcgcctagcccgcggtaaagttgaatgtaacctgcgttttgaagcgaaccaagcagcaagcagcgaactcaccatcaatgaagaattagccaagcaagtcattaaagccgctaagtgggtaaaagacacggcgggtgaaggcaacattggtccttttcaggtattgaactggcctggtgtaatggaagcccctgagcaagatttggatgcgatcaataaagatttattggttggttttgatgaagcgattgctgactttattgccgcacgtgcaagcgaaggcgaaaacatgaaggaattgattgttcaacgccttgatgccattaccgctgaagcaaccaacgtacgcgcacaaatgcctgacattattaaatggcaacgtgaacgtctaaccagccgctttgaagatgcaaaagtggagctggatgctggtcgtattgagcaagagctgatcatgatggcacaaaaaagtgatgtcgctgaagagctagatcgcctagattcgcatgtgaaagaaacacaaaaaatcatgaagaaaggaggcgcatgtggccgtcgtcttgatttcatgatgcaagaattcaaccgcgaatcgaatacgctagcatcaaaatcaatcacgactgaaatcacagcatctgctgttgaattaaaagtattgattgagcaaatgcgcgagcagatccaaaacatcgaataa

SEQ ID NO: 1528 - protein, 287 aa, Photobacterium profundum SS9
MIHSMTAYARREIKGDWGTAVWEIRSVNQRYLETYLRMPEQFRSLEPVLRERFRKRLARGKVECNLRFEANQAASSELTINEELAKQVIKAAKWVKDTAGEGNIGPFQVLNWPGVMEAPEQDLDAINKDLLVGFDEAIADFIAARASEGENMKELIVQRLDAITAEATNVRAQMPDIIKWQRERLTSRFEDAKVELDAGRIEQELIMMAQKSDVAEELDRLDSHVKETQKIMKKGGACGRRLDFMMQEFNRESNTLASKSITTEITASAVELKVLIEQMREQIQNIE

SEQ ID NO: 1529 - DNA, 864 bp, Idiomarina loihiensis L2TR
  CDS (1)..(864): transl_table=11
atgattcaaagtatgaccggttatgctcgttacgagcaaaaagccgactggggcaccgcagtttgggaaattcgttccgttaaccaacggtatctggaaacctacttccgcctgccggaaacctttcgctctctggaaaattcactacgtgagcagtttcgtaaaaagctgcagcgcggcaaagtcgagtgcaagcttagcctgcaggtagacgaagcgcagcaaagcgctttgtcgattaacgaagacctggcaaaaagcgtgattgccagcgccaagtgggtgagtcagcattccgctgcagggcagttaaaccctattgatgttttaaagtggcctggcgttgttgctgctcaggaccaggacatggacgagctgcaaaaagacgttttggccgcactggaaaagaccactaacgactttatcgagaaccgcaaaagcgaaggcgcagccattgataaaatgctgcaggaacgcctcgacggtgtgaccacgcaggtggcttttgtgcgtgagcgcatgccggaagtgatggcctggcaacgtgagcgcttactaacccgttttgaagaagctaaagttgagttagagccgcagcgcgtagagcaggaaatggtgatgctggcgcagaaaaccgacgtagccgaagagctcgaccgcttagacgcccacgtggaagaagcccgcaaaatactgaaaaaaggcggcccttgcggacgacgcctggactttatgatgcaagagttcaaccgcgaagcaaatacactcgcctctaagtctatcaactctgacattaccgcggctgcggtggaattaaaggttttgattgagcagatgcgtgagcagatccagaacatcgaataa

SEQ ID NO: 1530 - protein, 287 aa, Idiomarina loihiensis L2TR
MIQSMTGYARYEQKADWGTAVWEIRSVNQRYLETYFRLPETFRSLENSLREQFRKKLQRGKVECKLSLQVDEAQQSALSINEDLAKSVIASAKWVSQHSAAGQLNPIDVLKWPGVVAAQDQDMDELQKDVLAALEKTTNDFIENRKSEGAAIDKMLQERLDGVTTQVAFVRERMPEVMAWQRERLLTRFEEAKVELEPQRVEQEMVMLAQKTDVAEELDRLDAHVEEARKILKKGGPCGRRLDFMMQEFNREANTLASKSINSDITAAAVELKVLIEQMREQIQNIE

SEQ ID NO: 1531 - DNA, 864 bp, Actinobacillus pleuropneumoniae serovar 1 str. 4074
  CDS (1)..(864): transl_table=11
atgatttacagtatgaccgctttcgcccatttagaaattaaaaaagagtggggtaatgccgtgtgggaaatccgctcggttaatcaacgttttttagagacctattttcgtttaccggagcaattccgtaatttagaaatgaccttacgcgagcgtttacgtgcatcacttacacgcggaaaagtagaatgtagtttacgtatcgaattaagcaataaccaaaatagtgaattggcattaaataaagcgtatgcggaaaaggtaatcagctcattacaaaccttgcgaggcattgctggtgagggtgagatcaacttagtggatattttacgttatccgggggtggttgatgctcaaacacaagatttggatcaaatcgggcaagacctgttagccggtttcgaacaaattttagcggactttattgcgatgcgtggtcgtgaaggtgccaatttacaagcattgatccaacagcgattagatacgattgccgagatcgcaaccaaagtacaagcgcaaatgccggaaattctgcaatggcagaaagataaattacaacaacgttttgatgagctgaatttgcaattagatccgcaacgtttagagcaagaaatggtgttaaccgcacagcgtgtggatgtggcggaagaattagaccgcttgcaattacacgtgaaagaaacgactaacgtcttgaaaaaaggcggagcggtaggtcgtaaattggactttatgatgcaagagctaaatcgtgaatccaatacgttggcatcaaaatctattaatgcggacgtaaccaattcagcggttgaattaaaagtattaatcgaacaaatgcgtgagcaaattcagaatttagagtag

SEQ ID NO: 1532 - protein, 287 aa, Actinobacillus pleuropneumoniae serovar 1 str. 4074
MIYSMTAFAHLEIKKEWGNAVWEIRSVNQRFLETYFRLPEQFRNLEMTLRERLRASLTRGKVECSLRIELSNNQNSELALNKAYAEKVISSLQTLRGIAGEGEINLVDILRYPGVVDAQTQDLDQIGQDLLAGFEQILADFIAMRGREGANLQALIQQRLDTIAEIATKVQAQMPEILQWQKDKLQQRFDELNLQLDPQRLEQEMVLTAQRVDVAEELDRLQLHVKETTNVLKKGGAVGRKLDFMMQELNRESNTLASKSINADVTNSAVELKVLIEQMREQIQNLE

SEQ ID NO: 1533 - DNA, 873 bp, Azotobacter vinelandii
  CDS (1)..(873): transl_table=11
atggacaccatggcgcacagcatgactgccttcgcccgcgtcgagcgggccggcgcccacggcaccctgagctgggaactgcgctcggtcaatcatcgctacctcgaaccgcacctgcgtctgccggaggccttcctcgatctcgagggcgccctgcgcgacgccctgcgccaggggctttcccgcggcaaggtcgaatgcaccctgcgcttcgacgaaggcagcgccggacagccgttgcagatcgaccgcgaacgtgccagccaactggtggccgccgccgaggacatcgccgccctgatccgccagccggccccgatcgaccccttcgacgtgctggcttggcccggcgtgctggtggccgatgccgccgatcaccagcgcctcagcgccgaagccctgagcctgttcgacgaggccctggcccagctcaaggccggccgcgcccgcgaaggcgcggaactggcccggttgctcgaggaacgcctggacgccatgctccaggaggtcgagaacctgcgccagttggtcccgcagatgctcgccaaccagcgccagaagatcctcgaccgtttccgcgacacgcagctggaactggacccgctacgcctcgaacaggaactggtgctgctcgcccagaagagcgacgcggccgaggaactggatcgcctctgcacccacatcgccgaggtccgccgcgtgctcaaggacagcggcacggtcggccgccggctggacttcctgatgcaggaactcaaccgcgaggccaacacccttggctccaaggccttcgatccccgctccacgcagaccgcggtcaacctcaaggtattgatcgaacagatgcgcgagcaggtacagaacatcgagtga

SEQ ID NO: 1534 - protein, 290 aa, Azotobacter vinelandii
MDTMAHSMTAFARVERAGAHGTLSWELRSVNHRYLEPHLRLPEAFLDLEGALRDALRQGLSRGKVECTLRFDEGSAGQPLQIDRERASQLVAAAEDIAALIRQPAPIDPFDVLAWPGVLVADAADHQRLSAEALSLFDEALAQLKAGRAREGAELARLLEERLDAMLQEVENLRQLVPQMLANQRQKILDRFRDTQLELDPLRLEQELVLLAQKSDAAEELDRLCTHIAEVRRVLKDSGTVGRRLDFLMQELNREANTLGSKAFDPRSTQTAVNLKVLIEQMREQVQNIE

SEQ ID NO: 1535 - DNA, 864 bp, Haemophilus influenzae
  CDS (1)..(864): transl_table=11
atgatttacagtatgactgcctttgcacgccttgaagtgaaaaaagattggggtgatgcggtatgggaaattcgttccgttaatcaacgttatttagaaaactttttccgtttgcccgagcaatttcgcggattagaaaacacgttgcgtgagaaacttcgtcaaaatcttactcgcggtaaaattgaatgttctctacgcattgaaacaaaaaaacaagcaaatgcagaattgaatttaaataaagaacttgcgaatcaagtaattcaatctttgcaatggattaaagctcaggctggagaaggggaaattaatttgacagacgtgttgcgttaccccggcgtagtggaagcgcaagagcaagatttagatgcgattagtcaagatttattgacagcctttgatgatttactgacagattttattgcaatgcgtggtcgtgagggggaaaaactgaacgatattattcaacaacgtttagattccattgcagtggaaacggataaagtgcggtcacaaatgccagcagttttacaatggcagcgtgaacgtttattgcaacgttttgaagatgctcaacttaatcttgatccgcaacgtgtggaacaagaaatgattttactcgctcaacgcattgatgtggcggaagagctagatcgtttacaaatgcacgtgaaagaaaccacgaatattttgaaaaaaggcggtgcagttggacgtaaattagattttatgatgcaagaattgaatcgggaatccaatacccttgcgtctaaatccattaatgcagatatcacggcttctgcggtggagctaaaagtgcttattgaacaaatgcgtgagcaaattcagaatttagaatag

SEQ ID NO: 1536 - protein, 287 aa, Haemophilus influenzae
MIYSMTAFARLEVKKDWGDAVWEIRSVNQRYLENFFRLPEQFRGLENTLREKLRQNLTRGKIECSLRIETKKQANAELNLNKELANQVIQSLQWIKAQAGEGEINLTDVLRYPGVVEAQEQDLDAISQDLLTAFDDLLTDFIAMRGREGEKLNDIIQQRLDSIAVETDKVRSQMPAVLQWQRERLLQRFEDAQLNLDPQRVEQEMILLAQRIDVAEELDRLQMHVKETTNILKKGGAVGRKLDFMMQELNRESNTLASKSINADITASAVELKVLIEQMREQIQNLE

SEQ ID NO: 1537 - DNA, 867 bp, Vibrio cholerae
  CDS (1)..(867): transl_table=11
atgatttacagcatgactgcgtacgcacgcaaagaagtcaaaggcgattggggcagcgccgtgtgggaaattcgctcggttaaccaacgctatttagaaacgtacttccgcctgcctgagcagttccgtggtttagagccactgctgcgcgagcgttttcgtcagcgcctgtcacgcggtaagatcgagtgtcatttgcgctttgaagcgaatccagccgcgcaaagccacctcaccatcaatgaaggactcgcccagcaagtgattaatgccgctaaccagatcatgcacatgaccggtgaactcagccgcattaacccattccaagtgatgcagtggccgggcgtgatggaaacgcctgagcaggatatggacgccataaaccaagcactactcagtgcgtttgatgaaggcgtggacgaatttatcgccgcgcgtggccgtgaaggcgataacatgaaagcgctgattgagcagcgtttgcaagcgatcagcgccgaagtggtcaaagtacgcgcacgcatgccagaaattctggaatggcaacgcgagcgtctgttcagcaaatttgaagaggcaaaaatcgagcttgatgcgagccgcgtagagcaagagctgatcctgctggcacaaaaatcggatgtagccgaagagctggatcgtctcgactctcatgtcaaagaagcgcgtgaagtgctgaaaaaaggtggctcatgtggccgtaaactcgatttcatgatgcaagagttcaaccgtgaatcgaacaccttggcttcgaaatccatctcaaccgatatcaccgcctccggtgtggagctgaaagtactcatcgagcagatgagagagcagatccaaaacatcgaataa

SEQ ID NO: 1538 - protein, 288 aa, Vibrio cholerae
MIYSMTAYARKEVKGDWGSAVWEIRSVNQRYLETYFRLPEQFRGLEPLLRERFRQRLSRGKIECHLRFEANPAAQSHLTINEGLAQQVINAANQIMHMTGELSRINPFQVMQWPGVMETPEQDMDAINQALLSAFDEGVDEFIAARGREGDNMKALIEQRLQAISAEVVKVRARMPEILEWQRERLFSKFEEAKIELDASRVEQELILLAQKSDVAEELDRLDSHVKEAREVLKKGGSCGRKLDFMMQEFNRESNTLASKSISTDITASGVELKVLIEQMREQIQNIE

SEQ ID NO: 1539 - DNA, 891 bp, Mesorhizobium loti MAFF303099
  CDS (1)..(891): transl_table=11
atgaatttacagagcatgaccggatttgcgcgtgccgtcgccgagcatgacggcacctcgatcgcctgggaggtcaagtccgtcaacggcaagagcgtcgaggtgcggctgcggctgccgcaaggtttcgagcgtctggagccggcggtcaggcaaacgctgcagaagcgtttcgcacgcggcaatttccaggcgacgctgaccatcggccgcgccgccggcgcgcaggcgcaacccgtcgtcaacgaggcgtttctgaaggaccttgcgggtctcgccaagcggctgcaggaacagttcggcgttgctcccgcgacggccgatgggttgctgtcgctgcgtggcgtgctcgacattcccgaaaccgtggaaaccgaagaggcgcgcgccgcgctcgacatcgccatcatggctgcgctcgacgtatcgctgaacgggctggaactggcacggcaaagcgagggggcggcgctggctttgctgctgtccggccatatcgacgccatcgaggcattgacgctgcgtgcggaggcggatccgtcccgcgagacggcggcgatccgtgaacgcatcgctgagcaggtcaggctgctgatggacgcgtccgccaacctggatgcgagccggctgcacatggaagcggcattcctcgccaccaaggctgatattcgcgaggagatcgatcggctgaagacgcatgtcgcatctggccgggctttgcttgagggcggcggcgccgtcggtcggaagctcgattttctggcacaggaatttaaccgcgaatcgaatacgctgtgttcgaagtcgaacgccgcagccgtcaccgcgatcgggctggagctgaaggcggtggtcgaccagtttcgtgaacaggtccagaatctggagtag

SEQ ID NO: 1540 - protein, 296 aa, Mesorhizobium loti MAFF303099
MNLQSMTGFARAVAEHDGTSIAWEVKSVNGKSVEVRLRLPQGFERLEPAVRQTLQKRFARGNFQATLTIGRAAGAQAQPVVNEAFLKDLAGLAKRLQEQFGVAPATADGLLSLRGVLDIPETVETEEARAALDIAIMAALDVSLNGLELARQSEGAALALLLSGHIDAIEALTLRAEADPSRETAAIRERIAEQVRLLMDASANLDASRLHMEAAFLATKADIREEIDRLKTHVASGRALLEGGGAVGRKLDFLAQEFNRESNTLCSKSNAAAVTAIGLELKAVVDQFREQVQNLE

SEQ ID NO: 1541 - DNA, 864 bp, Pasteurella multocida subsp. multocida str. Pm70
  CDS (1)..(864): transl_table=11
atgatttatagtatgaccgcttttgcacgcctcgaaatcaaacaggattggggtgatgccgtgtgggaaattcgctcagttaaccagcgctatttagaaacctttttccgcttgcctgagcaatttcgtggtttagaaaataccttgcgagaaaaactgcgtcaaaaactgacgcgtggcaaaattgaatgcacattgcgtattgataataaaaaacaagctgccacagaaatccatttaaacaaagcctttgcattacaagtgatacagtcattacagtggatcaaacaacaagccggggaaggcgagattcacttaaatgacgtgttgcgctatccgggcgtcgttgaagtaccagaacaagatcttgatttgattagccaacaattactcagcgcgtttgacagcttattaaccgagtttattgcaatgcgagcaagagagggcgaaaaactcaacacactccttcaacaacgtttagatgccgttgaagttgaagccaataaagtgcggtcaaaaatgccggaaattttacaatggcaacgagatcgtttattacagcgctttgacgaaatccaattacaagtggatccccaacgtgttgagcaggaaatggtgttattagcccaacgggttgatgtcgctgaagaactcgatcgtctgcaattacacgtcaaagaaaccaaagccattttacaaaaaggcggtgcggttggcagaaaattggattttatgatgcaagaacttaaccgtgaatcaaatacgctcgcgtccaaatctatcagtactgaagtcaccaattctgcggttgaactgaaagtccttatcgaacaaatgcgtgagcaaattcaaaacttagagtaa

SEQ ID NO: 1542 - protein, 287 aa, Pasteurella multocida subsp. multocida str. Pm70
MIYSMTAFARLEIKQDWGDAVWEIRSVNQRYLETFFRLPEQFRGLENTLREKLRQKLTRGKIECTLRIDNKKQAATEIHLNKAFALQVIQSLQWIKQQAGEGEIHLNDVLRYPGVVEVPEQDLDLISQQLLSAFDSLLTEFIAMRAREGEKLNTLLQQRLDAVEVEANKVRSKMPEILQWQRDRLLQRFDEIQLQVDPQRVEQEMVLLAQRVDVAEELDRLQLHVKETKAILQKGGAVGRKLDFMMQELNRESNTLASKSISTEVTNSAVELKVLIEQMREQIQNLE

SEQ ID NO: 1543 - DNA, 903 bp, Xylella fastidiosa 9a5c
  CDS (1)..(903): transl_table=11
atgggcgcgctagggtaccatccatattttgagagcaatatgatccatagcatgactgcgttcgccgcagatgagcaccttacaccatggggcctgttagcctgcgagctgcgttcagtcaaccaccgcttcctggatatcgtcatacgccttcctgaagaactccgtgctctggaaccacaactacgtgagcgcgtggccgcacgggtcagccgcggcaagctcgatttgacagtacgcctatcaccacaggagatccacactgggaagctggtagtgaacgaactgctgttatcccagctcagcaccctggcactacgcctatcagcacagttccccgcgttacgtgtcacatttgcagagctgctacagatccctggtgtcctgaagggtgagcagatcgacatggccacgttacaaggacacgccgtggcgctgctggataaggtactgaataacttcattgccacgcgggaacgcgaaggtctcaaaatgcaagcaatgatcgcgcaacgtgctagtgccattgaacgcatcgtcggcgaggttcgcatcctgattcccaccatccgcgaaggccaacacaacaaattaagcgctcgcatgaatcacctgtcgtatcccgtcgatcccggccgcattgagcaagagttggtgctatggctacaaaagctagacgtggatgaggagttggatcggctcagcagtcacatcagcgaattacatcgcatcctccagcaacgcgaacccgtcgggcggcgcctggattttctaatgcaagaattcaaccgcgaagccaacacactcggctcaaaatcggtggacagccgcacttctaatgccacgattgagctgaaggtactgatcgaccagatccgcgagcaagtgcagaacatcgaataa

SEQ ID NO: 1544 - protein, 300 aa, Xylella fastidiosa 9a5c
MGALGYHPYFESNMIHSMTAFAADEHLTPWGLLACELRSVNHRFLDIVIRLPEELRALEPQLRERVAARVSRGKLDLTVRLSPQEIHTGKLVVNELLLSQLSTLALRLSAQFPALRVTFAELLQIPGVLKGEQIDMATLQGHAVALLDKVLNNFIATREREGLKMQAMIAQRASAIERIVGEVRILIPTIREGQHNKLSARMNHLSYPVDPGRIEQELVLWLQKLDVDEELDRLSSHISELHRILQQREPVGRRLDFLMQEFNREANTLGSKSVDSRTSNATIELKVLIDQIREQVQNIE

SEQ ID NO: 1545 - DNA, 888 bp, Agrobacterium tumefaciens str. C58
  CDS (1)..(888): transl_table=11
atgacattgcaatcgatgaccggctttgcgcgcagcgaaggaacctccggccgttaccgctgggcctgggaattgcgttctgtgaacggcaaggggctcgatgtgcgcctgcgtctgccgaccggtcttgaagcactcgaaaccggcctgcgcgaaattgcgagcgagcatctttcccgcggcaatattcaggcgggcctgacgctggcgattgcggaaaaccggcttgaggccgtgatcaaccgcgatgcgctggccgccgttctggcactcaagaaggagcttggtgatgtcgtcgatgacaagccgctgagcttcgataccttgctcactttgcgcggtctggtcgattttcgagaggcggaagacgacgctgaagcgcaggcagcgcgcaatggtgaggtgcttgccggtttcgccgctgccgtggaaaagctgaaggacatgcgcgagcgggaaggggcatcgctgtttgctatcctctccggccatatcaaccgtatcgagcagctcgtggacatcatcgagaatgatccatcccgccagcccgagcagatcgcggcacggctcgcccagcagatcgccctcatcggtgacggcatgcacgggctcgaccgtgaccgcctgcatgccgaggcggcgctgatcgccactaaggcggatctgcgtgaagagatcgaccggttgcacgcccatgtccaggcttcacgcgaactgttggagaatggcggacctgttggccgcaagctcgattttcttgcacaggaatttaaccgcgagtcgaatacaatctgttccaaatcgaatgccagtgcggtaaccgcagcgggcatagagttgaaagtggtgatcgaccagtttcgcgaacaggtccaaaatctggagtag

SEQ ID NO: 1546 - protein, 295 aa, Agrobacterium tumefaciens str. C58
MTLQSMTGFARSEGTSGRYRWAWELRSVNGKGLDVRLRLPTGLEALETGLREIASEHLSRGNIQAGLTLAIAENRLEAVINRDALAAVLALKKELGDVVDDKPLSFDTLLTLRGLVDFREAEDDAEAQAARNGEVLAGFAAAVEKLKDMREREGASLFAILSGHINRIEQLVDIIENDPSRQPEQIAARLAQQIALIGDGMHGLDRDRLHAEAALIATKADLREEIDRLHAHVQASRELLENGGPVGRKLDFLAQEFNRESNTICSKSNASAVTAAGIELKVVIDQFREQVQNLE

SEQ ID NO: 1547 - DNA, 861 bp, Xanthomonas campestris pv. campestris str. ATCC 33913
  CDS (1)..(861): transl_table=11
atgatccgaagcatgaccgcgttcgccggcggcgaacgcatcacgccatggggcacgctcggttgcgagctgcgctcggtcaaccaccgttttctggaagtgggcgtgcgcctgcccgaagaattgcgtgcgctggagccgctgttgcgcgagcgcgtggcggcccgcaacagccgcggcaagctggacctggcgctgcgcctgcgcgcgccggacagcggccagaccctggccgtcaatgaggcgctgctgcaggaactgggcgcactcgccacgcggctggatgcaagcatgcccaagctgcaggtgagcttcaccgatctgctgcaattgcccggcgtgttgcaggtgcaggatgtcgatgcaccggcgctgcaggcgcaggcgctggcgttgctggatgatgtggtgtccgggtttgtggccgcccgtgagcgcgaaggcgccaagctggccgaggcgatcagcgagcgcgtggatgccatcgagcgtattgctggtgaggtgcgcacgctgattccggtgatccgcgaaggccaacgcgccaaattggcggcccgcctggccgatctgccgcatccggtggacccgggccgcgccgagcaggaactggtgctatggctgcaaaaactcgatgtggatgaagagctggaccgcctgtccagccacatcggcgagatccggcgcgtgctcaagcagtccgagccggtcgggcggcgcctggatttcctgctgcaggagttcaaccgcgaagccaacaccctgggctccaaatcggtggacagccgcacctccaacgcggcggtggacctgaaggtgctgatcgaccagatccgcgaacaggtgcagaacatcgagtag

SEQ ID NO: 1548 - protein, 286 aa, Xanthomonas campestris pv. campestris str. ATCC 33913
MIRSMTAFAGGERITPWGTLGCELRSVNHRFLEVGVRLPEELRALEPLLRERVAARNSRGKLDLALRLRAPDSGQTLAVNEALLQELGALATRLDASMPKLQVSFTDLLQLPGVLQVQDVDAPALQAQALALLDDVVSGFVAAREREGAKLAEAISERVDAIERIAGEVRTLIPVIREGQRAKLAARLADLPHPVDPGRAEQELVLWLQKLDVDEELDRLSSHIGEIRRVLKQSEPVGRRLDFLLQEFNREANTLGSKSVDSRTSNAAVDLKVLIDQIREQVQNIE

SEQ ID NO: 1549 - DNA, 864 bp, Yersinia pestis KIM
  CDS (1)..(864): transl_table=11
atgatccgcagcatgaccgcctacgctcgacgtgatattaagggtgaatggggcaacgcagcctgggagctgcgttccgttaaccaacgctatttagaaacgtacattcgcttaccagaacaattccggagtctggaaccggtgatccgcgaacgtattcgcagccgtctgacacggggaaagattgaatgtcatttacgttttgagttggatgccaacgcacaaagctctttgatcctcaatgaaaaactggcgaagcagttagttgaagccggtaattgggtcaagatgcaaagtgatgaaggcgaaattaacccagtagatatcctgcgctggccaggggtaatgtctgctgaggaacaagatttggatgcgattagcaccgagttaatgcaggcgctagataccgccctagacgattttattgtttcccgagaaactgaaggggcagcactgaaaacgcttatcgagcagcgtttagagggggtcagcgctgaagtggttaaagtccgcgcacatatgccaaatatcttgcagtggcaacgtgagcgcttactgaacaaactggaagaagcgcaagttcagttggaaaatactcgtttggagcaggagttagtgctaatggcacagcgtatcgatgtggccgaagagctagatcgtttggaagcgcacgtcaaagaaacatacaacattctgaagaagaaagaagccgttggccgccgccttgattttatgatgcaagaattcaaccgcgagtcgaatacgctggcatcaaaatccatcaatgccgaggtcactaactccgctatcgagttaaaggtgttgattgagcagatgcgcgaacagatccagaacatcgagtaa

SEQ ID NO: 1550 - protein, 287 aa, Yersinia pestis KIM
MIRSMTAYARRDIKGEWGNAAWELRSVNQRYLETYIRLPEQFRSLEPVIRERIRSRLTRGKIECHLRFELDANAQSSLILNEKLAKQLVEAGNWVKMQSDEGEINPVDILRWPGVMSAEEQDLDAISTELMQALDTALDDFIVSRETEGAALKTLIEQRLEGVSAEVVKVRAHMPNILQWQRERLLNKLEEAQVQLENTRLEQELVLMAQRIDVAEELDRLEAHVKETYNILKKKEAVGRRLDFMMQEFNRESNTLASKSINAEVTNSAIELKVLIEQMREQIQNIE

SEQ ID NO: 1551 - DNA, 900 bp, Brucella suis 1330
  CDS (1)..(900): transl_table=11
atggcgctccagagcatgacaggttttgcgcgccatgcagcacagcatggcatggccgacggcgaggcgcgtatcgtctgggaagtgcgctcggtcaatggcaaggggcttgatcttcgcctgcgcctgccgcaagggctggaatcggtggaacatccggtccgctccctgctggcgcggcatttctcgcgcgggaattttcaggcgagcctgaccgtcgaacgcagcgaaacgcaggcgggctttgccatcaaccagcccatgctggccgaggtgctgaagctgggtgcggagttgcaggaaaaatatggcctggctccggcaagcgtggacggcattcttgcgctgcgcggcattatcgaccagtcgcaaagggcggaagacgaggaagagcgcgctgcgctggaagctacaatcgtcgcggcctttgagggcgccttgaaggcgatagccgaggcgcgcaggcaggaaggcaaggcgctttttaccattctttcgacccatctcgacacgatcgagcggctgacggcggatgcacgaaatgacccgtcgcgcgctaccgaggcgatcaaggcgcgccttgccgggcaggtggcgctgcttctggatgccacgcgcgaactggacgagacgcggctatatcaggaagcggcgtttctggccaccaaggcggatattcaggaagagcttgaccggctggaaacccatgtggccagtgcacgcaagcttctgggcgagggcgggccggtcgggcgaaagctcgattttctttcacaggaatttaatcgtgaggctaatacactgtgctccaaatcgaacgcagcgtcgatcacggctatcggactggggctgaaagcggtcgtcgatcagttccgcgaacaagtacagaatctggagtaa

SEQ ID NO: 1552 - protein, 299 aa, Brucella suis 1330
MALQSMTGFARHAAQHGMADGEARIVWEVRSVNGKGLDLRLRLPQGLESVEHPVRSLLARHFSRGNFQASLTVERSETQAGFAINQPMLAEVLKLGAELQEKYGLAPASVDGILALRGIIDQSQRAEDEEERAALEATIVAAFEGALKAIAEARRQEGKALFTILSTHLDTIERLTADARNDPSRATEAIKARLAGQVALLLDATRELDETRLYQEAAFLATKADIQEELDRLETHVASARKLLGEGGPVGRKLDFLSQEFNREANTLCSKSNAASITAIGLGLKAVVDQFREQVQNLE

SEQ ID NO: 1553 - DNA, 864 bp, Shigella flexneri 2a str. 301
  CDS (1)..(864): transl_table=11
atgatccgcagtatgaccgcctacgcccggcgtgaaatcaagggtgaatgggggagcgcaacctgggaaatgcgctcggtaaaccagcgttatctggaaacttactttcgtctgccggagcagttccgtagccttgaacctgtcgttcgcgagcgtattcgttctcgcctgacgcgcggtaaagtggaatgtaccctgcgctatgagccagatgttagcgcacaaggtgagctgatcctcaatgaaaaactggctaaacagctggtaactgccgcgaactgggtaaaaatgaagagtgacgaaggggaaatcaacccggttgatattctacgctggccgggcgtgatggcagcccaggagcaggatctcgacgcgattgccgctgaaattctcgcggcgttggatggtacgctggacgactttatcgtcgcgcgcgaaaccgaaggtcaggcactgaaagcattgatcgagcagcgtctggaaggcgtcaccgccgaagtggtcaaagtccgcgcccatatgccggaaattctgcaatggcagcgtgagcgtctggtcgcgaagctggaagatgctcaggttcagttggaaaacaaccgtctggagcaggagttggttctgctggcacaacgaattgacgttgccgaagagctggaccgcctcgaagcgcatgttaaagagacgtacaacattctgaagaaaaaagaagcggttggtcgtcgtctggactttatgatgcaggagttcaaccgtgagtcgaacactcttgcgtcgaaatctatcaatgccgaagtgacaaactccgccatcgagctgaaagtgttgattgagcagatgcgcgagcagattcagaatattgagtaa

SEQ ID NO: 1554 - protein, 287 aa, Shigella flexneri 2a str. 301
MIRSMTAYARREIKGEWGSATWEMRSVNQRYLETYFRLPEQFRSLEPVVRERIRSRLTRGKVECTLRYEPDVSAQGELILNEKLAKQLVTAANWVKMKSDEGEINPVDILRWPGVMAAQEQDLDAIAAEILAALDGTLDDFIVARETEGQALKALIEQRLEGVTAEVVKVRAHMPEILQWQRERLVAKLEDAQVQLENNRLEQELVLLAQRIDVAEELDRLEAHVKETYNILKKKEAVGRRLDFMMQEFNRESNTLASKSINAEVTNSAIELKVLIEQMREQIQNIE

SEQ ID NO: 1555 - DNA, 951 bp, Pseudomonas putida KT2440
  CDS (1)..(951): transl_table=11
ttgggcgccacggcgacactgcgctacaatcctgcgccttgcagccgagaggctcccaccgttcattcattacgcgaggtactccccatggtgcacagcatgaccgcttttgctcgtgtcgagcgcgccggcagccaaggcaccctggtctgggagctgcgttcggtcaaccaccgttatctggagccgcacctgcgcctgcccgaagccctgcgcgacctcgaaggcggtgtacgtgaaggcctgcgccagggcctgtcacgcggcaaggtggaatgcaccttgcgcctcaacgaagacagcaatggcaaaccgctgaaagtggaccatgagcgcgccgcgcaactggttgccgccgccgaggaagtggctggcctgatcaagcagccggcccccctgaacccgctggaagtgctgtcatggccaggcgtgctggtggccgacaccagcgacccccaggcactgaacgccgaagccatggcgctgttcgacgaagcgctggccgaactcaaggccgggcgccagcgcgaaggccaggaactggcccggctgatcaacgaacgcctggacaacatggccagcgaagtcactaccctgcgcgccctggtgccgcagatgctggcggcgcagcggcagaagattctcgaccgcttcggcgacatgcaagccgagctggacccacagcgcctggagcaggagatggtactgctggcccagaaaagcgacgtggcagaggaactcgaccgcctcagcacccacgtcaccgaagtgcgccgcgtgctcaagggtggcggcgccgctggccggcgcctggacttcctgatgcaggaactcaaccgcgaggccaacaccctcggctccaaggccttcgacccacgcagcacgcaagcggcggtcaacctgaaggtattgatcgaacagatgcgtgaacaagtacagaacatcgagtaa

SEQ ID NO: 1556 - protein, 316 aa, Pseudomonas putida KT2440
MGATATLRYNPAPCSREAPTVHSLREVLPMVHSMTAFARVERAGSQGTLVWELRSVNHRYLEPHLRLPEALRDLEGGVREGLRQGLSRGKVECTLRLNEDSNGKPLKVDHERAAQLVAAAEEVAGLIKQPAPLNPLEVLSWPGVLVADTSDPQALNAEAMALFDEALAELKAGRQREGQELARLINERLDNMASEVTTLRALVPQMLAAQRQKILDRFGDMQAELDPQRLEQEMVLLAQKSDVAEELDRLSTHVTEVRRVLKGGGAAGRRLDFLMQELNREANTLGSKAFDPRSTQAAVNLKVLIEQMREQVQNIE

SEQ ID NO: 1557 - DNA, 867 bp, Vibrio parahaemolyticus RIMD 2210633
  CDS (1)..(867): transl_table=11
atgatttacagtatgactgcgtatgcgcgcaaagaagtaaaaggcaattggggctcagcggtatgggaaatccgcagtgtaaaccagcgttacctagaaacctatttccgcatgccagaacaattccgagctttagaaccagttctacgcgagcgttttcgtaaacgcctagcgcgaggaaaagtggaatgtagccttcgtttcgaagcaaaccctgcagcaaaagccgaacttagcatcaatgaagcgttggcaacccaagtgattaaagctgctgaacaagttatgcacatgactggtgagcttagccgcatcaatccatttcaagtcatgcaatggcctggtgtgatggaaactcctgagcaaaacatggatgaggttaacaaagaacttcttgctgcatttgatgaagcaattagtgaatttattgaagcgcgtggccgtgaaggcgataacatgaaagcgctgatcgaacaacgcctagacgcgattaccgcagaagtggtgaaagttcgtgctcgcatgcctgaaatcctagaatggcaacgtgagcgtctattctcaaaatttgaagatgcgaaaattgaactggatgcttctcgtgtagaacaagagcttatcttgctagcgcaaaagtcagacgttgcagaagagctagatcgtctggattctcacgtgaaagaaacgaccaacatcctgaaaaaaggtggcgcagtcggtcgtcgtctggatttcatgatgcaagaattcaaccgtgagtcaaacacgctcgcttctaaatcgatcagcaccgacatcactgcgtcgggtgttgaactgaaagttctgatcgaacaaatgcgcgaacagatccaaaacatcgaataa

SEQ ID NO: 1558 - protein, 288 aa, Vibrio parahaemolyticus RIMD 2210633
MIYSMTAYARKEVKGNWGSAVWEIRSVNQRYLETYFRMPEQFRALEPVLRERFRKRLARGKVECSLRFEANPAAKAELSINEALATQVIKAAEQVMHMTGELSRINPFQVMQWPGVMETPEQNMDEVNKELLAAFDEAISEFIEARGREGDNMKALIEQRLDAITAEVVKVRARMPEILEWQRERLFSKFEDAKIELDASRVEQELILLAQKSDVAEELDRLDSHVKETTNILKKGGAVGRRLDFMMQEFNRESNTLASKSISTDITASGVELKVLIEQMREQIQNIE

SEQ ID NO: 1559 - DNA, 864 bp, Coxiella burnetii RSA 493
  CDS (1)..(864): transl_table=11
atgattgccagtatgaccgctttctctcgccagtctcatgaagcaacatgggggttattgacgtgggagatccgcacggtcaatcaccgctatctggaaattacactgcgtttgccggactttttgcgtgaatttgaacaagcttcccgagaggccattcaaaaggttttgcgccgaggcaaggttgaagccactttacggttccagcctggttgggacgtgccgtttgaaatgaatgtcaatcaagtgctgactgaacgcttggccaaagcgagtgagacggtcatctcctacttcccatcagcgacaatcaatgccatcgatgtgctctcctggcctggggtattgcaaaccaaggaaactcaggtggatgttatcggaaaggccgtattcgctttattaaattcggcattaaccgattgcatggatatacggcgtcgcgaaggcgagggacttaaactatttattgaagaacggctgaacaacgtgaaagggaaaatcgccattatcaagaaacgactgcctgctttgcaccaagcggcgcgcgagaaaatgatagtgcgttttgaagaattatccctcgcgttagataaagaacgcttggagcaagagatgctctggttggtacaaaaaagtgatgtcgccgaagaattacaacgcctagaggcgcacctgcttgaagtgaaacgtgttttagttgaaggaggtaccgtcggacgaaggctggattttttaatgcaagaattaaaccgagaggccaacaccttgggaaataaatcactggacgccgatgtttctcaagtattggtagatttaaaagtgcaaattgaacaaatgcgagaacaggtgcaaaacattgaataa

SEQ ID NO: 1560 - protein, 287 aa, Coxiella burnetii RSA 493
MIASMTAFSRQSHEATWGLLTWEIRTVNHRYLEITLRLPDFLREFEQASREAIQKVLRRGKVEATLRFQPGWDVPFEMNVNQVLTERLAKASETVISYFPSATINAIDVLSWPGVLQTKETQVDVIGKAVFALLNSALTDCMDIRRREGEGLKLFIEERLNNVKGKIAIIKKRLPALHQAAREKMIVRFEELSLALDKERLEQEMLWLVQKSDVAEELQRLEAHLLEVKRVLVEGGTVGRRLDFLMQELNREANTLGNKSLDADVSQVLVDLKVQIEQMREQVQNIE

SEQ ID NO: 1561 - DNA, 867 bp, Nitrosomonas europaea ATCC 19718
  CDS (1)..(867): transl_table=11
atgcttgcaagcatgacaggttatgcagcagtttcccgggaaatcccgcaaggatcactggctttggaactgcgttcagtcaataaccgctatcttgatctgcaattcagactccccgatgaactccgtgcacttgaatccgaaatgcgcgattttctcggtagtggactgacgcggggaaaagttgattgtcgcctgactttttcatcttattcaaacagttaccgtcaacagcgactgaatcgtgatctgttgcaagacttgcagatcatgagcgatgagatcaagtctatttttcctgctgcaggcgatttttccgttgctgaaattctgcgctggcctggcgtactcgatagtgaccatatttcgatcgatgacttgcgtaccccgtgtatggcactgttacaaactgctctacaggaactcgtctccgcccggaagcgcgagggagaaaagctgcataacctgttgttggaacgtgtacaacgaatgcgtcaactggtattggatctgttgccggggttgcctgctattctggccagttttcaggaaagattactgaacagtttgaaagcagccgggctcgatgaaaaggatgaacgtatccggcaggaattcaccctgtttgccaacagagtcgatgtagacgaggagctgtcacgcctgcagggacacctgaacgaattcgaacacattctgcttgccgggggtgtcgtcggcaaacggctcgattttctgacacaggaactcaatcgggaagccaatacgctggcctccaagtcagtggcgagagaagtcacgcgaatagcagtggaaatgaaagtgctgatcgagcaattgcgcgagcagatccagaatattgaataa

SEQ ID NO: 1562 - protein, 288 aa, Nitrosomonas europaea ATCC 19718
MLASMTGYAAVSREIPQGSLALELRSVNNRYLDLQFRLPDELRALESEMRDFLGSGLTRGKVDCRLTFSSYSNSYRQQRLNRDLLQDLQIMSDEIKSIFPAAGDFSVAEILRWPGVLDSDHISIDDLRTPCMALLQTALQELVSARKREGEKLHNLLLERVQRMRQLVLDLLPGLPAILASFQERLLNSLKAAGLDEKDERIRQEFTLFANRVDVDEELSRLQGHLNEFEHILLAGGVVGKRLDFLTQELNREANTLASKSVAREVTRIAVEMKVLIEQLREQIQNIE

SEQ ID NO: 1563 - DNA, 864 bp, Wigglesworthia glossinidia endosymbiont of Glossina brevipalpis
  CDS (1)..(864): transl_table=11
atgatacatagtatgacttctttttctagatatgaattaaaaaaaaattactacaatattatatgggaattaaaatctgttaatcataaatatcttgatataaatattaatttaccagaagaaataaaatttatagaagaaacaatttacaaaagaattagtaaatatatttcaagaggtaaaatagattgtagtgcttatattaaatcaaataaatcaaaaaaaataaatttattaattgataaaaaattaatacttcaaatattaaaaattattatttatataaataaagaaattaatttcagcacagtaaatattttagacatactaaaatggccaggagttattttaaaaaaaaaatatttaaacaaaataaataacaaagtattaatttctagctttgaatatgcttttaacaatttattgaattatagactctcagaaggaagagaaataaaaaaaataattaaaacaaaaacagaaaaaattaattttaatatagaaaaaatgaattatattttacctaaatttttagaaaaacaaaaaattaaactaaaaaataaaatactagaaattaataataatatagaaattaataaattagaacaagacatttcattttttattcaaaaaacagacataaatgaagaaatagatagaataaaaattcatattaattctttaacaaaaacattaaacaatagaaaaccaattggaagaaaattagattttattttacaagaaataataagagaatctaatactatttcatctaaatcaactgcaatagaaataattcaattatcaattgaattaaaattattaacagatcaaattagagagcaagcaaaaaatattgaataa

SEQ ID NO: 1564 - protein, 287 aa, Wigglesworthia glossinidia endosymbiont of Glossina brevipalpis
MIHSMTSFSRYELKKNYYNIIWELKSVNHKYLDININLPEEIKFIEETIYKRISKYISRGKIDCSAYIKSNKSKKINLLIDKKLILQILKIIIYINKEINFSTVNILDILKWPGVILKKKYLNKINNKVLISSFEYAFNNLLNYRLSEGREIKKIIKTKTEKINFNIEKMNYILPKFLEKQKIKLKNKILEINNNIEINKLEQDISFFIQKTDINEEIDRIKIHINSLTKTLNNRKPIGRKLDFILQEIIRESNTISSKSTAIEIIQLSIELKLLTDQIREQAKNIE

SEQ ID NO: 1565 - DNA, 873 bp, Candidatus Blochmannia floridanus
  CDS (1)..(873): transl_table=11
atgattaatagtatgactgctttttctagatatgaagttgtttatttatggggaagtgcagtgtgggaaattcgttctatgaatcaacgatatttagatatttgtattactatacctaagaatgtcaatgatttgttttggataattagaaaaaaagttaagagttctcttacaagaggtaaaatagaatgtcatttacaacttaatattaatgtagatagtattaatactgttgtgtttgataataaattattttcttttttacttgataaaatcaaatatattaaatcacaaattaatgaaggggaaattgatcttgtagaaattttatcttttccaggaataatttcatataagcataataatgatgtatatcaaataaataatgaattattagctgcttttgaactaacattatatcaattaatacgtaatagagaaaaggaaggtagttttttaaaggataatgtagttaatcggttattacaaattactacagtaatcgatgaaattcagaaatatattcctcaaatattacaacaaaagcgtaaaaaacttttggattatattcagggtttttgtattaattttgatactagtcgattagaacaagaattattgttaatgacacaaaaaattgatgtttcagaagaaatagatcgtttgaaaattcatgttgaatctatgcaaaatcttttatctcaaaaaataaataaacctgttggaagacagttagattttattactcaagaattacaaagggaggctaatactttgtcgtcgaaattaatagatgcttatgtgacaggtttggttatttctttaaagatattaattgagcaaattcgtgaacaggttcaaaatattgagtaa

SEQ ID NO: 1566 - protein, 290 aa, Candidatus Blochmannia floridanus
MINSMTAFSRYEVVYLWGSAVWEIRSMNQRYLDICITIPKNVNDLFWIIRKKVKSSLTRGKIECHLQLNINVDSINTVVFDNKLFSFLLDKIKYIKSQINEGEIDLVEILSFPGIISYKHNNDVYQINNELLAAFELTLYQLIRNREKEGSFLKDNVVNRLLQITTVIDEIQKYIPQILQQKRKKLLDYIQGFCINFDTSRLEQELLLMTQKIDVSEEIDRLKIHVESMQNLLSQKINKPVGRQLDFITQELQREANTLSSKLIDAYVTGLVISLKILIEQIREQVQNIE

SEQ ID NO: 1567 - DNA, 867 bp, Chromobacterium violaceum ATCC 12472
  CDS (1)..(867): transl_table=11
atgatattgagcatgaccggcttcgccgccgccacccgggaattccctggcggcatgttgagcctggaagtccgcgccgtcaatcaccgttacctggacgtgcagatgcgcttgccggaagagctgcgcatcatcgaaccccagctgcgcgagcagatcgccgcccgcgtcacccgcggcaagctggaatgccgcgtcggcctcaaccaggtggacagcgccgcccccacgctggaagtgaaccaggccttcctcgcccgcctgctggaagtctcccgcgacgtgcaaaaacagtgcggcgaaggcaagggactgtcggtcggcgaactgatgcgctggcccggcgtgctgaagagcaacgagctggcgccggaagtgctgcaccagctgtgcctggacgcgctgcaaaccgcgctggccgacttcaacgcctcgcgcggccgcgagggcgaaaagctgaaggccgtgctgatcgagcgcatcgaggcgatggaagccatcgtcgccgcgatcaaacccaagctgccgcaaatcctggaaaactacatggccaaactgtccggccgcctgcaggaggcgctgggcagcgtcgatgaagaccgcttgaaacaggaattcgcgctgttcgcgcagaagatagacgtggacgaggaactgtcgcgcctgaccacccacctctcagaagtgcgacgcatcctgaaatccggcggccaatccggcaagcgcctggacttcctgatgcaggagctgaaccgcgaagccaacaccctgggctccaagtcggtctccaccgacaccacccaggcctcggtggagctgaaagtgctgatcgagcagatgcgcgagcaaattcaaaacatagagtaa

SEQ ID NO: 1568 - protein, 288 aa, Chromobacterium violaceum ATCC 12472
MILSMTGFAAATREFPGGMLSLEVRAVNHRYLDVQMRLPEELRIIEPQLREQIAARVTRGKLECRVGLNQVDSAAPTLEVNQAFLARLLEVSRDVQKQCGEGKGLSVGELMRWPGVLKSNELAPEVLHQLCLDALQTALADFNASRGREGEKLKAVLIERIEAMEAIVAAIKPKLPQILENYMAKLSGRLQEALGSVDEDRLKQEFALFAQKIDVDEELSRLTTHLSEVRRILKSGGQSGKRLDFLMQELNREANTLGSKSVSTDTTQASVELKVLIEQMREQIQNIE

SEQ ID NO: 1569 - DNA, 864 bp, Photorhabdus luminescens subsp. laumondii TTO1
  CDS (1)..(864): transl_table=11
atgatccgtagtatgactgcttttgcacggcgagatatcaaaagtgaatggggaaatgcggcttgggaactacgctccgttaatcagcgttatttagaaacttatatccgcctaccagaacaattcagaagcttggaaccggtgatccgtgagcgcattcgttcccgtctgactcgcggaaaagttgagtgcaacttacgttttgaactggattcacgctctcaaggcgaacttatcctgaatgaaactttagcaaaacagctagtcaatgcggcgaactgggtcaaacaacagagcaacgaaggtgaaatcaaccctgttgatattctgcgttggcctggcgttatggccgcagaagagcaagacctggatgctatcaacactcaattgttgcaagaactggatacaacactggatgcctttattcaaagccgtgaagccgaaggcaacgcacttaaaattatgattgaacaacgtttggacgcagtaaccgaagaagtcggtaaagttcgccaacaaatgcctgaaatcatgcaatggcagcgggaacgcctgcaaaccaaattggaagaagcgcaggtacagcttgaaaataaccgtcttgagcaagagttagttttactggctcaacgcctcgatgtggcagaagagttagatcgccttgatgcccacaccaaagaaacccgtaatattctaaagaaaaaagaagccgtcggccgccgactggattttatgatgcaggaattcaatcgcgaatctaatacgcttgcctccaaatctatcaacgccgatatcactaactccgctattgaattgaaagtgctaatcgaacagatgagggagcagattcagaatattgagtaa

SEQ ID NO: 1570 - protein, 287 aa, Photorhabdus luminescens subsp. laumondii TTO1
MIRSMTAFARRDIKSEWGNAAWELRSVNQRYLETYIRLPEQFRSLEPVIRERIRSRLTRGKVECNLRFELDSRSQGELILNETLAKQLVNAANWVKQQSNEGEINPVDILRWPGVMAAEEQDLDAINTQLLQELDTTLDAFIQSREAEGNALKIMIEQRLDAVTEEVGKVRQQMPEIMQWQRERLQTKLEEAQVQLENNRLEQELVLLAQRLDVAEELDRLDAHTKETRNILKKKEAVGRRLDFMMQEFNRESNTLASKSINADITNSAIELKVLIEQMREQIQNIE

SEQ ID NO: 1571 - DNA, 903 bp, Herminiimonas arsenicoxydans
  CDS (1)..(903): transl_table=11
atgaccggctacgcggttaccactcacgagaccagcaacggcacattgacgatcgagatcaaaagcgtcaattcacgctttctcgatttgcaatttcgcatcaacgacgatttgcgcgcgcttgaaccttccctgcgcgaagcgatcatggcgcgcgttacccgcggcaaggtcgaatgccgtttgagcttcggccgcaaagttgccaccgacaccacgcaagcactgaatgcgactgccctgaatgcattggcagcactgcaaactgatctgcgccggcaatttaccgacgcagcgcctttgtcggtcggcgaattactccgctggcctggcgtcatcgaagaagctgaaatgagccaggacaccctgcaagccgacgtcatcgcggccatgcaaaccaccatgacggcgtttgtcgaaagccgcgcgcgcgaaggcaatgccctgcaaacgatgctgcttgcacgcgtcagcgatatggaagaaatcgtcttgcgcatcgcaccgctgatccctcaggtcatcgcacagttccagcaaaaagccaccgaccgcatgcaggaagcactgggcctggctgtcagaaacggggacgctaacgcacagtcggccatcagccgtgaagaagcgctggacagaatccgtcaggaagtcacgctgtacggcatacgcgtcgatgtggcggaagagctgacccgtctgtccgcacacttgggcgaaacccgcgttatcctggaaaaaggcggtcaggtcggcaaacgcctggacttcatgatgcaggagctcaatcgcgaagccaatacagtcggctccaaggctgcgctcaaggaattgtccgacgcttcaatggcgatgaaattgctgatcgaacaaatgcgcgaacaggtgcaaaatctggaataa

SEQ ID NO: 1572 - protein, 300 aa, Herminiimonas arsenicoxydans
MTGYAVTTHETSNGTLTIEIKSVNSRFLDLQFRINDDLRALEPSLREAIMARVTRGKVECRLSFGRKVATDTTQALNATALNALAALQTDLRRQFTDAAPLSVGELLRWPGVIEEAEMSQDTLQADVIAAMQTTMTAFVESRAREGNALQTMLLARVSDMEEIVLRIAPLIPQVIAQFQQKATDRMQEALGLAVRNGDANAQSAISREEALDRIRQEVTLYGIRVDVAEELTRLSAHLGETRVILEKGGQVGKRLDFMMQELNREANTVGSKAALKELSDASMAMKLLIEQMREQVQNLE

SEQ ID NO: 1573 - DNA, 864 bp, Erwinia carotovora subsp. atroseptica SCRI1043
  CDS (1)..(864): transl_table=11
atgattcgcagcatgaccgcttacgcccgccgagaaatcaagggcaactggggaagcgcagcctgggaactgcgttccgttaaccagcgctatctggaaacctatcttcgtttaccggaacaattccgcagcctcgaacccgtcgcccgtgagcgcatccgcgcccgtttgacacgcggcaaaatcgaatgcaacctgcgctttgaactcgacccaagtgcacaaagtgcgttgatcctgaacgaaaaactggctaaacagctggttaatgccgctaactgggtcaaaatgcagagcgacgagggtgaaatcaacccggtcgatattctgcgctggccgggagtgatgttggcagaagagcaggatctggacaccatcagcactgagctactgaaagcactggaaggtgcgctggatgacttcatcgccgcccgtgaaagcgaaggcaacgcgttgaaagccctgatcgaacagcgtctggctggtgttagcgccgaagtgaccaaagtccgtgcccagatgccgaacgtcctgctatggcagcgcgagcgcctgcaaagcaagctggaagatgcgcaggtacagttggaaaataaccgtctggaacaggaactagtgctgatggcgcagcgcgtcgacgtcgccgaagaactcgaccgcctcgatgctcacgtcaaagaaacctacaaaatcctgaaaaaagaagaagccgtcggccgccgcctcgacttcatgatgcaggaattcaaccgcgaatcgaacacgctggcctcgaaatccatcaacgccgacgtaaccgcttcagcaatcgagttgaaagtgctgatcgagcaaatgcgggaacagattcagaacatcgagtag

SEQ ID NO: 1574 - protein, 287 aa, Erwinia carotovora subsp. atroseptica SCRI1043
MIRSMTAYARREIKGNWGSAAWELRSVNQRYLETYLRLPEQFRSLEPVARERIRARLTRGKIECNLRFELDPSAQSALILNEKLAKQLVNAANWVKMQSDEGEINPVDILRWPGVMLAEEQDLDTISTELLKALEGALDDFIAARESEGNALKALIEQRLAGVSAEVTKVRAQMPNVLLWQRERLQSKLEDAQVQLENNRLEQELVLMAQRVDVAEELDRLDAHVKETYKILKKEEAVGRRLDFMMQEFNRESNTLASKSINADVTASAIELKVLIEQMREQIQNIE

SEQ ID NO: 1575 - DNA, 879 bp, Symbiobacterium thermophilum IAM 14863
  CDS (1)..(879): transl_table=11
ttggcgcgcagtatgacggggttcggacggggcgaggccagcggcgaagcgggcagggtgaccgtcgaggtgaaggcggtcaaccaccggttttccgaggtcgtcttccgcatgccccgccagttcagcgccctggaggaccgggtgcgccggctgatccaggggcggacggcccggggccgtttcgaggtgtacgtcgcgtgggagccctcggccgaggcccgggcggtaaaggttgacaaggatctggcgctggcatattataatgctttgaggcagctagcggaagagatcgggagcaatcaggagctttcgctcgatacgctggcgagactgcctgaggtcctctctgttcaggagggggagctttccgacgacgagatctgggccctgctggagccggcgctgacgcaggcgatggcggggctgatcgccatgcgggagcgggagggcgccgccctggccgcggacctggccggccgcctggaccgcctggaggcgttccgggccgcggccgcggctcgtgcaccgcaggtggtggaggagtaccgccagcggctcacccgccgcctggaggagctgttgccgccgaccaacccggtcgatccgcagcggctcgcccaggaagtggccctgttcgccgaccgtgcggacatcacggaggagctgcagcggctggccagccacatcgaccagttccgccgggcgctggagaccgacgacgccgtgggacgcaagctggacttcctggtccaggagatggggcgcgaggtgaacaccatcgggtccaaggccaacgacgccgacctggcggcggcggtcgtggcggccaagagcgagctggagaagatccgggagcaggtccagaatctcgaatag

SEQ ID NO: 1576 - protein, 292 aa, Symbiobacterium thermophilum IAM 14863
MARSMTGFGRGEASGEAGRVTVEVKAVNHRFSEVVFRMPRQFSALEDRVRRLIQGRTARGRFEVYVAWEPSAEARAVKVDKDLALAYYNALRQLAEEIGSNQELSLDTLARLPEVLSVQEGELSDDEIWALLEPALTQAMAGLIAMREREGAALAADLAGRLDRLEAFRAAAAARAPQVVEEYRQRLTRRLEELLPPTNPVDPQRLAQEVALFADRADITEELQRLASHIDQFRRALETDDAVGRKLDFLVQEMGREVNTIGSKANDADLAAAVVAAKSELEKIREQVQNLE

SEQ ID NO: 1577 - DNA, 864 bp, Mannheimia succiniciproducens MBEL55E
  CDS (1)..(864): transl_table=11
atgatttacagcatgacagcctttgcacgccacgagatcaaaaaagattggggcgatgccgtatgggaaatccgttccgttaatcaacgttatttggaaaatttttttcggttgccggaacagtttcgcggtttagaaaacaatctgcgcgaaaaactgcggcaaaaccttacgcgcgggaaaatcgaatgcagtttacgcatcgacagtaaaaaacaaaccagtgccgaactgaatttaaataaagatctcgccgaacaggttattcagtccctaaaatggattaaacaacaagcgggtgaaggggaaattaatttaaatgacgtgttacgttatcccggtgtagtagaagcgccggaacaggatcttgacgccatcagccaggatttattaaacgctttcgacgaattattaaaagacttcattgccatgcgtgcccgcgaaggggaaaaattacacaccgttattcggcagcgtctggacgctatttcagtggaggccgataaagtgcgcgcacaaatgccggaagtgctgcaatggcaacgcgatcgcattctgcaacgttttgaagaaatccaactgcaaccggatccgtcccgtttagaacaggaaatggtgttgttggcgcaaagaattgatgtggcggaagaacttgaccgcctgcaaatgcatgttaaagaaaccgcctcgattctgaaaaaaggcggtgcggtcgggcgtaaactggattttatgatgcaggaattaaatcgcgaatcaaataccctcgcctcaaagtcaattaatgcggatatcaccgcttccgccgtggaattaaaagtattaatcgaacaaatgcgcgaacaaattcaaaatttagaataa

SEQ ID NO: 1578 - protein, 287 aa, Mannheimia succiniciproducens MBEL55E
MIYSMTAFARHEIKKDWGDAVWEIRSVNQRYLENFFRLPEQFRGLENNLREKLRQNLTRGKIECSLRIDSKKQTSAELNLNKDLAEQVIQSLKWIKQQAGEGEINLNDVLRYPGVVEAPEQDLDAISQDLLNAFDELLKDFIAMRAREGEKLHTVIRQRLDAISVEADKVRAQMPEVLQWQRDRILQRFEEIQLQPDPSRLEQEMVLLAQRIDVAEELDRLQMHVKETASILKKGGAVGRKLDFMMQELNRESNTLASKSINADITASAVELKVLIEQMREQIQNLE

SEQ ID NO: 1579 - DNA, 867 bp, Legionella pneumophila subsp. pneumophila str. Philadelphia 1
  CDS (1)..(867): transl_table=11
atgattcatagtatgacggctttttctcgaatacaaaagcagtttgatgtaggtgatttttgttgggaaatcaggtctgttaaccatcgctatctcgatgtctcttttcgtttgccggagtcctttcgatttcttgaagcagaattaagaactttgcttcgggataagatacatcggggtaaactggagtgccatctaaagtacaaggatacaagttgtgataatcggtctatgcttataaatataggtacgattaatgcattacttgatttaagcagtaaattatctgcttctcatcatctggctaatgatatgactgtcagtcaagtgctttcatggccaggcgttgtggaggctaatctgctggatatggaggaattgtctcaaattgctttggagttatttcagaaaagtatcgataaattgtgtgaagtcagagctggggaaggcaggtcattaaaggcatatgttgaagaccgattgcaggctttgcgccaagaagtaatgaaatccaaaagcattgtggtttcaatgagtgccaagactaaagataaattacttacgcgtttgcatgaattgcaaatggacgttccagaggcgcgtgtagagcaagaaattgccttgctactagccaaacttgatgtgagtgaagagttggacaggttagagactcatatagcggaagtaagccgcactttgaatgcagaaaaggtgacgggtagaagactggattttttaatgcaagaattaaatagagaggcgaataccctaagctcaaaatcggattcagcagagttaactttatgtgctgttgaaatgaaagtattgattgagcagatgcgtgaacaaattcagaattttgagtaa

SEQ ID NO: 1580 - protein, 288 aa, Legionella pneumophila subsp. pneumophila str. Philadelphia 1
MIHSMTAFSRIQKQFDVGDFCWEIRSVNHRYLDVSFRLPESFRFLEAELRTLLRDKIHRGKLECHLKYKDTSCDNRSMLINIGTINALLDLSSKLSASHHLANDMTVSQVLSWPGVVEANLLDMEELSQIALELFQKSIDKLCEVRAGEGRSLKAYVEDRLQALRQEVMKSKSIVVSMSAKTKDKLLTRLHELQMDVPEARVEQEIALLLAKLDVSEELDRLETHIAEVSRTLNAEKVTGRRLDFLMQELNREANTLSSKSDSAELTLCAVEMKVLIEQMREQIQNFE

SEQ ID NO: 1581 - DNA, 870 bp, Methylococcus capsulatus str. Bath
  CDS (1)..(870): transl_table=11
atgatccgcagcatgacggctttcgggaccgcgcaagggacggtgggaaactggcgggtgagctgggacctgcgtgccgtcaatcatcgctatctcgatgtcggcctgcgcctgccggatcccctgcgcggcctggaactggcggtgcgcaacaggataggcgagtcgttcaagcgggggcgggtggactgcaccctgacgtggagaccctcggcgccggaagccggcccgacatgtatcgacaccgcgctggtacgcggcctgctcggtgcgctgcgaaacgtcgaagcgctggaagaccgcagctggaccggcctgagcgccatcgaactgctgcgctggccaggcgtcatgcaggaaagcgagccggacctcgccacgctcgaacccgggctcctcgccgtgctcgaccgggcgctggccgaggcgcgggcgttccgtgagcgcgagggcgcccagatcgccgcgttgctggacctgcgctgtgccgacatccagcgcgcggtcggcgcggtacgggagcgcctgccggcgattctcgccggtatccggaacaaactgagggcgcggctggccgaactggccgccgagcccgatgccgcccgcctcgaacaggaactggtctacctcgcgcagaagatggacgtcgccgaagagctggatcgactgaccgcgcataccactgaaatgcggcacatcctcacccaacgggaacccgcggggcgccgcctggatttcctgatccaggaaatgaaccgcgaggccaacacgctggcgtccaagtcggccgatctggagaccacccgcgcggccgtggacatcaaggtactgatcgagcagatgcgcgaacaggtccagaacgtggagtga

SEQ ID NO: 1582 - protein, 289 aa, Methylococcus capsulatus str. Bath
MIRSMTAFGTAQGTVGNWRVSWDLRAVNHRYLDVGLRLPDPLRGLELAVRNRIGESFKRGRVDCTLTWRPSAPEAGPTCIDTALVRGLLGALRNVEALEDRSWTGLSAIELLRWPGVMQESEPDLATLEPGLLAVLDRALAEARAFREREGAQIAALLDLRCADIQRAVGAVRERLPAILAGIRNKLRARLAELAAEPDAARLEQELVYLAQKMDVAEELDRLTAHTTEMRHILTQREPAGRRLDFLIQEMNREANTLASKSADLETTRAAVDIKVLIEQMREQVQNVE

SEQ ID NO: 1583 - DNA, 891 bp, Silicibacter pomeroyi DSS-3
  CDS (1)..(891): transl_table=11
atgatcagatccatgaccggttttgcctcggcgcgcggcgagatggcgccattcagctggagctgggagctgcgcagcgtcaatgccaaggggctggacctgcgcctgcgcgtgcccgattggctggaagggttggaaaccgcgatccgcgccgatctgggcaaggcgctgggtcggggcagcgtcacgctcagcctgcggctgtcccggggcgaagagggcgcggcgctggcgctgaaccccgccgcgctgtcggcggtgctggacgcgctgtccgaggtcgaggatcaggcgatgacgcgcggcatgacgctggcgccctcgcgcgcggcggaccttctggcgctgcgcggggtgctggaggcgggtggcggcagcgacgacccggcaccgctggtaaagcggctgaaggccgagctgggcccgctgattgccgcattcctgcagatgcgcgagaccgagggagccgcactggccgaaatcctgcaaggcaacctgatccgtgtcgcggatctgaccgcgcaggcggcggcgctggctgaagcgcgcaaaccgctggtggccgagacgctgcgcgccaatctggcccgagtgctggacaatacggacggcgccgatcccgaccgggtggcgcaggaattggccatgcttgccgtcaaagccgacgtgaccgaggaactggaccgcctgcaggcccatatcaaggccgcccgcgacctgctggccaagggcggcgcggtggggcgcaagctggatttcctgatgcaggaattcaaccgggaagcgaacactctgtgttcgaagtcacaaaacgctgatctgaccggggtagggttggagctgaaagcggtgatcgaccagatgcgcgaacaggtccagaatgtggaataa

SEQ ID NO: 1584 - protein, 296 aa, Silicibacter pomeroyi DSS-3
MIRSMTGFASARGEMAPFSWSWELRSVNAKGLDLRLRVPDWLEGLETAIRADLGKALGRGSVTLSLRLSRGEEGAALALNPAALSAVLDALSEVEDQAMTRGMTLAPSRAADLLALRGVLEAGGGSDDPAPLVKRLKAELGPLIAAFLQMRETEGAALAEILQGNLIRVADLTAQAAALAEARKPLVAETLRANLARVLDNTDGADPDRVAQELAMLAVKADVTEELDRLQAHIKAARDLLAKGGAVGRKLDFLMQEFNREANTLCSKSQNADLTGVGLELKAVIDQMREQVQNVE

SEQ ID NO: 1585 - DNA, 885 bp, Neisseria gonorrhoeae FA 1090
  CDS (1)..(885): transl_table=11
atgagcagcggaaatatccgcatccacagcatgaccggctttgccaacgcggcggcagagtgcggcagcaaacgcatcaacctcgacatccgcgccgtcaaccaccgctttttggacattcaaatcaggatgcccgacgatttgcgccatttggaaaacggcatccgcgagcagatttcatcccatctggcgcgcggcaaagtcgaatgcaaaatccaaattcaagatgcggaaaacggcaatcagtctttggaactgaatcgcgttctggtcggacagcttgccgaaatcaacaaaaacctccgcaaacattatgatttggcaaaactgggcgttgctgatattttgcgctttccgggcgtattggcaagccaaaaggaaaatacggaagcattggcgaaaaccattgtcgaactggccgacaaagcactaaaagactttaccgccgcacgtcggcgtgaagggaaaaaattgggcgaacacctgttacaacgcattaaaaacatggaagaaatcatcgatgctttgagcgaaatcttccccgcgctggtggaagcgcataaagaaaaaatccgcacccgccttgccgaagccgtcggcagcatcgacaacgacaggctgcaacaggaatttgccctctttatccaaaaatccgacatcgacgaagaattcagccgcctgcgcacccacattgccgaagtgcgccgtatcgttaccgaacacaaaggcagcagcggcaaacggttggacttcctgatgcaggaactgaaccgcgaagccaacactttgggcagcaaatccatcgctaccgaatgcacccaagcctcggtcgagctgaaagtcctgatcgaacagatgcgcgaacaggtgcagaatatcgaataa

SEQ ID NO: 1586 - protein, 294 aa, Neisseria gonorrhoeae FA 1090
MSSGNIRIHSMTGFANAAAECGSKRINLDIRAVNHRFLDIQIRMPDDLRHLENGIREQISSHLARGKVECKIQIQDAENGNQSLELNRVLVGQLAEINKNLRKHYDLAKLGVADILRFPGVLASQKENTEALAKTIVELADKALKDFTAARRREGKKLGEHLLQRIKNMEEIIDALSEIFPALVEAHKEKIRTRLAEAVGSIDNDRLQQEFALFIQKSDIDEEFSRLRTHIAEVRRIVTEHKGSSGKRLDFLMQELNREANTLGSKSIATECTQASVELKVLIEQMREQVQNIE

SEQ ID NO: 1587 - DNA, 864 bp, Colwellia psychrerythraea 34H
  CDS (1)..(864): transl_table=11
atgatctacagcatgaccgcattctctcgcattgaaattaaaggcgattggggcaacgccgtttgggaaattcgctcagttaatcaaaggtttcttgaaacctattttcgtttgccagaacaatttcgtggcatagagcctgttttacgtgagcgtttccgtaaacaacttaatcgcggaaaagtagaatgtaacttacgttttaatgccaaccctgcaaataaaagcgaattagcgcttaatgaaaatttggcgctgcaactcattcagcatgctaattggattaatgagcaaacactaaacagcaaagtaaatcctttagaagtaatgcgctggcctggtgtgatggaagcacctgaaagcgatatgtctgccattcaagctgaattacttgctgcttttgatcaagcgctaaaagactttattgctgctcgtgccagcgaaggtgaaaacctaaaagctatgattgaacaacgccttgatgcaatagctagcgaagctgataaagtagcagcgcatatgccagacgtcattgcttggcagcgtaatcgcattatcgaaaaattcaccgatgctaaaatcgatttagactcgggccgtgttgagcaagagttagttttattggcgcaaaaaatggatgttgccgaagagcttgaccgtttaaacagccatgtcactgaaacgaagaaaatattgaaaaaaggtggcgcacaaggtcgtcgtttagatttcatgatgcaagagtttaaccgcgaagcaaataccctaggctcaaaatcgattaataccgatatcacggcaagcgctgttgaattaaaagtactaatcgaacagatgcgtgagcagatcgcgaatatcgaataa

SEQ ID NO: 1588 - protein, 287 aa, Colwellia psychrerythraea 34H
MIYSMTAFSRIEIKGDWGNAVWEIRSVNQRFLETYFRLPEQFRGIEPVLRERFRKQLNRGKVECNLRFNANPANKSELALNENLALQLIQHANWINEQTLNSKVNPLEVMRWPGVMEAPESDMSAIQAELLAAFDQALKDFIAARASEGENLKAMIEQRLDAIASEADKVAAHMPDVIAWQRNRIIEKFTDAKIDLDSGRVEQELVLLAQKMDVAEELDRLNSHVTETKKILKKGGAQGRRLDFMMQEFNREANTLGSKSINTDITASAVELKVLIEQMREQIANIE

SEQ ID NO: 1589 - DNA, 867 bp, Dechloromonas aromatica RCB
  CDS (1)..(867): transl_table=11
atgatctgtagtatgactggttatgccgttaaaacgcgcgatattgagcgcggaacactgcaacttgagcttaaaagcgtcaattcccgctatctcgattttcatttccgcgtcagtgatgaattgcgctcgctggaaatgcccctgcgtgaattgctggccgcgagattatcacgcggcaaagtggaatgccgactctctttcaatgcctcggcggcccgtgccgatcagctgcaactcaatggcgaactgctcgcgtcactgaagctgctgagcgagcgtgtgcggcatgaaatgcccgatgccagcccgctatcggtcaacgaaaccctgcgctggccaggcatgttcggcgaccaaagcgtcgatttcgctgcttttggaccggtcgtcatggcgctggcgcgcgaggtgctcgatgaatttaccgccagtcgggggcgcgaaggcgacaagctggcggcgatgatcgtcgagcgcgtcaatggcatgcgcgacatcgtgcgccgggtggcaccccgtattcctgaagcccaggcgatattcaccgacaagctgcgtcaacgtttgaccgaagcgctgggcaacgccagtgacgatcgcatcctgcaggaagtggccgttttcgcgacccgaatcgatgtcgccgaagagctttcacggctgactacccacctcgatgaagtcgagagggtgctgaagcaggggggcgcctgtggcaagcgcctcgatttcctgatgcaggaactcaatcgtgaagccaataccctgggctccaagtcggcaattaccgaggtttcacaggcgtcgatggatctcaagctgctgatcgaacagatgcgcgaacagatccaaaatttggagtga

SEQ ID NO: 1590 - protein, 288 aa, Dechloromonas aromatica RCB
MICSMTGYAVKTRDIERGTLQLELKSVNSRYLDFHFRVSDELRSLEMPLRELLAARLSRGKVECRLSFNASAARADQLQLNGELLASLKLLSERVRHEMPDASPLSVNETLRWPGMFGDQSVDFAAFGPVVMALAREVLDEFTASRGREGDKLAAMIVERVNGMRDIVRRVAPRIPEAQAIFTDKLRQRLTEALGNASDDRILQEVAVFATRIDVAEELSRLTTHLDEVERVLKQGGACGKRLDFLMQELNREANTLGSKSAITEVSQASMDLKLLIEQMREQIQNLE

SEQ ID NO: 1591 - DNA, 867 bp, Thiobacillus denitrificans ATCC 25259
  CDS (1)..(867): transl_table=11
atgaccaccagcatgaccgggttcgccgcccacagcttcaatgtcgaccatgcgagcgtcaatgtcgagctgcgaagcgtcaaccaacgttatctcgaactgcacttccgcctcgccgatgagttccgtccgctcgaaacgcagctgcgtgaactgcttcagcagcgcctggcgcggggcaaggtcgagtgcaggatcggcctggcgcacctgtccgccgccccgcccgataacggcctgaatccggccattcttgagcggctggtgcgttggcaggacgacgtgctcgagcggctccccggcgccgcccccttgagcgtcaacgaagtgctgcgctggccgggggcgatgcaaaacgccgtggtatcgcaggcgacgctcgacgaggcagcgctcgccgggtttcgcgcagccctcgacgaactcgtggaaagccggcgccgcgaaggcgccaagctgcggcagcacatcctcgatcgcctcgatgccgccgaggcgcaggtcgccgtcctgaagccgctgctgcccgttcttgccgcagcccagcgcgagaaactcggcgagcgcctgcgcgaggccctcggcgaggccggccacgagcggctcgcccaggaagtggcgctcgccgcccagaaggtcgacgtcgacgaggaagtgtcgcgcctggctacccacttcaccgaggtgaggcgcgtgctcgatcagtccggcgcggtcggcaagcgcctcgacttcctgatgcaggaattgcatcgcgaagcgaacacgctcggctcgaagtcggtcgcggtcgagacctcgcgcacctcgctcgaactcaaggtgctgatcgagcagatgcgcgagcaggtgcagaatattgaatga

SEQ ID NO: 1592 - protein, 288 aa, Thiobacillus denitrificans ATCC 25259
MTTSMTGFAAHSFNVDHASVNVELRSVNQRYLELHFRLADEFRPLETQLRELLQQRLARGKVECRIGLAHLSAAPPDNGLNPAILERLVRWQDDVLERLPGAAPLSVNEVLRWPGAMQNAVVSQATLDEAALAGFRAALDELVESRRREGAKLRQHILDRLDAAEAQVAVLKPLLPVLAAAQREKLGERLREALGEAGHERLAQEVALAAQKVDVDEEVSRLATHFTEVRRVLDQSGAVGKRLDFLMQELHREANTLGSKSVAVETSRTSLELKVLIEQMREQVQNIE

SEQ ID NO: 1593 - DNA, 891 bp, Rhodobacter sphaeroides 2.4.1
  CDS (1)..(891): transl_table=11
atgatcagctcgatgaccggcttcgcggcgcgccgcggccagggcgagggccactcctggctctgggaactgcgctcggtgaacggcaagggcctcgatctgcggttgcgggtgccggactggatcgaggggctggagcccgcgatccgggccgaactcggccgggttctgcaacggggcagcgtcagcctctcgctcaaggtcgcggccgagggcggaacggacgggctccgggtcaacgtcggcgcgctccagtcgatgctgcgcgcgctggccgaggtttcggcggctgcgcacggctcggggatcgagctgcgcccggcgagcccggccgacgtgctggggctgcgtggcgtcctcgaacaggcgacgggggtcgaggatacgggcccgctccgcgcggcgctgctggccgaactgccggagctgctggcggccttcaccgagatgcggcgcagcgagggcgaggctctggcccggctgatcggcgcgcagctcgaccggatcgaggcgcttactgccgaggcccgcaccgaggccgaggcgcgccgcgaggccgcgccattcgcgcttcgtgaaaatctggcccgtctcctcgcggcaggcgagggtctcgacgagacccgcatcgcgcaggagctggcgcttctggccgtcaagcaggacgtgaccgaagagctcgaccggctggcggcccatgtcgcggccgcccgcacgcttctgggcgagacggcgcccgtggggcggcggatggatttcctcgtgcaggagttcatgcgcgaggccaacacgctctgctcgaaggcgcagtcgctggcgctgacgcgggtcgggctcgacctgaagaccgtcatcgaccagatgcgcgagcagatccagaacgtggagtaa

SEQ ID NO: 1594 - protein, 296 aa, Rhodobacter sphaeroides 2.4.1
MISSMTGFAARRGQGEGHSWLWELRSVNGKGLDLRLRVPDWIEGLEPAIRAELGRVLQRGSVSLSLKVAAEGGTDGLRVNVGALQSMLRALAEVSAAAHGSGIELRPASPADVLGLRGVLEQATGVEDTGPLRAALLAELPELLAAFTEMRRSEGEALARLIGAQLDRIEALTAEARTEAEARREAAPFALRENLARLLAAGEGLDETRIAQELALLAVKQDVTEELDRLAAHVAAARTLLGETAPVGRRMDFLVQEFMREANTLCSKAQSLALTRVGLDLKTVIDQMREQIQNVE

SEQ ID NO: 1595 - DNA, 879 bp, Geobacter metallireducens GS-15
  CDS (1)..(879): transl_table=11
atgatcaagagtatgaccggctacggcaaggccgtggtcgaaacggaaacagggcggaccaccgtcgagatacggtcggtgaaccaccgctacggcgaggtcttcgtcaagatgccccgctcgttcctggccttcgagaatgacgtgcgcaaggccgtgggggaccgtctgaagcggggaaagatcgaagtcttcgtgcagcgtgaggagggagttggcggtcagaatcagccgctggtgaaccttcccctggcacgggcctaccgtgatgcgttcgagcggatgcggtccgaacttggtctggctgatccggtgaccctgccgctcctcctctcccagcgggacgtcctggctgcccgggaggagggggccgatgaggatatcctccggggcgagcttctccaggcggttcgtggcgcggtggaggccatggaggccatgaggatgcgcgaaggcgaagcgctcctggccgatctcagggaccgccgccagacccttgcgacgctcattgaccgggtggccgagcgtgcacccgccgtggtcgctgactatgcccagaagctgcgggagcggcttgcgcagcttctcgccgatacgaccctcgacgaagcgcggctcgcccaggaggtggcgctactggccgaccggtgcgatgttaccgaggagttggtccgtttccggagccacctgatccagttcgacgagacccttgcccttgcggagccggtggggcgcaagctggatttcctcatgcaggagctgaaccgcgaggtcaataccatcgggtccaaggccaatgacgccgccatggccgccatcgtggttgaactgaaggccgaactggaaaagatccgtgaacaggtacagaacatagaatag

SEQ ID NO: 1596 - protein, 292 aa, Geobacter metallireducens GS-15
MIKSMTGYGKAVVETETGRTTVEIRSVNHRYGEVFVKMPRSFLAFENDVRKAVGDRLKRGKIEVFVQREEGVGGQNQPLVNLPLARAYRDAFERMRSELGLADPVTLPLLLSQRDVLAAREEGADEDILRGELLQAVRGAVEAMEAMRMREGEALLADLRDRRQTLATLIDRVAERAPAVVADYAQKLRERLAQLLADTTLDEARLAQEVALLADRCDVTEELVRFRSHLIQFDETLALAEPVGRKLDFLMQELNREVNTIGSKANDAAMAAIVVELKAELEKIREQVQNIE

SEQ ID NO: 1597 - DNA, 888 bp, Rhodospirillum rubrum ATCC 11170
  CDS (1)..(888): transl_table=11
atggccctttcgagcatgaccggttttgcccgtacccagggggccctggggccgcagacctgggtctgggaggcgcgcagcgtcaatggcaagggtctggatatccgcctgcgcctgccaccgggcggcgacgcccttgaccagccggcccgccgcgccgtggccgagcgtttcaagcgcggttcgatctcgcttggcctgaccatgaccagcgacgatcaggaacaggcctatcgggtcaatgagccgctgctcaaaaagctgctggccgtgacccgcgagttggcgatggacggggtggaccggccgcgcatggatggcctgctcgggttgcgcggcgtgcttgaaccggttggccaagccgaagaggagggcgtccgcgaggcccgcgaggcggcccagctgcgcagcctggaagccacccttgacgccctggccctggcgcgcagcgaggaaggcgggcgtctggccggggtgctggcggggcatctcgaggttttggaagacctgcgcgcccaggccgccaacgccgaggccctgcgccccgacatggtgcgcgcccgcctgcgccgtcagatggccgacctgcttgaggccgcccccgatgccctgcccgaggagcggctggcccaggaactggccctgctggcggtcaaggccgatatccgcgaagagcttgatcgcctgggcgcccacctggaaggggcgcgcgagctgcttacccgcggcgaggcgatgggccggcgcttggagttcctgtcccaggagctgaaccgcgaggccaacaccctgtgctcgaaatcctccgacgtcgccttgacccgcatcgggttggacatgaaggcggtgatcgaccaattccgcgaacaaatcctcaatatcgaatag

SEQ ID NO: 1598 - protein, 295 aa, Rhodospirillum rubrum ATCC 11170
MALSSMTGFARTQGALGPQTWVWEARSVNGKGLDIRLRLPPGGDALDQPARRAVAERFKRGSISLGLTMTSDDQEQAYRVNEPLLKKLLAVTRELAMDGVDRPRMDGLLGLRGVLEPVGQAEEEGVREAREAAQLRSLEATLDALALARSEEGGRLAGVLAGHLEVLEDLRAQAANAEALRPDMVRARLRRQMADLLEAAPDALPEERLAQELALLAVKADIREELDRLGAHLEGARELLTRGEAMGRRLEFLSQELNREANTLCSKSSDVALTRIGLDMKAVIDQFREQILNIE

SEQ ID NO: 1599 - DNA, 879 bp, Moorella thermoacetica ATCC 39073
  CDS (1)..(879): transl_table=11
atgttgaacagcatgacgggctacggccggggcgaggccagcggcgccggcaaaaccgtgagcgtcgagatccgggccgtcaaccagcgcttcctggacgtagtagtgcgcctgccccgggcctacggcgccctggaagaaaagatccgtcaggagttgaaaaaaagcctcaaccggggccgtgtcgaggtagtactgactataaaggaagataatgcggaaaaacggcccgtcaacgttgacacgggactggcaatggcgtattataatgctttgaaggaattggctcaaaaattgtctatttcggcggatattaccgctgccgggctgttatccctgccggaagtcatcacagtagccgaaccggagtgggacgaggctactttatggccggtggtagccagggccctggcagcggccctggcaggtctcctggaaatgcgccgggccgaggggcagcgcctccaggccgacctggaggcccgggccgcttttgtccgccgccaggtggaagccatccgcgagcgcgcgccggaggtgccgcgggaatacgccgcccgcctgcgggagcgcgtggacgaactgaccggcggtatggccctcgacccgggccgcctggagatggaagtagccctgatggcggagcgcgctgacatcaccgaagaggtcgtccgtcttaccagccacctggagcagatgcaggccgccatggctggcgccgaaccggccgggaggcggctggactttatcctccaggaaatgtggcgggagataaataccatcgggtccaaggccggcgatctgaccatcagccacctggtagtagcggtcaagggcgagctggaaaagatgcgcgagcaggtccagaacatcgagtag

SEQ ID NO: 1600 - protein, 292 aa, Moorella thermoacetica ATCC 39073
MLNSMTGYGRGEASGAGKTVSVEIRAVNQRFLDVVVRLPRAYGALEEKIRQELKKSLNRGRVEVVLTIKEDNAEKRPVNVDTGLAMAYYNALKELAQKLSISADITAAGLLSLPEVITVAEPEWDEATLWPVVARALAAALAGLLEMRRAEGQRLQADLEARAAFVRRQVEAIRERAPEVPREYAARLRERVDELTGGMALDPGRLEMEVALMAERADITEEVVRLTSHLEQMQAAMAGAEPAGRRLDFILQEMWREINTIGSKAGDLTISHLVVAVKGELEKMREQVQNIE

SEQ ID NO: 1601 - DNA, 867 bp, Saccharophagus degradans 2-40
  CDS (1)..(867): transl_table=11
atgccacgcagcatgacgggctttgcacgattagaacaacaatacgactggggcaccctctcctgcgaagttcgcacagtaaaccaccgctatttagaacccactattcgcatgcccgaatccttgcgtgccaccgagcccaaattgcgcgatcaaatacgcaaaaaactcagccgcggcaaagtagaagccaacgtgcacctgcgcacagaagcggccgactcctctaaccttggcttaaaccttactctagcaaaacaattggcaaaaatgagtgagcaactaagcgcagaactggctaacgccgcccccattaacccagtagagattctgcgctggccgggcgtaattcaaaccgcagaagtagacgccgaagtactgcaagctgccaccaccgagctatttaataaaacgctggaccagctcatcgccaaccgcgaccgcgaaggcgccgaactaggccaacttatagagcagcgcctaaacgccattgccgagcatgtggtagacgtacgcaagcgcgtacccgaaatacttgcccaatttcaagaaaagctacacgcaaaactagaagcgctaaaaatagaagtagacgaagatcgcttccaccaagaagttgtttacgtaacacaaaaatccgatgtagcagaagagctagaccgccttgaagcacacctaaccgaagtgcgcctagccctaaaacaaaaaggccccatcggccgccggttagattttttaatgcaagaattaaacagagaagccaacacactctcatcgaaatccatggcgagtgacaccactcaaaccgctgtagatttaaaagtacttatcgaacaaatgcgcgaacagattcaaaatatcgaataa

SEQ ID NO: 1602 - protein, 288 aa, Saccharophagus degradans 2-40
MPRSMTGFARLEQQYDWGTLSCEVRTVNHRYLEPTIRMPESLRATEPKLRDQIRKKLSRGKVEANVHLRTEAADSSNLGLNLTLAKQLAKMSEQLSAELANAAPINPVEILRWPGVIQTAEVDAEVLQAATTELFNKTLDQLIANRDREGAELGQLIEQRLNAIAEHVVDVRKRVPEILAQFQEKLHAKLEALKIEVDEDRFHQEVVYVTQKSDVAEELDRLEAHLTEVRLALKQKGPIGRRLDFLMQELNREANTLSSKSMASDTTQTAVDLKVLIEQMREQIQNIE

SEQ ID NO: 1603 - DNA, 867 bp, Methylobacillus flagellatus KT
  CDS (1)..(867): transl_table=11
atgattttcagcatgacgggttatgcctcgctggagcaagaggtgagccatggtgttctggtgctagaactgcgctcggtcaatcatcgctacctcgaattacaactcaagctggatgacaatgtgcgcatgttcgaaccacaggtgcgcgagctgatcggccagcgcctcaagcgtggcaaggtggaatgccgcatcagcctggctcagcgtgataccgagcaacggcaagtgcaactggatgatacggtattgcagcaattagcacagatgatggtcagcgtgcagcgccattttccggaaagccggcccttgagcgtggcggacattctgcgatggccgggggtagtgtcgagtgaagggatagaccacgaagccctgtcgatcgccattcgtgaaagcctgatgaagctggtgcagcagatgaccgaagcacgcgcacgcgagggcgccaagctcaaggccatcattgtcgaccgcctggcggaaatggaaactctggttgacagggtgcgtcccttgcttcctgagcaggtcaatatctaccgggagcgcctttatggcaaattgcaggatgcgatgggttcggcggatgatgagcgtatccgccaggagctcaccatctttgcccagcgtattgatgttgatgaggagctgagccgcctgggcgcgcatatagaggaagtcaagcgcattctcgaggcgggcagcccggcaggtaagcagctggatttcctcatgcaggaattgaaccgcgaggccaatacgctggcttccaagtctgtttccaccgaagtatcacaggccgccatggcactcaagctgctgatcgagcaaatgcgcgagcaggtgcagaacatagaatag

SEQ ID NO: 1604 - protein, 288 aa, Methylobacillus flagellatus KT
MIFSMTGYASLEQEVSHGVLVLELRSVNHRYLELQLKLDDNVRMFEPQVRELIGQRLKRGKVECRISLAQRDTEQRQVQLDDTVLQQLAQMMVSVQRHFPESRPLSVADILRWPGVVSSEGIDHEALSIAIRESLMKLVQQMTEARAREGAKLKAIIVDRLAEMETLVDRVRPLLPEQVNIYRERLYGKLQDAMGSADDERIRQELTIFAQRIDVDEELSRLGAHIEEVKRILEAGSPAGKQLDFLMQELNREANTLASKSVSTEVSQAAMALKLLIEQMREQVQNIE

SEQ ID NO: 1605 - DNA, 948 bp, Burkholderia xenovorans LB400
  CDS (1)..(948): transl_table=11
atggccacaatcgcgagaaatacgatgatctacagcatgactggctatgcgagcgccacgcgcgaactcgtcggggcctcaggcacaggcggcgtgagcgtatcggtcgaactgcgcacggtgaactcgcgctttctcgatctgaacttccgcatgccggaagacgtgcgcgtgagcgaacccacgctgcgcgaaatgttgatgaacaagctgtcgcgcggcaaggtcgatatccgtatcaatctgcaacgcagcgagcagtccgccaacgcgggctcgatcaatcgcgaagcactggcgcaactcgcgctgctcgaacgcacggtgctctccacgtttccggaagcggggcggctgcgtaccggcgaaattctgcgctggcccggcattcttgcggaaagcggcgtggcgcccgaagtgctgcgcgacgccgtgctcgcgtgcggcaagcaggccattacggacctgatcgacgtgcgcgcccgcgaaggtgcgcaactggcgaccatgctgctcgccaacgtcaccgaaatggaagcgatcgtcacgaagatcacgccgctcgtgccggaactgatcgccaagcaccagcagaagattgtcgagcgcttgcaggaagcgctcggtatcgccgcgccggatacggcggcgacgagcgtctcgcgcgaagaaatcaatgaacggattcgccaggaagtgacgatgtacggcatccgtatcgacatcgccgaagaactgtcgcgcctcacggcacacctgaacgaaacgcgtcacgtgatccagaagggcggcaaggtcggcaagcgcctcgacttcatgatgcaggagctcaatcgcgaagcgaacacgcttggttcgaaggcggccgcgaaggaactggcggattcgtcgatgaccctgaagctgctcatcgaacagatgcgcgaacaggtacagaatctggaataa

SEQ ID NO: 1606 - protein, 315 aa, Burkholderia xenovorans LB400
MATIARNTMIYSMTGYASATRELVGASGTGGVSVSVELRTVNSRFLDLNFRMPEDVRVSEPTLREMLMNKLSRGKVDIRINLQRSEQSANAGSINREALAQLALLERTVLSTFPEAGRLRTGEILRWPGILAESGVAPEVLRDAVLACGKQAITDLIDVRAREGAQLATMLLANVTEMEAIVTKITPLVPELIAKHQQKIVERLQEALGIAAPDTAATSVSREEINERIRQEVTMYGIRIDIAEELSRLTAHLNETRHVIQKGGKVGKRLDFMMQELNREANTLGSKAAAKELADSSMTLKLLIEQMREQVQNLE

SEQ ID NO: 1607 - DNA, 936 bp, Ralstonia metallidurans CH34
  CDS (1)..(936): transl_table=11
atgatccacagcatgacaggctatggcctggccacgggccaggcaccgctcaccaacgcccagggcgaaccgagtggccgtaccgcgtcggtttcggtggagttccgcactgtcaactcgcgcttcctcgacctgctgttccgcgcgccggaagagtgtcgcgccttcgagccggccctgcgcgagatgctgatgggcgagctgtcgcgtggcaagctggagtgccggatcaacctccagcgcaccgacaccggcggcgccacgctggcgctgaaccagacactgctcgaccagatccgtgcgctcgaagccaccgtcggggcaacgtttgcttcggccggcacgatgcgcatgggcgaaatcctgcgctggccgggcgtgctggtggagcccgaactgtcgcaggaagccctgcgcgatgccgtgatgggcgccgcccgggaagcgctgaaccagcttctggaagcccgccgccgtgaaggcgcggcgctcaaggccacgctggaggagcggatcgacgccatgctggcgatcgtcgagcgcctgacgccgatgattccgcagttgatcgcccaccaccaggaaaagctgaccgaacgcctgaaggaggcttttaacctggtcgcgccgaacggcatgccgtcaatgagccgcgacgagattgccgagcgcatccgccaggaagccacggtctacggcatccgcatcgacatcgccgaagaactggcgcgcctgcagacccatctcaacgaaacccggcatatcctgaagaagggtggccaggtcggtaagcggctggacttcatgatgcaggagctcaaccgcgaagcgaacacgctcggctcgaaagccgccgcgaaggaactcgccgatgcctcgatggagctcaagctcctgatcgagcagatgcgcgagcagattcaaaacctcgaataa

SEQ ID NO: 1608 - protein, 311 aa, Ralstonia metallidurans CH34
MIHSMTGYGLATGQAPLTNAQGEPSGRTASVSVEFRTVNSRFLDLLFRAPEECRAFEPALREMLMGELSRGKLECRINLQRTDTGGATLALNQTLLDQIRALEATVGATFASAGTMRMGEILRWPGVLVEPELSQEALRDAVMGAAREALNQLLEARRREGAALKATLEERIDAMLAIVERLTPMIPQLIAHHQEKLTERLKEAFNLVAPNGMPSMSRDEIAERIRQEATVYGIRIDIAEELARLQTHLNETRHILKKGGQVGKRLDFMMQELNREANTLGSKAAAKELADASMELKLLIEQMREQIQNLE

SEQ ID NO: 1609 - DNA, 864 bp, Haemophilus somnus 129PT
  CDS (1)..(864): transl_table=11
atgatttacagtatgacggcctttgctcgtgttgaaattaaaaaagaatggggggatgccgtatgggaaattcgctcggtcaatcaacgttatttagaaaccttttttcgtttaccggagcaatttcgaggattggaaaatactttgcgtgaaaaattacggcaaaaactggctcgaggtaaaatcgaatgtagcttgcgtattgacactaaaaaacaaaccgcactcaacttaaatcttaatcaaaagttcgccaaacaggttattcaatctttgcaatatataaaagcacaagccggagagggtgaaatcaatctgatggatattttacgctaccccggtgtagtggaaacgccggaacaagacttggacagtatcatcgaagatttgttgcaagcctttgatgatttgcttgtggagtttattgcaacacgagctcgtgagggagaaaaagttcaaaaattaattgaacaacgccttatggcaatttccgttgaggcacaaaaagtgcggtcttttatgccggaaatattgcaatggcaacgagatcgtttgcaacaacgttttgatgaaattcaattacaagcagatacacaacgtattgaacaagaaatggtgctattggcacaacgtattgatatagctgaagagctggatcggctacaattacatgtaaaagaaacatacgctattttgcacaaaggcggggctgtcgggcgtaaacttgattttatgatgcaagaacttaatcgtgaaagtaatacgcttgcgtctaaatctattaacgccgatattacctcatcagcggttgaattaaaggtcttaattgaacaaatgcgtgaacaaatccaaaatcttgaataa

SEQ ID NO: 1610 - protein, 287 aa, Haemophilus somnus 129PT
MIYSMTAFARVEIKKEWGDAVWEIRSVNQRYLETFFRLPEQFRGLENTLREKLRQKLARGKIECSLRIDTKKQTALNLNLNQKFAKQVIQSLQYIKAQAGEGEINLMDILRYPGVVETPEQDLDSIIEDLLQAFDDLLVEFIATRAREGEKVQKLIEQRLMAISVEAQKVRSFMPEILQWQRDRLQQRFDEIQLQADTQRIEQEMVLLAQRIDIAEELDRLQLHVKETYAILHKGGAVGRKLDFMMQELNRESNTLASKSINADITSSAVELKVLIEQMREQIQNLE

SEQ ID NO: 1611 - DNA, 864 bp, Shewanella sp. MR-4
  CDS (1)..(864): transl_table=11
atgatccaaagcatgacagcctacgctcgcatcgagcacaaagcacaatggggcactgcctcttgggaaattcgctcagtcaaccagcgttatctcgaaacttacctacgtctgccagaacaattccgcagcttcgaacccgtactgcgcgatcgtctgcgtaaacgcttaagccgcggtaaagtcgaggtcaatttacgctacgagttagccgacaacagcaataacgaactcaaattaaaccaagggttagctaagcagttgctcgacgctgccagctggttaaaacaagaagccggccaaggcgaagtcagcctaactgatattttgcgctggccaggcgtgctctcaagctcagagcaagatatggacgccataggcgccgagctattaacggctttcgatttagcgatagaccagtttatcgaagcccgtggccgcgaaggagcagcgattaaagacatgctgttaagccgtttagaaggcgtcgaagaacaaatcgctatcgtgcgcaagcacatgcctaaagtgatggaatatcagcgcgataaactcactaatcgcctcgctgagatcaaaggtgaactcgaccccgcccgcatcgagcaggagatgatcctgttagcacaaaaacaagatgtggccgaagagatggacagactcgaagcccatgtcaccgaagcgcgccgcatcctcaaaaaaggcggcagcgaaggccgccgcttagattttatgatgcaggaatttaaccgcgaatctaacaccctcgcctcaaaatccatcagcaccgaaatcaccgccgccgcagtcgagctcaaagtacttatcgaacaaatgcgcgagcagatccagaacgttgaatag

SEQ ID NO: 1612 - protein, 287 aa, Shewanella sp. MR-4
MIQSMTAYARIEHKAQWGTASWEIRSVNQRYLETYLRLPEQFRSFEPVLRDRLRKRLSRGKVEVNLRYELADNSNNELKLNQGLAKQLLDAASWLKQEAGQGEVSLTDILRWPGVLSSSEQDMDAIGAELLTAFDLAIDQFIEARGREGAAIKDMLLSRLEGVEEQIAIVRKHMPKVMEYQRDKLTNRLAEIKGELDPARIEQEMILLAQKQDVAEEMDRLEAHVTEARRILKKGGSEGRRLDFMMQEFNRESNTLASKSISTEITAAAVELKVLIEQMREQIQNVE

SEQ ID NO: 1613 - DNA, 867 bp, Alkalilimnicola ehrlichei MLHE-1
  CDS (1)..(867): transl_table=11
atgacccgcagcatgaccgccttcgaccgacagcagcaccaggccgagtggggccgcatcagctgggagctgcgctcggtaaaccaccgctacctggatgtgcaaccgcgccttcccgaggagctgcgccacctggagccggccgtgcgcgaacgcatcggggcccgcctgggccgcggcaaggtggagtgcaccctgcggttcaaacccgccgccgactaccgcggccggttgctcatcgacgaggcttacgccgaccaggtgatcgaggccgcccgcgccctgggccagcgcgtgggggccgatccggccgccaccggcctggacctgctgcgtatccccggggtgctgcaggagagcgaccccgacctggagccggtggccaacgccgcattggcgctgctcgatcactgcctggacggtttcgaggccgcccgcgagcgcgagggtgagcgcctggcgcgcatcctgcgcgaccgctcggcccggctcagcgagctggtggaccaggtcagggcgcaacgggaacaggtcaacgaccgggtgcgggagaagttcctcacccgcctggagagcctcgatgtggaggcggacgaggggcgcctggagcaggagctggccattatcgcccagaagctggacgtggacgaggaactggagcggctccaggcccactgcgccgaactggaagacgccctaaagcgccgcgaacccatcggccgccggttggacttcctgatgcaggaattcaaccgcgaggccaacaccctgtcctccaagtccaacgacaccgagaccacccgcgccgcggttgagatgaaggtgctgattgaacagatgcgggaacaggtccagaacatcgaataa

SEQ ID NO: 1614 - protein, 288 aa, Alkalilimnicola ehrlichei MLHE-1
MTRSMTAFDRQQHQAEWGRISWELRSVNHRYLDVQPRLPEELRHLEPAVRERIGARLGRGKVECTLRFKPAADYRGRLLIDEAYADQVIEAARALGQRVGADPAATGLDLLRIPGVLQESDPDLEPVANAALALLDHCLDGFEAAREREGERLARILRDRSARLSELVDQVRAQREQVNDRVREKFLTRLESLDVEADEGRLEQELAIIAQKLDVDEELERLQAHCAELEDALKRREPIGRRLDFLMQEFNREANTLSSKSNDTETTRAAVEMKVLIEQMREQVQNIE

SEQ ID NO: 1615 - DNA, 885 bp, Hyphomonas neptunium ATCC 15444
  CDS (1)..(885): transl_table=11
atgggtacactgtcggggatgacggggttcgcgcgggtaaccggcgaagccagctggggcgggtgggcctgggaggccaaaagcgtcaatggccgctcgctggatgtacgcgtaaacctgccgccgggcgctgagcagctcgagcgtgaggtcaaggccatggcggcagcacgcttcaatcgcggctcgctccaggtcagcctgcgtattgaacttgctgcatcgggcgccgcggccgttatcaatgaggcattgctttcggagctcgcccaggcggcgcgcaaggtttccgggcgcgagctttccgccgaagccatcgcgacactgatgtcggtaaagggcgtcgtcgatgccggatcaagctccacccgcgatataatggatgaggcggtgcttgcgctgctctccactggcgccgcgcaggcgctcgacgagcttgccgaaggacgcaaatctgaaggcgcctcactggagggtcttcttggtgatctcctcaaccaaatggagcacttgaaggctgaggcagagacccacgccgcgagccagcccgagctgatccgcgcgaaattgacgaaacagcttgaggatttggaccgcgaagggcgggtggacgccgagcgttatgccgccgaagtggccctgtcagcggccaaggcggatgtccgcgaggagttggatcgtctatcggcgcatatcaagacgggccgcgaattgctcagtgcaggctcgccggccgggcgcaagattgattttctggcgcaggagctgaaccgcgaagccaacaccctctgctccaaatccatcagcctcgatttgacgaatgcgggccttggcctcaaaggggtgatcgaccagttcaaggagcaatcggccaatgtcgaatag

SEQ ID NO: 1616 - protein, 294 aa, Hyphomonas neptunium ATCC 15444
MGTLSGMTGFARVTGEASWGGWAWEAKSVNGRSLDVRVNLPPGAEQLEREVKAMAAARFNRGSLQVSLRIELAASGAAAVINEALLSELAQAARKVSGRELSAEAIATLMSVKGVVDAGSSSTRDIMDEAVLALLSTGAAQALDELAEGRKSEGASLEGLLGDLLNQMEHLKAEAETHAASQPELIRAKLTKQLEDLDREGRVDAERYAAEVALSAAKADVREELDRLSAHIKTGRELLSAGSPAGRKIDFLAQELNREANTLCSKSISLDLTNAGLGLKGVIDQFKEQSANVE

SEQ ID NO: 1617 - DNA, 888 bp, Magnetococcus sp. MC-1
  CDS (1)..(888): transl_table=11
atgcccaacagtatgaccggcattggtcggagcgaagcgagcgtgcagggcatgcgtcttgcttggcgtttgcgcagtgtcaaccaacgctttttagagatgaatctgcgtctacccgatctctttttggatgcggagccacggtttcgccaacgtctacgggggcactttgcgcgtggttcggtggaggcgacactgaccatgcagcaggatggccccagtcaggttaaaatgcagcttgatcgggaacggcttggtcagatcctggcggctgagaagaacatgcgcgaactggatggctctcaccgtggtgagctcagtatggatcggctgctctcctggcctggggtgctcaaggagttgcccgttgcgtgggatagccagcagttggaagagatttggcaccaagcggacagcttgcttgagtctgcttgtgaggagatgacccagtttcgtggtcgcgaaggggccgcgctggcgcagggtattttggagcgcctacacgagctggagcagttggcccagcagatcgaggcggatctacccagagtgcgggagattttggagaagcgtctgcacgaaaagttggcgcagattgcagaaaatcctgccgatcccgcgcgcatggcgcaagaggtgggctatttgctgaccaaggtggatgtatcagaggagttggagcgtctttcgatccatattcgtgagatgcgtgacacgttagagctcagtgagccagtggggcggcgtttagattttctttgccaggagcttaatcgggagtccaacaccctctgctccaaaccccaagatccgaccatttcccgtattggtgtggatatgaaagtagccatcgagaagatccgggagcaggtacaaaatctggagtag

SEQ ID NO: 1618 - protein, 295 aa, Magnetococcus sp. MC-1
MPNSMTGIGRSEASVQGMRLAWRLRSVNQRFLEMNLRLPDLFLDAEPRFRQRLRGHFARGSVEATLTMQQDGPSQVKMQLDRERLGQILAAEKNMRELDGSHRGELSMDRLLSWPGVLKELPVAWDSQQLEEIWHQADSLLESACEEMTQFRGREGAALAQGILERLHELEQLAQQIEADLPRVREILEKRLHEKLAQIAENPADPARMAQEVGYLLTKVDVSEELERLSIHIREMRDTLELSEPVGRRLDFLCQELNRESNTLCSKPQDPTISRIGVDMKVAIEKIREQVQNLE

SEQ ID NO: 1619 - DNA, 867 bp, Azoarcus sp. BH72
  CDS (1)..(867): transl_table=11
atgatccatagcatgaccggtttcgcggtgcagacccgcgatcttggccccgtgagccttcatctcgagctgcgcagcgtcaattcccgctatctggacctgtccttccgcatcgtcgaggacctgcgccaggcggagccggccatccgcgagcagatcgcggccaagctgacgcgcggcaaggtcgaatgccgtctgaatctgcacaccaacgatgccgccccgcgcagcctcgcgctcaacaacgccctgctcggccagcttgccgacgcccaggccgcggtgcgccgccagttcgccgacgcccagccgctgtcggtgggcgaagtgctgcgctggcccggcatgctcgccgacgacagcctcgcgttcgagcagatgcagccggtgatcgccgaactggccaaggccgcgctcgacgaactggtcgccacccgccgccgcgaaggcgacaaactcgcggcgatgatccgcgaacgcgtggtgcgcatgcgcgaactggtcgcgatcgccaccccgcgcatgccggccatcgtcgccgaataccaggacaagctcaccgcccgcctgcgtgacgcagtggcttcgctcgacgaagaccgcgtgcgccaggaagtggcgctgttcgcccagcgcatcgacgtcgccgaggagctgtcgcgcctcgccacccacctcgacgaggtcgaacgcatcctcaaggccggcggctcggccggcaagcggctggatttcctgatgcaggaactcaaccgcgaggccaacaccctcgcctccaagtccgccgccaccgacatcaccaacatcgcgatggaactgaaggtgctgatcgagcagatgcgcgagcaggtgcagaacatcgagtaa

SEQ ID NO: 1620 - protein, 288 aa, Azoarcus sp. BH72
MIHSMTGFAVQTRDLGPVSLHLELRSVNSRYLDLSFRIVEDLRQAEPAIREQIAAKLTRGKVECRLNLHTNDAAPRSLALNNALLGQLADAQAAVRRQFADAQPLSVGEVLRWPGMLADDSLAFEQMQPVIAELAKAALDELVATRRREGDKLAAMIRERVVRMRELVAIATPRMPAIVAEYQDKLTARLRDAVASLDEDRVRQEVALFAQRIDVAEELSRLATHLDEVERILKAGGSAGKRLDFLMQELNREANTLASKSAATDITNIAMELKVLIEQMREQVQNIE

SEQ ID NO: 1621 - DNA, 900 bp, Magnetospirillum magnetotacticum MS-1
  CDS (1)..(900): transl_table=11
ttgaccgtcgccagcatgaccggctatgcccgggccgaaggccgcgacacccagggctcttgggtgtgggaaggcaaaagcgtcaacgggcgcggcctggaactgcggtgcaagtcggcgccgggctatgacggtctggaagtggcggcccgcgaggcggcggccaagcgcctgaagcgcggcaatgtccagatctcgctcaccgtgcgctccgagaccgaacaatcccagatccgcgtcaacgaggccatgctggaacaattgctgggcatctgccgccagtggcagggccgcttccccgagatcacgcccgcccgcatggacggattgctggccatcaagggcgtgctggaaccggtgaccgaggccgagaccggcgatgccgacaccttgcgcgccgcccgcgagggcgccatgaaggcctcgctggaggccatgctcgaccagttggccgccatgcgtcaggtggaaggtactcgcatcggcgccgtgctgaccgcgcagttggatgagatcgccaccctgtcggccaaggcgggtgaatgcgccgtgctgcgccccgaagcggtgcgcgaacgcctgcgcgcccaggtggctcaggtgctcgacgccgcgccgaccctggccgaggaccgcatcgcccaggaagtggcgctgatcgccgtcaaggccgatgtgcgcgaagaactggaccgtctggccgcccatgtggccgccgcccgcgatctgctggcccagggcggtgccatcggccgcaagctggacttcctggcccaggagttcaaccgcgaggccaacacgctgtgctccaaatcatcggacgtggaactgacccgcgtcggactcgacctcaaagccgtcatcgaccagttcaaagagcaggtccagaatatcgagtag

SEQ ID NO: 1622 - protein, 299 aa, Magnetospirillum magnetotacticum MS-1
MTVASMTGYARAEGRDTQGSWVWEGKSVNGRGLELRCKSAPGYDGLEVAAREAAAKRLKRGNVQISLTVRSETEQSQIRVNEAMLEQLLGICRQWQGRFPEITPARMDGLLAIKGVLEPVTEAETGDADTLRAAREGAMKASLEAMLDQLAAMRQVEGTRIGAVLTAQLDEIATLSAKAGECAVLRPEAVRERLRAQVAQVLDAAPTLAEDRIAQEVALIAVKADVREELDRLAAHVAAARDLLAQGGAIGRKLDFLAQEFNREANTLCSKSSDVELTRVGLDLKAVIDQFKEQVQNIE

SEQ ID NO: 1623 - DNA, 864 bp, Haemophilus influenzae R2866
  CDS (1)..(864): transl_table=11
atgatttacagtatgacagcttttgcacgccttgaagtgaaaaaagattggggtgatgcggtatgggaaattcgttccgttaatcaacgttatttagaaaactttttccgtttgcccgagcaatttcgcggattagaaaacacgttgcgtgagaaacttcgccagagtcttactcgcggtaaaattgaatgttctttgcgcattgaaacaaaaaaacaagcaaatgcagaattgaatttaaataaagagcttgcgaatcaagtgattcaatctttgcaatggattaaagctcaggctggagaaggtgaaattaatttgacagacgtgttgcgttatcccggtgtggtggaagcgcaagagcaagatttagatgcgattagtcaagatttattgacagcctttgatgatttactgacagattttattgcaatgcgtggtcgtgagggggaaaaactgaacgatattattcaacaacgcttagatgccattgctgtggaagcggataaagtgcggtcacaaatgccagcagttttacaatggcagcgtgaacgtttattgcaacgttttgaagatgctcaagttaatcttgatccgcaacgtgtggaacaagaaatgattttactcgctcaacgcgttgatgtggcggaagaactcgatcgtttacaaatgcacgtgaaagaaaccacgaatattttgaaaaaaggcggtgcagttggacgtaaattagattttatgatgcaagaattgaatcgggaatccaatacccttgcatctaaatccattaatgcagatatcacggcttctgcggtggagctaaaagtgcttattgaacaaatgcgtgagcaaattcagaatttagaatag

SEQ ID NO: 1624 - protein, 287 aa, Haemophilus influenzae R2866
MIYSMTAFARLEVKKDWGDAVWEIRSVNQRYLENFFRLPEQFRGLENTLREKLRQSLTRGKIECSLRIETKKQANAELNLNKELANQVIQSLQWIKAQAGEGEINLTDVLRYPGVVEAQEQDLDAISQDLLTAFDDLLTDFIAMRGREGEKLNDIIQQRLDAIAVEADKVRSQMPAVLQWQRERLLQRFEDAQVNLDPQRVEQEMILLAQRVDVAEELDRLQMHVKETTNILKKGGAVGRKLDFMMQELNRESNTLASKSINADITASAVELKVLIEQMREQIQNLE

SEQ ID NO: 1625 - DNA, 879 bp, Roseovarius nubinhibens ISM
  CDS (1)..(879): transl_table=11
atgacagggtttgcctcgggccggggcgcgagcgagggctatgcctgggactgggagctgcgctcggtgaacggcaaggggctcgacctgcggctgcgcgtgccggattgggttgaggggcttgagaccgccttgcgggcgcggcttggcaagggtttggcgcgcggcaatgtcacggtgaacctgcggctgcaaagcgaacagcgcgccgcacggatgcaggtcaacgaggcgcagctcgacgatgtgctcgaggcgattgcccggatcgagagcgaagcgatggcgcgcggcatctcgctcgccccgtcgcggcccggcgatattctggcgcagcgcggcgtgctcgagatggccagcagcgaggccgacaccaccgcgttgcaagcggcgcttctggcagatttcgaagcggtgctcgacggatttctcgatatgcggcgcggcgagggccgggcgctcgaggagatcctcgcaggccagctcgacgagatttcgcggctgacaagcgaggcggcggaggccgcccaatcgcggcgcgaggatgtggcgcaggcgctgcgtgacgcgctggcgcgggtgctcgacaacagcgagggggcagacccggaccggatcgcgcaggagctggcgcttctcgctgtgaaatcggatgtgaccgaagaattggaccggcttcatgcgcatgttacaacggcgcgcgacatgatcgccactggcagcccgattggccgcaagctcgattttctggcgcaggaatttaaccgcgaggccaataccttgtgttccaaggcgcaatcgggcgcgctgaccaagatcgggctcgaattgaaaacggtgatcgaccagatgcgggagcaggtgcaaaatgtcgagtga

SEQ ID NO: 1626 - protein, 292 aa, Roseovarius nubinhibens ISM
MTGFASGRGASEGYAWDWELRSVNGKGLDLRLRVPDWVEGLETALRARLGKGLARGNVTVNLRLQSEQRAARMQVNEAQLDDVLEAIARIESEAMARGISLAPSRPGDILAQRGVLEMASSEADTTALQAALLADFEAVLDGFLDMRRGEGRALEEILAGQLDEISRLTSEAAEAAQSRREDVAQALRDALARVLDNSEGADPDRIAQELALLAVKSDVTEELDRLHAHVTTARDMIATGSPIGRKLDFLAQEFNREANTLCSKAQSGALTKIGLELKTVIDQMREQVQNVE

SEQ ID NO: 1627 - DNA, 891 bp, Oceanicola batsensis HTCC2597
  CDS (1)..(891): transl_table=11
atgcatcaatccatgacgggattcgcctcggcgcaggggcatcacggcgcctattcctgggtctgggacctgaggtcggtgaacgcacgggggctggatgtccgcgtccggctgcccgattggctgccggggctggatgccgcgctcaaggcgcgtctcggaaagaggatcgcgcgcgggaacgtgaccctcggcctgcgcgtcacgcggagcgaggagacggcggcgctggccgtgaaccccgccgccctcgatcaggtgctgatcgccatggcgcaggtcgaggaccgggcgatgcagcaggggctgagcctcgccccctcccgcgcggcggatatcctgtcgcagcgcggcgtgctcgagaccgcggccgtcgaggaggacgccgaagcgctgaccgaggcccttctggccgatttcgacacgctcgcccgcgccttcgtcgcgatgcgcgagggcgagggggcggcgctggcgcggcttctcaccgatcagctcgcccggatcgaggacctggtggcgcaggccggcgccgtcctcgggacgcgccgcgaagccatgcaggaggcgctgcaggcgcagctgcgtcgcgtgctggaggcggatgtcgcggtggaccagcagcggctggaacaggagctggcgctgatcgccgtcaaggcggacgtgaccgaggaactcgaccggctgacggcccatgtcgccgccgcgcgcggcatcctggagagcggcggacccgcgggccgcaagctcgacttcctcgcgcaggaattcaaccgcgaagccaataccctgtgttccaagtcgcagaacgcggatctgaccgccgtcggcctcgatctcaaggcggtgatcgagcagatgcgcgagcaggttcagaacctcgaatga

SEQ ID NO: 1628 - protein, 296 aa, Oceanicola batsensis HTCC2597
MHQSMTGFASAQGHHGAYSWVWDLRSVNARGLDVRVRLPDWLPGLDAALKARLGKRIARGNVTLGLRVTRSEETAALAVNPAALDQVLIAMAQVEDRAMQQGLSLAPSRAADILSQRGVLETAAVEEDAEALTEALLADFDTLARAFVAMREGEGAALARLLTDQLARIEDLVAQAGAVLGTRREAMQEALQAQLRRVLEADVAVDQQRLEQELALIAVKADVTEELDRLTAHVAAARGILESGGPAGRKLDFLAQEFNREANTLCSKSQNADLTAVGLDLKAVIEQMREQVQNLE

SEQ ID NO: 1629 - DNA, 861 bp, Pseudoalteromonas tunicata D2
  CDS (1)..(861): transl_table=11
atgatccacagtatgacagcatacgctcgccaggaacaaaaaggtgattggggcacaggcacttgggaaattcgctctgttaaccaacgctatttagaaacctttatccgcgcccctgagcaatttcgtggcatggaacctgttattcgcgatcgtttgcgcaacaaccttcaacgcggcaaagtcgaagtattcttaaaatttgccgccaatccagcgcatgttggcgaaattactatcaacgaatcccttgcaagccaattagtgaacagtgccaaatgggtgcaaaatttaagtcagggtgaaatcaaccctgtagacattcttcgctggccaggtgttatggaagcacaagaagtcgatatggattcagtacaagccgaattacttgcagcacttgaccggactattatcgactttcttgaagctcgcgctgccgaaggtgcaaatttacacgaaatgatcgaaagccgcttaaatgcaatcacggaacaagttgatattgttgagcaatacatgccacaagtgaaaatttggcagcgtgaacgtttaagccaaaaacttgaagaactcaaaaccgatatcgacgaaagtcgcctagagcaagaactaatttatttagcgcaaaaacaagatgttgccgaagaactagaccgcttaaaatcacacgtaaaagaaacgcgtaaaatgcttaaaaaaggcggagcttgtgggcgccgtttagattttatgatgcaagagtttaaccgcgaagcaaacaccctagcctctaaatcaatcaatagcgacatcaccaatgctgcggtagagctaaaagtgttgattgaacagatgcgtgagcagatccaaaacattgaataa

SEQ ID NO: 1630 - protein, 286 aa, Pseudoalteromonas tunicata D2
MIHSMTAYARQEQKGDWGTGTWEIRSVNQRYLETFIRAPEQFRGMEPVIRDRLRNNLQRGKVEVFLKFAANPAHVGEITINESLASQLVNSAKWVQNLSQGEINPVDILRWPGVMEAQEVDMDSVQAELLAALDRTIIDFLEARAAEGANLHEMIESRLNAITEQVDIVEQYMPQVKIWQRERLSQKLEELKTDIDESRLEQELIYLAQKQDVAEELDRLKSHVKETRKMLKKGGACGRRLDFMMQEFNREANTLASKSINSDITNAAVELKVLIEQMREQIQNIE

SEQ ID NO: 1631 - DNA, 864 bp, Photobacterium sp. SKA34
  CDS (1)..(864): transl_table=11
atgatccatagtatgactgcttatgctcgtcgcgaaattaaaggcgattggggcactgctgtgtgggagatccgctcagtaaatcaacgttatcttgaaacctacattcgtatgcctgagcaatttcgtagcttagagcctgtattacgtgagcgtttccgtaaacgtcttgctcgcggtaaagtggaatgtaatctacgttttgaagccaatattgccgcaaacacagagctaaccatcaatgaagcgttagcaaagcaagttattaccgcagctaaatgggtaaaagaaaccgccggtgaaggtaatatcggtccattccaagtccttaattggccgggtgtgatggaagcaccagagcaagatttagatacgattaacaaagatctactgacgggttttgaactagctatggatgacttcgttgccgcacgtgcaagcgaaggcgacaacatgaagcaacttatcgaccaacgtctgaatgctatttcgattgaagcgaccaaagtacgcactatgatgccagaaatcattaactggcagcgtgagcgcattatgtctcgtcttgaagaagcaaaagttgatcttgatgctaaccgcattgaacaagagctgatcatgctagcgcaaaagagtgatgtcgcagaagagcttgatcgccttgattctcacgtgaaagaaacccaaaaaatcatcgcgaaaggtggcgcatgtggtcgtcgtttagacttcatgatgcaagagttcaaccgtgagtctaacaccctcgcatcaaaatcaatcaacactgaagtgaccgcctctgcagttgaacttaaagttctgattgagcaaatgcgcgaacagattcagaatatcgaataa

SEQ ID NO: 1632 - protein, 287 aa, Photobacterium sp. SKA34
MIHSMTAYARREIKGDWGTAVWEIRSVNQRYLETYIRMPEQFRSLEPVLRERFRKRLARGKVECNLRFEANIAANTELTINEALAKQVITAAKWVKETAGEGNIGPFQVLNWPGVMEAPEQDLDTINKDLLTGFELAMDDFVAARASEGDNMKQLIDQRLNAISIEATKVRTMMPEIINWQRERIMSRLEEAKVDLDANRIEQELIMLAQKSDVAEELDRLDSHVKETQKIIAKGGACGRRLDFMMQEFNRESNTLASKSINTEVTASAVELKVLIEQMREQIQNIE

SEQ ID NO: 1633 - DNA, 864 bp, Oceanospirillum sp. MED92
  CDS (1)..(864): transl_table=11
atgacacgtagcatgacagcatttgctcgacaggaagccgagcacgagtggggatcactgagttgggagatccgttccgttaaccatcgttaccttgaaccccatctgcgtctgccggaaaacctcaaagagctggaaggttttctgcgtgaaaaactgcgtaagaccctgagccgaggcaaggtggaatgcaccctgcgtttccacccggaagcacaggttcaacagctggtggtgaatcaggattacgctaaagaggtaattcaggcggcggaatccctgcaggggatgatgaaagaacatcagccacttgatgcgctggagctgctacgctggcccggtgtaatgcaggatgtgaagttggatatggatctggttaagaattcagctaaatccctgtttgataaagccctggatgacctgctggaaggccgtggccgtgaaggtgtggaactggcaaacctgatcaaccagcgtctcgattcgatcagtgagattgtcgcggaagtacgcgagaagatgccacagattctgcaaaaccagcgtgacaacctgaaccaacgcctggaagagctgaaagctgaactggacgaagcacgcatcgagcaggagatcgccctgatcgcccagaaagccgatgtcgatgaagagatggatcgcctagacacccatgtacaggaagtacgccgtgtgctgaaacagaaaggcccgattggccgccgtctcgacttcctgatgcaggaactaaaccgcgaagccaatacgctatcttcgaaatcgatcgtcgccagcaccacccagtgtgccgtagagctgaaagtgctgatcgaacagatgcgtgagcagatccagaacatcgaataa

SEQ ID NO: 1634 - protein, 287 aa, Oceanospirillum sp. MED92
MTRSMTAFARQEAEHEWGSLSWEIRSVNHRYLEPHLRLPENLKELEGFLREKLRKTLSRGKVECTLRFHPEAQVQQLVVNQDYAKEVIQAAESLQGMMKEHQPLDALELLRWPGVMQDVKLDMDLVKNSAKSLFDKALDDLLEGRGREGVELANLINQRLDSISEIVAEVREKMPQILQNQRDNLNQRLEELKAELDEARIEQEIALIAQKADVDEEMDRLDTHVQEVRRVLKQKGPIGRRLDFLMQELNREANTLSSKSIVASTTQCAVELKVLIEQMREQIQNIE

SEQ ID NO: 1635 - DNA, 933 bp, Xanthobacter autotrophicus Py2
  CDS (1)..(933): transl_table=11
atgaagcgtgccgccgtgaccaccaaccgcgttccggcttcggcccgggcccccctcgccagcatgactggctttgcccgcgttgccggctcccatgggccgtggcgtttcggctgggaggtgcgttcggtcaacggcaaggggctggacctgcggctgcgcctgccgccgggcttcgaggtgctggaggcggacgtgcgcacccgcaccgggcaggtcctgacccgcggctcggtctccgccaccctcgccgccacccgcgagggggagaccagcacggttcgggtcaaccagggggcgctggaggcgctgtaccggacggtgtccgagagcgctcgccgcctcggcgcgccggagcccaccctcgacgccctggtggcggtgaagggcatggtggagatcgccgaggccgatgagggcgaggaggagcgccgcgcgctcatgtccgccatgctctcggccttcgaccgggcgttgggggaactcggcgccatgcgcgcccgcgagggcgaggcgctcaatgccatcctctccgagcggctcgatgccattgccgccctgctggtgcgggccgagcgcctgcccgagcgtggcgtcgaggccatcaaggcccgcatcgccgagcaggtgcgggtgctgatggaggccgccacactggatcccgaccgcctgcaccaggaggcggtgctcgccgtcaccaaggccgacgtgcgtgaggaactggaccggctcagcgcccatatcgccgccgcgcgcgacctgctgcacaccggcggcccggccggccggcggctcgatttcctggcccaggagttcaaccgcgaggcgaacaccctgtgctccaagtccaattccgtggcgctgacgcagatcgggcttgacctgaagctgctggtggaccagttccgcgagcagatccagaacctcgagtga

SEQ ID NO: 1636 - protein, 310 aa, Xanthobacter autotrophicus Py2
MKRAAVTTNRVPASARAPLASMTGFARVAGSHGPWRFGWEVRSVNGKGLDLRLRLPPGFEVLEADVRTRTGQVLTRGSVSATLAATREGETSTVRVNQGALEALYRTVSESARRLGAPEPTLDALVAVKGMVEIAEADEGEEERRALMSAMLSAFDRALGELGAMRAREGEALNAILSERLDAIAALLVRAERLPERGVEAIKARIAEQVRVLMEAATLDPDRLHQEAVLAVTKADVREELDRLSAHIAAARDLLHTGGPAGRRLDFLAQEFNREANTLCSKSNSVALTQIGLDLKLLVDQFREQIQNLE

SEQ ID NO: 1637 - DNA, 897 bp, marine gamma proteobacterium HTCC2207
  CDS (1)..(897): transl_table=11
atgacgcatcgtaatttttctactggagataccatggcccggagtatgaccgcatttgcccgctgcagcacagagttcagctggggttcagttacctgtgaactgcgctcagtgaatcatcgctttcttgaaacgggatttcgcctgcctgacagcctgcggcccatagagatgccgctgcgagaaatcgcccgcaagaagctgagccgcggcaaggtcgactgctctctgcagctggcatttaataatgccgatgccagcctcgaagctgatctggacttggccaagcgcatgattgctatggccgagaccatcggcgctgaaatgcagtcgccagcacctatttctccgctggaaattatgcgctggcccggcattcttcaggagcaaactgtggaggcggaagccttgcataaggctgccaccgaaacctacaaagctaccattgatcagctgcttgagggacgcaaacgtgagggcgacaagctggcggagatgattgaacagcgactggtgggcattgagcagcagctggttattgtgcgagatcacctgccttcgatcctcagtgatcagcgcaagcgtcttgaacaaaagctcagcgacctcaaggagcagtttgacgcagatcgccttgaacaagagatggtgattatcgccaaccgcaccgatgtggacgaggagctagatcgcctagaagcccatattagcgagatacgccgagtattaagcggcaaagattccatcggtcgacgtctggattttttgatgcaagaactcaatcgcgaggccaacacgctgggctccaaatccatcgccggcgtcaccactcaggcttcggtggagttgaaggtacttatcgagcagatgcgtgagcagattcaaaatattgagtaa

SEQ ID NO: 1638 - protein, 298 aa, marine gamma proteobacterium HTCC2207
MTHRNFSTGDTMARSMTAFARCSTEFSWGSVTCELRSVNHRFLETGFRLPDSLRPIEMPLREIARKKLSRGKVDCSLQLAFNNADASLEADLDLAKRMIAMAETIGAEMQSPAPISPLEIMRWPGILQEQTVEAEALHKAATETYKATIDQLLEGRKREGDKLAEMIEQRLVGIEQQLVIVRDHLPSILSDQRKRLEQKLSDLKEQFDADRLEQEMVIIANRTDVDEELDRLEAHISEIRRVLSGKDSIGRRLDFLMQELNREANTLGSKSIAGVTTQASVELKVLIEQMREQIQNIE

SEQ ID NO: 1639 - DNA, 855 bp, Rickettsiella grylli
  CDS (1)..(855): transl_table=11
atgacggcttttgccaaaaaagaaaaacacgctgaatggggtcaagccgcttgggaaattcggagtgtcaaccatcgttatctagacattatactgtcgttgccagataactttagccatttagaacctttgattcgaaaacaaatgcaaaaaaatgtgcaccgcggcagagtagacataaaattacactataaaccttatcctaataaagcgattccgataaccatcgataaaccattagcgcaatcgcttataaacgcatacaaagaaattgctcaactcagtcagagtaaacgggctttcaatcctggagaactgcttcgatggccgcatttacttcaatttcccgagttacaaccccatgaaatacaaactgagttaatggctttattgacggatactttaaataatttttgtaacgtccgtcagacagaaggccacgctatttttggtgtattaaatcgacgtattcttaagctgatacattgcattaagtatattcagacgcaacttcctcaacttttaaaccgacaacgcgaaaaaatttcagctcgattacaggaaattaaagccagtttagacgctaaccgtttagaacaagaaatgctattatttgctcagaagactgacgtcgccgaagaattagaccgcttaaccattcatcttactgaatttaaaaatttgttaataaaaaatcaagtccacggcaaacaactcgattttttattacaagaattaaaccgagaagcaaatactttagcggctaaatcattcaatgcagaattaaccttatccgctgtgaacatcaaagtgttaatagaggaaatgcgtgaacaagtacagaatattgagtaa

SEQ ID NO: 1640 - protein, 284 aa, Rickettsiella grylli
MTAFAKKEKHAEWGQAAWEIRSVNHRYLDIILSLPDNFSHLEPLIRKQMQKNVHRGRVDIKLHYKPYPNKAIPITIDKPLAQSLINAYKEIAQLSQSKRAFNPGELLRWPHLLQFPELQPHEIQTELMALLTDTLNNFCNVRQTEGHAIFGVLNRRILKLIHCIKYIQTQLPQLLNRQREKISARLQEIKASLDANRLEQEMLLFAQKTDVAEELDRLTIHLTEFKNLLIKNQVHGKQLDFLLQELNREANTLAAKSFNAELTLSAVNIKVLIEEMREQVQNIE

SEQ ID NO: 1641 - DNA, 861 bp, Oceanobacter sp. RED65
  CDS (1)..(861): transl_table=11
atgcgcagcatgacaggatttgcccgtcaggatttagaaactcctttaggtcactatagtgttgaaattcgcagtgtaaattcacgctacttggaaccacattttcggttgccggattctatgcgcgctttggaaccaaaattacgcgagcgcttgaaaaatgtgttcagccgaggaaagctagaagtcagcatcaagtttcgagcggatatgagtcaacaaggcgtatctttgaacgaggcattggttgaacggatcaaccaagcagccgatcaagtgcacggtatcattggtccaggtaatgcactggatgcactcgagatcctcaaatggccaggcgtccttaatgaagcgcaattagataaagctcaaatcgaagagcaaaccttgcagtgctttgacgaagccataaagagtctactggacatgagtcagcgagaaggggatgcacttaatcaatttctcacacagcggatagaaggcatacagctgcaagtggacgaagttcgaagattaatgcctcaattgattcaagctcagcgcgagcatttacagaaaaaattggctgatctacaggtcaatgttgagccagagcgtctagagcaagaaatgatgatagtgctacaaaaaacggatgtggatgaggagcttgatcgccttgaagctcatgtaaaggaagtatcccatatcatggaacagtctgggcctgtgggccgccgattggattttatgatgcaggagcttaatcgtgaggctaatacattgagcagcaaaagtatgagttcactaacgacgaatatcgcggtggagctcaaagtcttaattgagcagatgcgagagcaagttcagaatatcgaataa

SEQ ID NO: 1642 - protein, 286 aa, Oceanobacter sp. RED65
MRSMTGFARQDLETPLGHYSVEIRSVNSRYLEPHFRLPDSMRALEPKLRERLKNVFSRGKLEVSIKFRADMSQQGVSLNEALVERINQAADQVHGIIGPGNALDALEILKWPGVLNEAQLDKAQIEEQTLQCFDEAIKSLLDMSQREGDALNQFLTQRIEGIQLQVDEVRRLMPQLIQAQREHLQKKLADLQVNVEPERLEQEMMIVLQKTDVDEELDRLEAHVKEVSHIMEQSGPVGRRLDFMMQELNREANTLSSKSMSSLTTNIAVELKVLIEQMREQVQNIE

SEQ ID NO: 1643 - DNA, 861 bp, Alteromonadales bacterium TW-7
  CDS (1)..(861): transl_table=11
atgatccacagtatgacagcttatgcgcgtcgcgagataaaaggcgattggggcactggcacttgggaagttcgatcagttaaccaacgttaccttgaaacctttattcgcgcaccagagcaatttcgtgggatggagcctattattcgtgaacgcttacgtaagcatctacagcgcggtaaagtagaagtatttttaaagtttgttgcaaacccagcccacgttggtgagttatcaatcaatcaagcattggctgagcaacttataaatagtgctaaatgggttcaacagcaaagtaatggtgacataaaccctgttgatattttacgttggcctggtgtaatggaagccgaagaactggatatggacagcgtaaacacagcgctgattgcagggcttgatgaagtaatagaagactttaaatcagcacggggtgatgaaggcgcaaatttagaagagatgatagcaactcgccttgatgcaattatagaacaagtaaacactgtagaaacccacatgccagaaattactaaatggcaacgtgagaaacttgaacaaaaattggaagatttaacgacaaatattgacgagtctcgtcttgagcaagaactaatttatttggcacaaaagcaagacgtagctgaagagctagatcgcttaaagtctcatgttaaagaaactaaaaaaattcttaaaaaaggcggcgcatgtggccgtcgcctagattttatgatgcaagagtttaaccgagaagcaaataccctcgcttctaagtctattaatagcgatattactaatgcggcggtcgagcttaaagttttaattgaacaaatgcgtgagcagatccagaatattgaatag

SEQ ID NO: 1644 - protein, 286 aa, Alteromonadales bacterium TW-7
MIHSMTAYARREIKGDWGTGTWEVRSVNQRYLETFIRAPEQFRGMEPIIRERLRKHLQRGKVEVFLKFVANPAHVGELSINQALAEQLINSAKWVQQQSNGDINPVDILRWPGVMEAEELDMDSVNTALIAGLDEVIEDFKSARGDEGANLEEMIATRLDAIIEQVNTVETHMPEITKWQREKLEQKLEDLTTNIDESRLEQELIYLAQKQDVAEELDRLKSHVKETKKILKKGGACGRRLDFMMQEFNREANTLASKSINSDITNAAVELKVLIEQMREQIQNIE

SEQ ID NO: 1645 - DNA, 870 bp, marine gamma proteobacterium HTCC2143
  CDS (1)..(870): transl_table=11
atgattcgaagtatgaccgcttttgctcgacaatccacgcagtttgaatggggctccacagtttgggaggttcgctctgtcaaccatcgctatcttgagcccagcttcaaactacccgatactgttcggcaacttgaaaacaacttacgtgatgcactccgcaacacactcaaccgcggcaaagtagaatgcagcttgcgcatacaggctgagggaagtatcagctcgactcggctatccatcgacgatgagttattgactcagcttgttgcgaccagtgaacacgttcagcagcaactgcgagaatcagccccgataaatccattgcagctgctgcagtggcccggtgtgatgacagaagccagaactgatgacgaggtcatttgcacagacgcattatcagtcttcactacaaccctacaacagcttctttcgagccgcgagcgcgaaggtgctgcgttaaagctctttattgagcagcggctagagtcgattacccgcattaccaatgacattcgtcatcaaatgcctattattttaaaagcgcaacaacagaagctgatagaccgagtcgctcaattcgccgtagaactggacaaagaacgtctcgaacaggaaatagtaatgcttgcccagaaggccgatgtcgacgaagagctcgatcgtctggaagcgcacattgctgaagtcagccgcgtattaatcaaaggtgggccctgcggtcgcagactagactttttaatgcaggagctcaatcgcgaagctaataccttgtcatctaaatcaatcgtcagcgatactacccaggcagcggtagagcttaaagtattgatagagcagatgcgcgaacagattcaaaatatcgagtag

SEQ ID NO: 1646 - protein, 289 aa, marine gamma proteobacterium HTCC2143
MIRSMTAFARQSTQFEWGSTVWEVRSVNHRYLEPSFKLPDTVRQLENNLRDALRNTLNRGKVECSLRIQAEGSISSTRLSIDDELLTQLVATSEHVQQQLRESAPINPLQLLQWPGVMTEARTDDEVICTDALSVFTTTLQQLLSSREREGAALKLFIEQRLESITRITNDIRHQMPIILKAQQQKLIDRVAQFAVELDKERLEQEIVMLAQKADVDEELDRLEAHIAEVSRVLIKGGPCGRRLDFLMQELNREANTLSSKSIVSDTTQAAVELKVLIEQMREQIQNIE

SEQ ID NO: 1647 - DNA, 852 bp, marine gamma proteobacterium HTCC2080
  CDS (1)..(852): transl_table=11
atgactggattttcgcgcgccattgtaacaactgactgcgtgtcggtcacaatagaaatgcgatcggtaaacaatcgttatctcgatgtgctggttcgctgccctgaagtccttcgatcacaggaatcccattggcgtcaaaaaattgcaaaacaaatcacccgaggcaaggtggacgtgtctatccgcaccgatctctcggagcaaagtgcatccctgagcttagatcaagggcgtcttaaggaattacaaaccgtattgggccaactaagtgagcgctttcccgacgccccaccgcctgatcagctggctttactgatggcgccgggtgttatctctagtgagaccacgcacgagtcggagtggattgaagcgggtgcagccgccctagagcgcgcgcttagcgggctggttgccagcagggaagaagaaggcggtaaactgcaaaatcttatcttaagccgctgcgaagcatttaaacactaccttgcagacttccgagcggcgctaccagatttgcagcaagccaatcgacaacggctgctcgaccggatacaaaagctgtctgtagaacccgatgctaaaagattggaagaggagctggtttataacgcccaaaaaacagatgttgatgaagagttagatcggttggacgcgcatctcgtggcaatagaggttgcgatagagagcaaccaaccctgtggccgccgcctcgattttttaatgcaggaactcaatcgggaggccaatacgctggcatcaaagtcagcatcactattaacgactcagaccgctgtagaatttaaggtgctcattgaacagatgcgggaacaaatacagaacattgaataa

SEQ ID NO: 1648 - protein, 283 aa, marine gamma proteobacterium HTCC2080
MTGFSRAIVTTDCVSVTIEMRSVNNRYLDVLVRCPEVLRSQESHWRQKIAKQITRGKVDVSIRTDLSEQSASLSLDQGRLKELQTVLGQLSERFPDAPPPDQLALLMAPGVISSETTHESEWIEAGAAALERALSGLVASREEEGGKLQNLILSRCEAFKHYLADFRAALPDLQQANRQRLLDRIQKLSVEPDAKRLEEELVYNAQKTDVDEELDRLDAHLVAIEVAIESNQPCGRRLDFLMQELNREANTLASKSASLLTTQTAVEFKVLIEQMREQIQNIE

SEQ ID NO: 1649 - DNA, 864 bp, Pseudomonas putida GB-1
  CDS (1)..(864): transl_table=11
atggtgcacagcatgaccgcttttgctcgtgtcgagcgcgccggcagccaaggcaccctggtctgggagctgcgctcggtcaaccaccgctacctggagccgcacctgcgtctgcccgaggccctgcgcgacctcgaaggcggtgtacgtgaaggcctgcgccagggcctttcgcgaggcaaggtggagtgcaccttgcgcctcaacgaagacagcaacggcaaaccgctgaaggtggaccacgcgcgcgccgcgcaactggttgccgcggccgaggaagtcgccagcctgatcaagcagccggcgcccttgaaccccctggaagtgctgtcgtggccgggcgtgctggtggctgacaccagcgacccgcaggccctgaacgctgaagccatggcgctgttcgacgaagcactggccgagctcaaggccgggcgccagcgcgaaggccaggaactggcccggctgatcaacgagcgcctggacaacatggccagcgaagtcaccaccctgcgcgccttggtcccgcagatgctggcagcacagcggcaaaagattctcgaccgcttcggcgatatgcaggctgagctggacccgcagcgcctggagcaggagatggtgctgctggcccagaagagcgacgtggccgaagaactcgaccgcctcagcactcacgttaccgaagtgcgccgggtactcaagggtggcggcgccgccggccgacgcctggatttcctgatgcaggaactcaaccgcgaagccaacaccctcggctccaaggccttcgacccacgcagcacgcaagcggcggtcaacctgaaggtattgatcgaacagatgcgtgaacaagtacagaacatcgagtaa

SEQ ID NO: 1650 - protein, 287 aa, Pseudomonas putida GB-1
MVHSMTAFARVERAGSQGTLVWELRSVNHRYLEPHLRLPEALRDLEGGVREGLRQGLSRGKVECTLRLNEDSNGKPLKVDHARAAQLVAAAEEVASLIKQPAPLNPLEVLSWPGVLVADTSDPQALNAEAMALFDEALAELKAGRQREGQELARLINERLDNMASEVTTLRALVPQMLAAQRQKILDRFGDMQAELDPQRLEQEMVLLAQKSDVAEELDRLSTHVTEVRRVLKGGGAAGRRLDFLMQELNREANTLGSKAFDPRSTQAAVNLKVLIEQMREQVQNIE

SEQ ID NO: 1651 - DNA, 867 bp, Marinobacter sp. ELB17
  CDS (1)..(867): transl_table=11
atgattcgaagtatgactgcctttgcgcgccaggaaactcgtggcgactggggtgtactgacctgcgagattcgcaccgttaaccatcgctacctggagccgtcattccgcttgccggagtgcctgcgagggctggaaaacgattttcgcgaacagctgcgcgaacaactgaagcgcggcaaggtagacgtgagtcttcggctgcacgcaagcgaccaggcccaacacagcttcgccatcgacgagccgctaacccaggcgctgaacgacgcggccaaacgcattagccggattctggacaaccctgcccacatcagcgcgctggacatattgcgctggccgggtgttatggcaacgcccgagcaggattacacccaggccaaagccgccgcggccagcctgtttgagcaaaccataaacgaactggtagcggcaagaacacgtgaaggcgagcgcttgctggctattttggaacagcgtctggtcgccatacaagcccaagtggctgacgtgcgtgagcgcatgccgcagctgcttcaggctcaggagcaacagctgcgcgaacgctttgaaaaagccaaaatagagctcgacccggaacgcatagctcaggaaatggtgatgctggcgcaaaaaagcgatgtcgccgaagaactggatcggctggacgcccacgtggccgaagtacgcgataccctggccagtgaagacgccgtcggccgacgcctggattttttgatgcaagagctgaaccgcgaagccaataccttgagcagcaaaagcattgacgccggcctgacccgcgctgcggtggacttgaaagtgtggattgagcagctgcgggagcaggtgcagaatatagagtag

SEQ ID NO: 1652 - protein, 288 aa, Marinobacter sp. ELB17
MIRSMTAFARQETRGDWGVLTCEIRTVNHRYLEPSFRLPECLRGLENDFREQLREQLKRGKVDVSLRLHASDQAQHSFAIDEPLTQALNDAAKRISRILDNPAHISALDILRWPGVMATPEQDYTQAKAAAASLFEQTINELVAARTREGERLLAILEQRLVAIQAQVADVRERMPQLLQAQEQQLRERFEKAKIELDPERIAQEMVMLAQKSDVAEELDRLDAHVAEVRDTLASEDAVGRRLDFLMQELNREANTLSSKSIDAGLTRAAVDLKVWIEQLREQVQNIE

SEQ ID NO: 1653 - DNA, 22 bp, Artificial sequence
  primer
atgatccgcagtatgaccgcct

SEQ ID NO: 1654 - DNA, 24 bp, Artificial sequence
  primer
ttattcgatgttctgaatctgctc

SEQ ID NO: 1655 - protein, 328 aa, Artificial sequence
  consensus sequence
  Variant (2)..(3): Xaa in position 2 to 3 is any amino acid
  Variant (7)..(8): Xaa in position 7 to 8 is any amino acid
  Variant (10)..(22): Xaa in position 10 to 22 is any amino acid
  Variant (23)..(33): Xaa in position 23 to 33 is any or no amino acid
  Variant (35)..(35): Xaa in position 35 is any amino acid
  Variant (40)..(40): Xaa in position 40 is any amino acid
  Variant (42)..(42): Xaa in position 42 is any amino acid
  Variant (44)..(47): Xaa in position 44 to 47 is any amino acid
  Variant (49)..(49): Xaa in position 49 is any amino acid
  Variant (51)..(56): Xaa in position 51 to 56 is any amino acid
  Variant (58)..(60): Xaa in position 58 to 60 is any amino acid
  Variant (62)..(69): Xaa in position 62 to 69 is any amino acid
  Variant (72)..(76): Xaa in position 72 to 76 is any amino acid
  Variant (78)..(118): Xaa in position 78 to 118 is any amino acid
  Variant (119)..(124): Xaa in position 119 to 124 is any or no amino acid
  Variant (126)..(127): Xaa in position 126 to 127 is any amino acid
  Variant (131)..(159): Xaa in position 131 to 159 is any amino acid
  Variant (160)..(167): Xaa in position 160 to 167 is any or no amino acid
  Variant (169)..(170): Xaa in position 169 to 170 is any amino acid
  Variant (173)..(174): Xaa in position 173 to 174 is any amino acid
  Variant (176)..(181): Xaa in position 176 to 181 is any amino acid
  Variant (183)..(197): Xaa in position 183 to 197 is any amino acid
  Variant (199)..(222): Xaa in position 199 to 222 is any amino acid
  Variant (223)..(238): Xaa in position 223 to 238 is any or no amino acid
  Variant (240)..(241): Xaa in position 240 to 241 is any amino acid
  Variant (244)..(251): Xaa in position 244 to 251 is any amino acid
  Variant (254)..(254): Xaa in position 254 is any amino acid
  Variant (258)..(258): Xaa in position 258 is any amino acid
  Variant (261)..(262): Xaa in position 261 to 262 is any amino acid
  Variant (264)..(270): Xaa in position 264 to 270 is any amino acid
  Variant (272)..(277): Xaa in position 272 to 277 is any amino acid
  Variant (278)..(279): Xaa in position 278 to 279 is any or no amino acid
  Variant (282)..(282): Xaa in position 282 is any amino acid
  Variant (286)..(287): Xaa in position 286 to 287 is any amino acid
  Variant (290)..(290): Xaa in position 290 is any amino acid
  Variant (294)..(294): Xaa in position 294 is any amino acid
  Variant (298)..(298): Xaa in position 298 is any amino acid
  Variant (302)..(312): Xaa in position 302 to 312 is any amino acid
  Variant (315)..(316): Xaa in position 315 to 316 is any amino acid
  Variant (320)..(320): Xaa in position 320 is any amino acid
  Variant (324)..(324): Xaa in position 324 is any amino acid
  Variant (327)..(327): Xaa in position 327 is any amino acid
MXXSMTXXAXXXXXXXXXXXXXXXXXXXXXXXXEXRSVNXRXLXXXXRXPXXXXXXEXXXRXXXXXXXXRGXXXXXLXXXXXXXXXXXXXXXXXXXXXXXXXXXXXXXXXXXXXXXXXXXXXXXLXXPGVXXXXXXXXXXXXXXXXXXXXXXXXXXXXXXXXXXXXXRXXEGXXLXXXXXXRXXXXXXXXXXXXXXXPXXXXXXXXXXXXXXXXXXXXXXXXXXXXXXXXXXXXXXXXRXXQEXXXXXXXXDVXEELXRLXXHXXXXXXXLXXXXXXXXGRXLDFXXQEXNREXNTLXSKSXXXXXXXXXXXLKXXIEQXREQXQNXE

SEQ ID NO: 1656 - protein, 52 aa, Artificial sequence
  protein pattern
  Variant (2)..(2): Xaa in position 2 is any amino acid
  Variant (3)..(4): Xaa in position 3 to 4 is any or no amino acid
  Variant (6)..(6): Xaa in position 6 is any or no amino acid
  Variant (10)..(10): Xaa in position 10 is Leu or Met
  Variant (11)..(11): Xaa in position 11 is any amino acid
  Variant (14)..(14): Xaa in position 14 is Phe, Leu or Met
  Variant (18)..(18): Xaa in position 18 is Ala or Ser
  Variant (21)..(21): Xaa in position 21 is Ile, Leu or Val
  Variant (22)..(22): Xaa in position 22 is Ala, Cys, Gly or Ser
  Variant (25)..(25): Xaa in position 25 is Ala, Pro or Ser
  Variant (26)..(30): Xaa in position 26 to 30 is any amino acid
  Variant (31)..(31): Xaa in position 31 is Ala, Ser or Thr
  Variant (32)..(33): Xaa in position 32 to 33 is any amino acid
  Variant (34)..(34): Xaa in position 34 is Ala, Gly, Ser or Thr
  Variant (35)..(35): Xaa in position 35 is Ile, Leu, Met or Val
  Variant (36)..(36): Xaa in position 36 is Ala, Asp, Glu, Gly, Asn or Thr
  Variant (37)..(37): Xaa in position 37 is Phe, Ile, Leu or Met
  Variant (39)..(39): Xaa in position 39 is Ala, Leu or Val
  Variant (40)..(40): Xaa in position 40 is any amino acid
  Variant (41)..(41): Xaa in position 41 is Ile or Val
  Variant (42)..(42): Xaa in position 42 is Asp or Glu
  Variant (43)..(43): Xaa in position 43 is any amino acid
  Variant (44)..(44): Xaa in position 44 is Phe, Ile, Leu or Met
  Variant (45)..(45): Xaa in position 45 is Lys or Arg
  Variant (48)..(48): Xaa in position 48 is Ile or Val
  Variant (49)..(49): Xaa in position 49 is Ala or Gln
  Variant (51)..(51): Xaa in position 51 is Phe, Ile, Leu or Val
GXXXRXLDFXXQEXNREXNTXXSKXXXXXXXXXXXXXKXXXXXXXEQXXNXE

SEQ ID NO: 1657 - protein, 15 aa, Artificial sequence
  protein pattern
  Variant (2)..(2): Xaa in position 2 is any amino acid
  Variant (5)..(5): Xaa in position 5 is any amino acid
  Variant (6)..(6): Xaa in position 6 is Lys or Arg
  Variant (7)..(7): Xaa in position 7 is any amino acid
  Variant (9)..(9): Xaa in position 9 is Asp or Glu
  Variant (10)..(11): Xaa in position 10 to 11 is any amino acid
  Variant (12)..(12): Xaa in position 12 is Phe, Ile, Leu, Met or Val
  Variant (14)..(14): Xaa in position 14 is any amino acid
  Variant (15)..(15): Xaa in position 15 is Ala, Pro or Val
RXVNXXXLXXXXRXX

SEQ ID NO: 1658 - protein, 25 aa, Artificial sequence
  protein pattern
  Variant (2)..(2): Xaa in position 2 is Phe, Ile, Leu, Met or Val
  Variant (3)..(3): Xaa in position 3 is any amino acid
  Variant (4)..(4): Xaa in position 4 is Glu or Gln
  Variant (6)..(11): Xaa in position 6 to 11 is any amino acid
  Variant (12)..(12): Xaa in position 12 is Lys or Arg
  Variant (13)..(13): Xaa in position 13 is any amino acid
  Variant (15)..(15): Xaa in position 15 is Ala, Ile or Val
  Variant (16)..(16): Xaa in position 16 is any amino acid
  Variant (20)..(20): Xaa in position 20 is Ala, Asp, Glu, Gln, Ser or Thr
  Variant (23)..(24): Xaa in position 23 to 24 is any amino acid
RXXXEXXXXXXXXDXXEELXRLXXH

SEQ ID NO: 1659 - protein, 21 aa, Artificial sequence
  protein pattern
  Variant (2)..(3): Xaa in position 2 to 3 is any amino acid
  Variant (4)..(4): Xaa in position 4 is Ile, Leu or Val
  Variant (6)..(13): Xaa in position 6 to 13 is any amino acid
  Variant (16)..(16): Xaa in position 16 is any amino acid
  Variant (17)..(17): Xaa in position 17 is Phe, Ile, Leu or Val
  Variant (18)..(18): Xaa in position 18 is Asp, Glu, Gln, Ser or Thr
  Variant (19)..(20): Xaa in position 19 to 20 is any amino acid
  Variant (21)..(21): Xaa in position 21 is Ile, Leu or Val
EXXXRXXXXXXXXRGXXXXXX

SEQ ID NO: 1660 - DNA, 516 bp, Saccharomyces cerevisiae
  CDS (1)..(516)
atgtctatatatctacacataaaattccgattattcctttgcatacctgatttgcccctcagaatccacaaccagacttttcaagaaggtcttttttgcccctttatccttcatggttttcaaaattttgtacaacgacttgcccttgtgaagctcgataccgttcgaggtcttttccactttctctgccttcttgatcacaggcttctccactttctttgcaggagttgccactggctggtgctggtgctgcttctgctgctgcttctgctgctgcttctgcttctgcttcttgttgcccttgtacaacgctttctggtacttctcgtcctcgctgatgcaagacgtgtgattcttgtaactcacgccatcttcaaacgtcttggagcaatctatgcatgtatagtacgcgttaggacatctataataatgcttttcggtattcttcttgggcacagtatcattacacacctcacagttgaacgtaaccatcctgtaataacaaatatttcttga

SEQ ID NO: 1661 - protein, 171 aa, Saccharomyces cerevisiae
MSIYLHIKFRLFLCIPDLPLRIHNQTFQEGLFCPFILHGFQNFVQRLALVKLDTVRGLFHFLCLLDHRLLHFLCRSCHWLVLVLLLLLLLLLLLLLLLVALVQRFLVLLVLADARRVILVTHAIFKRLGAIYACIVRVRTSIIMLFGILLGHSIITHLTVERNHPVITNIS

SEQ ID NO: 1662 - DNA, 28 bp, Artificial sequence
  primer
atgtctatatatctacacataaaattcc

SEQ ID NO: 1663 - DNA, 27 bp, Artificial sequence
  primer
tcaagaaatatttgttattacaggatg

SEQ ID NO: 1664 - DNA, 2595 bp, Saccharomyces cerevisiae
  CDS (1)..(2595)
atgtacatggccagatgtggccccaagaataatgtgctgtgtttcccatttcaactttcctttctattttcaaaacgactaataaataagcgtttcaagtataccctacaaactgaagatgaaaagaatatgatggggagtttaagtaaaaataaaataataacacctgaagacgttgagttcaaattagcacaattacgagaattttctaatactttaaaagaacgcattcacaacactaaatcggtgaattcagatggccaccaaagcaatagtatcgcaccaatctcagaagactcaaggaatgttaatgtcaccaaaacatcatctgttcctaatgaagaaaaatccaaaaatctatcagatttgattcattcttcgtttttagaaaaaatggatcacctcgtaccaaaagttataagagaaagagtagcagacgacgacatacttgcaaaaaacctttttgatagatcacacagtaattgggcacctgtcatagataggctttatgtcagtgagaaacggttcatggatattgattccagagaattttctgtttggttaaatggtacagtcaaatatttgccatttcatagtatactacacttggatgaaatgctattagaacaaatcaatggagatgttgtaaaatttaatacccacatgtacgaatgtatctttaacaacttaggaaatttaaaaccaactaattttaatcaggatggtactaacgataaagttatcctcaaaatgaaagagttgttagagaggtatgataaggcattaaaaataactgaagaaagaattaacaaaaaagaaggattcccttccaaagtaccaaagatgacgcaagcaatacttaataattgtttaaaatactcgaccaagtgttcaagctttcacgacatggattattttattacaaaattcagagatgattatggcataactcctaataagcaaaacctaactactgtaatacaattctactctaggaaggaaatgactaagcaagcctggaatacttttgacaccatgaaatttttatctacaaagcatttccctgatatctgcacatataacacaatgctgcgaatatgcgagaaggaacggaattttcctaaggctttggatttatttcaagaaattcaagaccacaatataaagcctacaacaaacacttacataatgatggcaagagtgttggcttcttcgagcagtaatgccgttgtcagtgagggtaaatcagactctctaagattactgggatggaaataccttcatgagttggaggacaagaatctttacagacataaaaaagatgacttaaatttatttttggctatgatggcattagccgcgtttgatggtgatattgaattaagtagagctctatattacttgttcatcgcgaaaaagtacaaaactttgtgcgcaaattggaaaggaaacattctcgtagatcaagatacaatttggaagtcaactttaatgccagaaatgctgaattatttgatgcttgcttatgcaagatttgatcccagaaatttgccagtcttatccggttatgaaaaaggcattgaattgagaagaaaatttcttcgcgaatttgattcctccatgaggttagatgatacagacaaattggtcaaatttaaattaccatttcttccaattagtgacctaaattcggaggcacaagtattggcggaatctaacgcaatctggagtttcaatatggaaaatggaggaacgcgcaatacattgacatcttcaaatgaagcggcgttggaggatatcaaaaaatataggcaattacttgattcgtttgcgcaagaagcagaggatttcaacgagtttaagtttaaagttatgtacgaagtgacgaaaatgcaaagagaaagtattaatgtgaacgtcttcaataaaatttcactacacacatatttgtcaattcccattaacttaaaacaacagaaggaattcttgcgaaggttgacgttcttcactttccaacaacacgaatttgaagctgtcataaagcgtttgtatgaaggataccgtaatattccttcgtcccatacgcgtgaccaaaattcaatatcaactgaagccatctcagtatccaaacctgagaccacggaagacctcaacttaataatgcatgatatatggtatattacatgtttgaggcacaaaatcatgatggacaccacgttatatgagctggtgatgaaagccgctatagaatttcaaaatgaggacttagcaaagaaagtatggaatgataggggtaaatttaggacgactgtaccgtttctgaaaatggaccaaagaataagaatagcaaaggatcagaaatttgcccatctaatggttgaattcttcacaaagcaaggaaagtattcggacgcaatagctatcatattgtcttcaaaaaatcgcttcaattggacttattccatggttaggaatttgcataaagcattagaagaaatcgaggatagaaatagcgttgaaatcttactggatgtagtaaacaaaaagtcacacgcaaaggccctgaagtgggaggaacaagaacttaacatgtag

SEQ ID NO: 1665 - protein, 864 aa, Saccharomyces cerevisiae
MYMARCGPKNNVLCFPFQLSFLFSKRLINKRFKYTLQTEDEKNMMGSLSKNKIITPEDVEFKLAQLREFSNTLKERIHNTKSVNSDGHQSNSIAPISEDSRNVNVTKTSSVPNEEKSKNLSDLIHSSFLEKMDHLVPKVIRERVADDDILAKNLFDRSHSNWAPVIDRLYVSEKRFMDIDSREFSVWLNGTVKYLPFHSILHLDEMLLEQINGDVVKFNTHMYECIFNNLGNLKPTNFNQDGTNDKVILKMKELLERYDKALKITEERINKKEGFPSKVPKMTQAILNNCLKYSTKCSSFHDMDYFITKFRDDYGITPNKQNLTTVIQFYSRKEMTKQAWNTFDTMKFLSTKHFPDICTYNTMLRICEKERNFPKALDLFQEIQDHNIKPTTNTYIMMARVLASSSSNAVVSEGKSDSLRLLGWKYLHELEDKNLYRHKKDDLNLFLAMMALAAFDGDIELSRALYYLFIAKKYKTLCANWKGNILVDQDTIWKSTLMPEMLNYLMLAYARFDPRNLPVLSGYEKGIELRRKFLREFDSSMRLDDTDKLVKFKLPFLPISDLNSEAQVLAESNAIWSFNMENGGTRNTLTSSNEAALEDIKKYRQLLDSFAQEAEDFNEFKFKVMYEVTKMQRESINVNVFNKISLHTYLSIPINLKQQKEFLRRLTFFTFQQHEFEAVIKRLYEGYRNIPSSHTRDQNSISTEAISVSKPETTEDLNLIMHDIWYITCLRHKIMMDTTLYELVMKAAIEFQNEDLAKKVWNDRGKFRTTVPFLKMDQRIRIAKDQKFAHLMVEFFTKQGKYSDAIAIILSSKNRFNWTYSMVRNLHKALEEIEDRNSVEILLDVVNKKSHAKALKWEEQELNM

SEQ ID NO: 1666 - DNA, 2616 bp, Saccharomyces pastorianus
  CDS (1)..(2616)
atgtacatggtcagatgtggcctcaaacctaatgtaccgtgtctttcacttgacctggcctttgcgctatcgaaacaactcataaataggcgttttagatctaccttacaaatggaagatgatagaaatataatggaaaccctcggcaaagacaaaagtatatcctccgaagaagttgagtttaagttagcacaactaagggaatttaccaagaacctaaagagccgtattcacaatgtcaagtcgccaaagttagctagttataaagtcaacgatgcggcgtcaatatctgaggaagctagaactctcgatattagcagaaacatctctttcgaaaatgaagcacctgtaactgagaataagggtaccggaaatctggtcagtttgatccaatcttcattttcagagaaggttaattatcttgtaccgaaagtaataagagaaagagtagccgatgacgacgttcttgcgaaaagtattctcgacaaatctcagaggaactgggcacctatcatagataaactttataccagtggtgaaagactaaaaaacactgattccaaggaaatgtccgtttggttaaaggatacaataaaagttttgccattccatagtatccttcaattggatgaaatgctgttggagcaaattgacggagacgttgctaaattcaacactcatatgtatgaatgcattttcaacaatttagggaacttaagaccaagcagctcgaatcagaatgctactattaacgacaaagtcatactcaaaatgaaacaattactagagaggtatgataacaccttgaaaataattgaagagagacgtgctaaaaatgaaggaccacctctgcgaaaaccaaagatgacccaactaatattcaataactgcctaaaatactcaagcaaatgctcgagcttcgaagacatggagtatttcattgtaaggtttaaggatatttatgacatatcgccaaacaaacaaaacttaactaccgtgatacaattctattctagaaaggaaatgactaaacaagcttggaatacttttgacacaatgaaatttttatccacaaaacacttccctgacatacgcacatataacaccatgctacaagtatgtgaaaaggaaaagaattttccaaaggccttagatttatttcaagaattacaagaccataatatcaaacccacaactgacacttatataatgatggcgagggttttagctacttcaagcagtaataccattgtaagtgagggcaaaccaagctctctgagactgttaggatggaaatatcttcatgagttagaagaaaaaaagctttatagacacaaaaatgatgagttaaacttatttctggctatgatggcattagccgcatatgacggtgacgtcgagttgagtagagctctgtattacttatttattgggaaaaagtacaaaactgtttgcgcacattggaatggaaacatttccaaagaccaagacaggatatggaaatctgttttgttacccgagatgctaaattacttaatgcttgcttatgcaaactttgatcctagaaaattgccagtgttatctggctacgagaaaggtattgagttgagaaggagattgttaagtgagttcgactccgccggaagattggatgatactaacaagtctgtcagatttaagttgccatttcttccaattaatagttcgactttagaagcgcaagtactggcggaatctaatgcagtttggaatttcaacctcgaaaatggaggaacatttcatacattgacatctacgaatgaaacaatacgagaagcagtaaaaaaagatgaacagttgttcgattcttttgccagggatgcaaatgatttaaatgatttcaaatttagaatcatgtatgaagtggctaaaaggaaaaaggatgacattaacgtcagagtgttcaacaaaatatctttatacacttatttgacaatacccataaacttaaagcatcaacaagaattcctgcgaaggttaacagtcttcacttttcaacaacatgaatttgaagctgtcataaaacgattatatgagagttattgtaacattctcttgactgatcatatcggtcaaaaatgtacgtcagatggaaccatttccacaaacgaggtcgagataaggaaagagtcaacgttgagaatggatgatatatggtacatcacctgtctgaaatataaaattatgatggatgccacgatgtacgaattggtaatgaaagctgcgacggaatttcaaaatgaggaattagctaaaaaagtatggaacgacaggggtaagttcaggacgactacgccgtttttacaaactgaccaaagaactaggatatcaaaggaccagaaatttgcacacttgatggtcgaatttttcacaaaacagggaaaatattctgatgcaatggctatcgttctatcttccaaaaatcgtttcaattgggcgtattctatggtcaggaacttgcacaaggccctggaagaaatcgatgatagaaataatgttgagatcttacttgatgtggttaataagaaatcgcatgcaaatgcattaaagtgggaagagcgggagctcaagttctaa

SEQ ID NO: 1667 - protein, 871 aa, Saccharomyces pastorianus
MYMVRCGLKPNVPCLSLDLAFALSKQLINRRFRSTLQMEDDRNIMETLGKDKSISSEEVEFKLAQLREFTKNLKSRIHNVKSPKLASYKVNDAASISEEARTLDISRNISFENEAPVTENKGTGNLVSLIQSSFSEKVNYLVPKVIRERVADDDVLAKSILDKSQRNWAPIIDKLYTSGERLKNTDSKEMSVWLKDTIKVLPFHSILQLDEMLLEQIDGDVAKFNTHMYECIFNNLGNLRPSSSNQNATINDKVILKMKQLLERYDNTLKIIEERRAKNEGPPLRKPKMTQLIFNNCLKYSSKCSSFEDMEYFIVRFKDIYDISPNKQNLTTVIQFYSRKEMTKQAWNTFDTMKFLSTKHFPDIRTYNTMLQVCEKEKNFPKALDLFQELQDHNIKPTTDTYIMMARVLATSSSNTIVSEGKPSSLRLLGWKYLHELEEKKLYRHKNDELNLFLAMMALAAYDGDVELSRALYYLFIGKKYKTVCAHWNGNISKDQDRIWKSVLLPEMLNYLMLAYANFDPRKLPVLSGYEKGIELRRRLLSEFDSAGRLDDTNKSVRFKLPFLPINSSTLEAQVLAESNAVWNFNLENGGTFHTLTSTNETIREAVKKDEQLFDSFARDANDLNDFKFRIMYEVAKRKKDDINVRVFNKISLYTYLTIPINLKHQQEFLRRLTVFTFQQHEFEAVIKRLYESYCNILLTDHIGQKCTSDGTISTNEVEIRKESTLRMDDIWYITCLKYKIMMDATMYELVMKAATEFQNEELAKKVWNDRGKFRTTTPFLQTDQRTRISKDQKFAHLMVEFFTKQGKYSDAMAIVLSSKNRFNWAYSMVRNLHKALEEIDDRNNVEILLDVVNKKSHANALKWEERELKF

SEQ ID NO: 1668 - DNA, 2595 bp, Saccharomyces pastorianus
  CDS (1)..(2595)
atgtacatggccagatgtggccccaagaataatgtgctgtgtttcccatttcaactttcctttctattttcaaaacgactaataaataagcgtttcaagtataccctacaaactgaagatgaaaagaatatgatggggagtttaagtaaaaataaaataataacacctgaagacgttgagttcaaattagcacaattacgagaattttctaatactttaaaagaacgcattcacaacactaaatcggtgaattcagatggccaccaaagcaatagtatcgcaccaatctcagaagactcaaggaatgttaatgtcaccaaaatatcatctgttcctaatgaagaaaaatccaaaaatctatcagatttgattcattcttcgtttttagaaaaaatggatcacctcgtaccaaaagttataagagaaagagtagcagacgacgacatacttgcaaaaaacctttttgatagatcacacagtaattgggcacctgtcatagataggctttatgtcagtgagaaacggttcatggatattgattccagagaattttctgtttggttaaatggtacagtcaaatatttgccatttcatagtatactacacttggatgaaatgctattagaacaaatcaatggagatgttgtaaaatttaatacccacatgtacgaatgtatctttaacaacttaggaaatttaaaaccaactaattttaatcaggatggtactaacgataaagttatcctcaaaatgaaagagttgttagagaggtatgataaggcattaaaaataactgaagaaagaattaacaaaaaagaaggattcccttccaaagtaccaaagatgacgcaagcaatacttaataattgtttaaaatactcgaccaagtgttcaagctttcacgacatggattattttattacaaaattcagagatgattatggcataactcctaataaacaaaacctaactactgtaatacaattctactctaggaaggaaatgactaagcaagcctggaatacttttgacaccatgaaatttttatctaccaagcatttccctgatatctgcacatataacacaatgctgcgaatatgcgagaaggaacggaattttcctaaggctttggacttatttcaagaaattcaagaccacaatataaaacctacaacaaacacttacataatgatggcaagagtgttggcttcttcgagcagtaatgccgttgtcagtgagggtaaatcagactctttaagattactgggatggaaataccttcatgagttggaggacaagaatctttacagacataaaaaggatgacttaaatttatttttggctatgatggcattagccgcgtttgatggtgatattgaattaagtagagctctatattacttgttcatcgcgaaaaagtacaaaactttgtgcgcaaattggaaaggaaacattctcgtagatcaagatacaatttggaagtcaactttaatgccagaaatgctgaattatttgatgcttgcttatgcaagatttgatcccagaaatttgccagtcttatccggttatgaaaaaggcattgaattgagaagaaaatttcttcgcgaatttgattcctccatgaggttagatgatacagacaaattggtcaaatttaaattaccatttcttccaattagtgacctaaattcggaggcacaagtattggcggaatctaacgcaatctggagtttcaatttggaaaatggaggaacgcgcaatacattgacatcttcaaatgaagcggcgttggaggatatcaaaaaatataggcaattacttgattcgtttgcgcaggaagcagaggatttcaacgagtttaagtttaaagttatgtacgaagtgacgaaaatgcaaagagaaagtattaatgtgaacgtcttcaataaaatttcactacacacatatttgtcaattcccataaacttaaaacaacagaaggaattcttgcgaaggttgacgttcttcactttccaacaacacgaatttgaagctgtcataaagcgtttgtatgaaggataccgtaatattccttcgtcccatacgcgtgaccaaaattcaatatcaactgaagctatctcagtatccaaacctgagaccacggaggacctcaacttaataatgcatgatatatggtatattacatgtttgaggcacaaaatcatgatggacaccacgttatatgagctggtgatgaaagccgctatagaatttcaaaatgaggacttagcaaagaaagtatggaatgataggggtaaatttaggacgactgtaccgtttctgaaaatggaccaaagaataagaatagcaaaggatcagaaatttgcccatttaatggttgaattcttcacaaagcaaggaaagtattcggacgcaatagctatcatattgtcttcaaaaaatcgcttcaattggacttattccatggttaggaatttgcataaagcattagaagaaatcgaggatagaaatagcgttgaaatcttactggatgtagtaaacaaaaagtcacacgcaaaggccctgaagtgggaggaacaagaacttaacatgtag

SEQ ID NO: 1669 - protein, 864 aa, Saccharomyces pastorianus
MYMARCGPKNNVLCFPFQLSFLFSKRLINKRFKYTLQTEDEKNMMGSLSKNKIITPEDVEFKLAQLREFSNTLKERIHNTKSVNSDGHQSNSIAPISEDSRNVNVTKISSVPNEEKSKNLSDLIHSSFLEKMDHLVPKVIRERVADDDILAKNLFDRSHSNWAPVIDRLYVSEKRFMDIDSREFSVWLNGTVKYLPFHSILHLDEMLLEQINGDVVKFNTHMYECIFNNLGNLKPTNFNQDGTNDKVILKMKELLERYDKALKITEERINKKEGFPSKVPKMTQAILNNCLKYSTKCSSFHDMDYFITKFRDDYGITPNKQNLTTVIQFYSRKEMTKQAWNTFDTMKFLSTKHFPDICTYNTMLRICEKERNFPKALDLFQEIQDHNIKPTTNTYIMMARVLASSSSNAVVSEGKSDSLRLLGWKYLHELEDKNLYRHKKDDLNLFLAMMALAAFDGDIELSRALYYLFIAKKYKTLCANWKGNILVDQDTIWKSTLMPEMLNYLMLAYARFDPRNLPVLSGYEKGIELRRKFLREFDSSMRLDDTDKLVKFKLPFLPISDLNSEAQVLAESNAIWSFNLENGGTRNTLTSSNEAALEDIKKYRQLLDSFAQEAEDFNEFKFKVMYEVTKMQRESINVNVFNKISLHTYLSIPINLKQQKEFLRRLTFFTFQQHEFEAVIKRLYEGYRNIPSSHTRDQNSISTEAISVSKPETTEDLNLIMHDIWYITCLRHKIMMDTTLYELVMKAAIEFQNEDLAKKVWNDRGKFRTTVPFLKMDQRIRIAKDQKFAHLMVEFFTKQGKYSDAIAIILSSKNRFNWTYSMVRNLHKALEEIEDRNSVEILLDVVNKKSHAKALKWEEQELNM

SEQ ID NO: 1670 - DNA, 2493 bp, Candida glabrata CBS 138
  CDS (1)..(2493)
atgcgaactgtactaccagttcacaggtttgtgcgaacggtttacctacctgcgcgccggctagtaaaggcaaatgtaggggcgcaaaagatagcaccagcagccagttctgcgattctgccgaaggacctagacattgatatacgaggtatcgaagatccaaaagtcttagagatgaaagtgaaacaattacaagagtttactagaaatataaagactgagataaagcgtcgagcgaagcaaaaacacactgaagagcaacctctcgagctcagcaacaatgaagatatttcagctgtatttaatgcagttgtaaatactccaaagaaagctgattctatcggaaaagggatcactgaaaagttgatggagaatactgtcgatcagatcatcgataatgtggtaccgaaggcgatacaggaacgaattgctgacaaatctttaatggtcagagcgctagtgcgtacatcggttcatacccctattgaatccaatatgcttgttaaaaaattagcagaatccgagatgagactaaaaggtttgccgcaagaagatattcgtacatttttaaagaaaagtataaagaatctaaacttcaccaacattttagaattggataaaatgctcttggaatatgttggaaatgacataagcaaattctctgataacatgtacaagtgcctattttctaacctgtcaaaactaaatgcccaaagcacacaacatagtaaagatgatcttgtgattaaaatgttcaacaaattattgaaaaggtatgatacgaatctgaacactacaaacgcaaatgtttggaatgaaaagatgactaacgtcatattatcttactgcattaattatagtatcaaattgaaagactttgaaatcaccgataaatttgtctcgaaatttaagaatgattacaaactactacctgataaacaaaattatacaagtataatacacttctattcgaagctgggactcagtgataaagcctgggatacctttgataccatgaagtttctatcgagatctcatgcacctgatacaaaagcttataacagtgttttgatgctatgtaaacaagaaaaagacttcagaaagacaattgacctatatcatgaaatggttgacaagaaagtgccaatggatgctagaacttatacaactatgattcatacattagcggctgctagtacagattcttatactagtgagggtaagtctgattcactccggatattgggttggaaactgatcaatgagctttcaaagaatttgcaatatgatgttatgaaaaacaaacatatactgatttcgatgctctcattatctgcatatgatggtgatctgggtatggcaagagcgttgtattacaagattttccatcaaaagtccgacgaactttatgccacaatgaatccagctcaattagaaaatctctcagcaaaagatattttgtcatacgtgttggatccgaaagtactgaattatttgcttctagcgtactcaagatatgataagggacgcttaccattaattttagcgaacgatgagggttctacattgagaagaaatgttatcaatgctgttgattttggagggcattcatcagagatgtctgcacttgagttggcgaataaaatcacaataccatttttgccatattcagaaatttctgaaaactggcaaataattgcggaatcaagagcgctatggttgtttaaccttgaatatggtggcattactgatatttccctcacatcatcaatacaagaaaatgcgatgatttatagagaccaagccatagatattaatgaattcaagttaaagattatgaatgacttgatcgaatggaagaccgaaaacctgaacaacacagttttaaatccaacccttttacagacgtttttaacaattcctttaaaaagtggtaatagagaagaattttacagtagattgaatgcctttacatttcagcaacataacttaaactccgtgatggaaaagttttatgaatataaaccagagtcagaggaatataatgattgcctcaaatattttgagagtctgaaaagaaaaattctaatgtcgaatagtcactacgatcttgttatgaaggctgctactaaatttggagatattgacgctgccaatcaagtttggaaagatagaggtgagtacaggaaaactaccagctttgctaagctacctaccaaggatagaattattagtgattctaactttgcaaagcttatggttgagttttttgtttctcagaggctatattctgatgctatggccgttgttttatcctccaaaaattttatcaaatgggactactcaatggttaaatctctacaccatggcctgattgaagctgaagatattataaatattgaaaaattgcttgacgttgtcaaccgtagcaaaggtacaaagaaagcagttgatgtcattaatgaacaaatcgaggaactcaagttatcctaa

SEQ ID NO: 1671 - protein, 830 aa, Candida glabrata CBS 138 [sequence omitted]

SEQ ID NO: 1672 - DNA, 2562 bp, Kluyveromyces lactis NRRL Y-1140
  CDS (1)..(2562)
atgctttcacttggaaagaatggtaagacttcgtcaacactggtacgaaatgcgcgaaggagtgtgatcatgccagctagcagagatgttagatctcgtaagagacgggcgagatctgtcactgatacgaaagatgtgttagatttggattcaatcgatttcactaatgagaaggaagttcagttcaaggttaatcagttgaaagagttcaccagaaatcttcgagaacagatcaagtacactgatgagctaaagcgtaagcatgttatagaagaggaggagacaaaatcggtagatcccgagatgcatgattttgacagcgatgctggagttattttaagttcattgaacgataaggtagcgggccctggggcagaacagaatctttcaactcttttgttatcagataaagctgatacatcgttactacccgagcgattatcagagaggataaaggacaaggacctcattttgaggtgtttgtttgataagaggaatagggattttaatccgatagtaacagaactataccattcagaacagagactaaagggtttaggaatccaatttatttattccaagattctttcgaaattcgataaactttcctttacgagcttatcccaattggatgagatgataatggaaagcgttgggaatgactcctcgcggttaaatggtaacttatacgagcatctcatgttgtctttttctcgggttacatcaccatcagcacagggcaaattggaagtatgtggtaaacttcgagagttaacagagagaatggatgctacattatcgaagaaaagtttccagccaacacagtatatgctaaatgcttgtatatttgcagcttcaaaagccatgagctgggagtatatggacttttttttaaagaaattcacctcgacgtatgatatgcaacctaacagaaagaactatacgacagtcatttctttctataccaagatggaacactataagaaagcttggcaactctttgactctcttaaatttttgtccctagaacacaaaccagatactaaggtctacaacttgatgctcgaagtgtgtcaaaaggagaagaattacgcaagatcattagatattttccaagaaatggacgatttgaacgtcacaaaggacctaaagacttatcttaacgcagctaaatccttagcattgtcaagtgctgacaacgtaacaagtgaaggtaaagcagattcattaaggttaatgagttggaagtacatccataagattcatgatgatcctaaattatccaaacagctaaccgaaaatccacgcaacaacatgctgctgctagagacaatgatggttttatcagcttatgatggtgacgtcggatttgctcgtgcgttgtactataaatatacgaacgcattgttcaaagcacacttctatgaattcaaaaagtatcacaaagataccgatccagttgattatattcgcatttggaagaaatctctttccgcacaaatgtttaactggctaatgttatcgtactctaaattcaaaaagtctcgactaccagtattattaggatatccagaaggttcaagcttgagacgtagcatgatttattcagttgactattcgggacgagattcctcctatgagaattcaaatattcaattacctatgcttcctatgactgagcttaatgatgcagaattaactataaatgaatcaaaagccttatggagatttaatttagagtttggcggaaattatgacattagagaattaccagaaggtatgcagacagtgaaagatatagagaatattgtcaaatgtgcaaaaactgttaatgaattcaagctgcagatttcgcagcgtttattggaatggaaaaacagatatgtcaatcacaagattctcaatatgaaatctttgataactttcctcacgatacctattaggcttcatgaacccaatgagttcaaattgaggttacaggaattcacattccaagcgttcgaattcaacgaaagggtggaatatcaattcaaaaaatcaaaaacgaacgaactggaatcacctgtactctcaaaagattttaacacaaccgacagcaatgccttggttgataacggtattataccctcagaattccttctatacttggtttctatgaaacacaaactagccactaattgtgctatctacgaagtgtcgatgaaagcagccatagcgttccatgattacgaacttgctatgacaacatggaagaacagaggtaaattcagaatgactgacgctttccagaaattaacaccaggtgaaagacaacaaagtgacgcaactttcgctcaactaatggtcgaatacttcacgaatgaaaagatgtatcaagacgcattgagtatcattttgtcatctttaaagacggtaaactggcagtattctatggttaagtccctacacagagcgttgctagctattgaagatgagaactccgctgcaagacttctgagtgtggtgaatcggaaatcaaagatagttgaattggaggaagagatcaagtcattagacctttga

SEQ ID NO: 1673 - protein, 853 aa, Kluyveromyces lactis NRRL Y-1140
MLSLGKNGKTSSTLVRNARRSVIMPASRDVRSRKRRARSVTDTKDVLDLDSIDFTNEKEVQFKVNQLKEFTRNLREQIKYTDELKRKHVIEEEETKSVDPEMHDFDSDAGVILSSLNDKVAGPGAEQNLSTLLLSDKADTSLLPERLSERIKDKDLILRCLFDKRNRDFNPIVTELYHSEQRLKGLGIQFIYSKILSKFDKLSFTSLSQLDEMIMESVGNDSSRLNGNLYEHLMLSFSRVTSPSAQGKLEVCGKLRELTERMDATLSKKSFQPTQYMLNACIFAASKAMSWEYMDFFLKKFTSTYDMQPNRKNYTTVISFYTKMEHYKKAWQLFDSLKFLSLEHKPDTKVYNLMLEVCQKEKNYARSLDIFQEMDDLNVTKDLKTYLNAAKSLALSSADNVTSEGKADSLRLMSWKYIHKIHDDPKLSKQLTENPRNNMLLLETMMVLSAYDGDVGFARALYYKYTNALFKAHFYEFKKYHKDTDPVDYIRIWKKSLSAQMFNWLMLSYSKFKKSRLPVLLGYPEGSSLRRSMIYSVDYSGRDSSYENSNIQLPMLPMTELNDAELTINESKALWRFNLEFGGNYDIRELPEGMQTVKDIENIVKCAKTVNEFKLQISQRLLEWKNRYVNHKILNMKSLITFLTIPIRLHEPNEFKLRLQEFTFQAFEFNERVEYQFKKSKTNELESPVLSKDFNTTDSNALVDNGIIPSEFLLYLVSMKHKLATNCAIYEVSMKAAIAFHDYELAMTTWKNRGKFRMTDAFQKLTPGERQQSDATFAQLMVEYFTNEKMYQDALSIILSSLKTVNWQYSMVKSLHRALLAIEDENSAARLLSVVNRKSKIVELEEEIKSLDL

SEQ ID NO: 1674 - DNA, 22 bp, Artificial sequence
  primer
atgtacatggccagatgtggcc

SEQ ID NO: 1675 - DNA, 25 bp, Artificial sequence
  primer
ctacatgttaagttcttgttcctcc

SEQ ID NO: 1676 - protein, 887 aa, Artificial sequence
  consensus sequence
  Variant (2)..(4): Xaa in position 2 to 4 is any amino acid
  Variant (6)..(22): Xaa in position 6 to 22 is any amino acid
  Variant (24)..(45): Xaa in position 24 to 45 is any amino acid
  Variant (47)..(56): Xaa in position 47 to 56 is any amino acid
  Variant (61)..(62): Xaa in position 61 to 62 is any amino acid
  Variant (65)..(65): Xaa in position 65 is any amino acid
  Variant (68)..(70): Xaa in position 68 to 70 is any amino acid
  Variant (73)..(74): Xaa in position 73 to 74 is any amino acid
  Variant (76)..(93): Xaa in position 76 to 93 is any amino acid
  Variant (94)..(94): Xaa in position 94 is any or no amino acid
  Variant (96)..(120): Xaa in position 96 to 120 is any amino acid
  Variant (121)..(126): Xaa in position 121 to 126 is any or no amino acid
  Variant (128)..(134): Xaa in position 128 to 134 is any amino acid
  Variant (136)..(136): Xaa in position 136 is any amino acid
  Variant (138)..(138): Xaa in position 138 is any amino acid
  Variant (139)..(139): Xaa in position 139 is any or no amino acid
  Variant (144)..(144): Xaa in position 144 is any amino acid
  Variant (146)..(146): Xaa in position 146 is any amino acid
  Variant (149)..(149): Xaa in position 149 is any amino acid
  Variant (152)..(152): Xaa in position 152 is any amino acid
  Variant (154)..(158): Xaa in position 154 to 158 is any amino acid
  Variant (160)..(160): Xaa in position 160 is any amino acid
  Variant (162)..(162): Xaa in position 162 is any amino acid
  Variant (164)..(168): Xaa in position 164 to 168 is any amino acid
  Variant (169)..(171): Xaa in position 169 to 171 is any or no amino acid
  Variant (173)..(176): Xaa in position 173 to 176 is any amino acid
  Variant (179)..(179): Xaa in position 179 is any amino acid
  Variant (182)..(182): Xaa in position 182 is any amino acid
  Variant (184)..(195): Xaa in position 184 to 195 is any amino acid
  Variant (197)..(200): Xaa in position 197 to 200 is any amino acid
  Variant (202)..(202): Xaa in position 202 is any amino acid
  Variant (204)..(204): Xaa in position 204 is any amino acid
  Variant (206)..(206): Xaa in position 206 is any amino acid
  Variant (210)..(210): Xaa in position 210 is any amino acid
  Variant (218)..(221): Xaa in position 218 to 221 is any amino acid
  Variant (223)..(224): Xaa in position 223 to 224 is any amino acid
  Variant (228)..(229): Xaa in position 228 to 229 is any amino acid
  Variant (234)..(234): Xaa in position 234 is any amino acid
  Variant (236)..(236): Xaa in position 236 is any amino acid
  Variant (239)..(240): Xaa in position 239 to 240 is any amino acid
  Variant (242)..(251): Xaa in position 242 to 251 is any amino acid
  Variant (252)..(255): Xaa in position 252 to 255 is any or no amino acid
  Variant (258)..(258): Xaa in position 258 is any amino acid
  Variant (260)..(262): Xaa in position 260 to 262 is any amino acid
  Variant (269)..(270): Xaa in position 269 to 270 is any amino acid
  Variant (272)..(276): Xaa in position 272 to 276 is any amino acid
  Variant (277)..(289): Xaa in position 277 to 289 is any or no amino acid
  Variant (294)..(294): Xaa in position 294 is any amino acid
  Variant (298)..(298): Xaa in position 298 is any amino acid
  Variant (300)..(301): Xaa in position 300 to 301 is any amino acid
  Variant (304)..(304): Xaa in position 304 is any amino acid
  Variant (306)..(307): Xaa in position 306 to 307 is any amino acid
  Variant (310)..(311): Xaa in position 310 to 311 is any amino acid
  Variant (314)..(314): Xaa in position 314 is any amino acid
  Variant (316)..(317): Xaa in position 316 to 317 is any amino acid
  Variant (320)..(322): Xaa in position 320 to 322 is any amino acid
  Variant (324)..(326): Xaa in position 324 to 326 is any amino acid
  Variant (332)..(332): Xaa in position 332 is any amino acid
  Variant (337)..(337): Xaa in position 337 is any amino acid
  Variant (341)..(342): Xaa in position 341 to 342 is any amino acid
  Variant (344)..(345): Xaa in position 344 to 345 is any amino acid
  Variant (347)..(347): Xaa in position 347 is any amino acid
  Variant (350)..(350): Xaa in position 350 is any amino acid
  Variant (360)..(361): Xaa in position 360 to 361 is any amino acid
  Variant (363)..(363): Xaa in position 363 is any amino acid
  Variant (366)..(368): Xaa in position 366 to 368 is any amino acid
  Variant (371)..(371): Xaa in position 371 is any amino acid
  Variant (374)..(375): Xaa in position 374 to 375 is any amino acid
  Variant (377)..(377): Xaa in position 377 is any amino acid
  Variant (380)..(380): Xaa in position 380 is any amino acid
  Variant (383)..(383): Xaa in position 383 is any amino acid
  Variant (385)..(385): Xaa in position 385 is any amino acid
  Variant (392)..(393): Xaa in position 392 to 393 is any amino acid
  Variant (395)..(395): Xaa in position 395 is any amino acid
  Variant (397)..(402): Xaa in position 397 to 402 is any amino acid
  Variant (405)..(406): Xaa in position 405 to 406 is any amino acid
  Variant (409)..(410): Xaa in position 409 to 410 is any amino acid
  Variant (413)..(413): Xaa in position 413 is any amino acid
  Variant (416)..(420): Xaa in position 416 to 420 is any amino acid
  Variant (425)..(425): Xaa in position 425 is any amino acid
  Variant (436)..(436): Xaa in position 436 is any amino acid
  Variant (440)..(440): Xaa in position 440 is any amino acid
  Variant (441)..(446): Xaa in position 441 to 446 is any or no amino acid
  Variant (448)..(448): Xaa in position 448 is any amino acid
  Variant (450)..(458): Xaa in position 450 to 458 is any amino acid
  Variant (460)..(462): Xaa in position 460 to 462 is any amino acid
  Variant (465)..(465): Xaa in position 465 is any amino acid
  Variant (467)..(467): Xaa in position 467 is any amino acid
  Variant (469)..(469): Xaa in position 469 is any amino acid
  Variant (473)..(476): Xaa in position 473 to 476 is any amino acid
  Variant (482)..(486): Xaa in position 482 to 486 is any amino acid
  Variant (488)..(488): Xaa in position 488 is any amino acid
  Variant (490)..(492): Xaa in position 490 to 492 is any amino acid
  Variant (494)..(501): Xaa in position 494 to 501 is any amino acid
  Variant (502)..(505): Xaa in position 502 to 505 is any or no amino acid
  Variant (507)..(509): Xaa in position 507 to 509 is any amino acid
  Variant (513)..(514): Xaa in position 513 to 514 is any amino acid
  Variant (516)..(516): Xaa in position 516 is any amino acid
  Variant (518)..(518): Xaa in position 518 is any amino acid
  Variant (528)..(529): Xaa in position 528 to 529 is any amino acid
  Variant (532)..(534): Xaa in position 532 to 534 is any amino acid
  Variant (539)..(539): Xaa in position 539 is any amino acid
  Variant (542)..(543): Xaa in position 542 to 543 is any amino acid
  Variant (545)..(546): Xaa in position 545 to 546 is any amino acid
  Variant (550)..(555): Xaa in position 550 to 555 is any amino acid
  Variant (557)..(560): Xaa in position 557 to 560 is any amino acid
  Variant (561)..(564): Xaa in position 561 to 564 is any or no amino acid
  Variant (566)..(574): Xaa in position 566 to 574 is any amino acid
  Variant (580)..(587): Xaa in position 580 to 587 is any amino acid
  Variant (589)..(590): Xaa in position 589 to 590 is any amino acid
  Variant (594)..(594): Xaa in position 594 is any amino acid
  Variant (596)..(596): Xaa in position 596 is any amino acid
  Variant (598)..(598): Xaa in position 598 is any amino acid
  Variant (603)..(603): Xaa in position 603 is any amino acid
  Variant (606)..(625): Xaa in position 606 to 625 is any amino acid
  Variant (626)..(634): Xaa in position 626 to 634 is any or no amino acid
  Variant (636)..(636): Xaa in position 636 is any amino acid
  Variant (638)..(638): Xaa in position 638 is any amino acid
  Variant (643)..(645): Xaa in position 643 to 645 is any amino acid
  Variant (647)..(657): Xaa in position 647 to 657 is any amino acid
  Variant (659)..(660): Xaa in position 659 to 660 is any amino acid
  Variant (662)..(662): Xaa in position 662 is any amino acid
  Variant (664)..(665): Xaa in position 664 to 665 is any amino acid
  Variant (668)..(668): Xaa in position 668 is any amino acid
  Variant (670)..(670): Xaa in position 670 is any amino acid
  Variant (672)..(672): Xaa in position 672 is any amino acid
  Variant (676)..(676): Xaa in position 676 is any amino acid
  Variant (678)..(681): Xaa in position 678 to 681 is any amino acid
  Variant (684)..(685): Xaa in position 684 to 685 is any amino acid
  Variant (688)..(689): Xaa in position 688 to 689 is any amino acid
  Variant (698)..(699): Xaa in position 698 to 699 is any amino acid
  Variant (701)..(704): Xaa in position 701 to 704 is any amino acid
  Variant (707)..(709): Xaa in position 707 to 709 is any amino acid
  Variant (710)..(722): Xaa in position 710 to 722 is any or no amino acid
  Variant (724)..(733): Xaa in position 724 to 733 is any amino acid
  Variant (734)..(746): Xaa in position 734 to 746 is any or no amino acid
  Variant (748)..(750): Xaa in position 748 to 750 is any amino acid
  Variant (752)..(753): Xaa in position 752 to 753 is any amino acid
  Variant (756)..(756): Xaa in position 756 is any amino acid
  Variant (758)..(761): Xaa in position 758 to 761 is any amino acid
  Variant (770)..(771): Xaa in position 770 to 771 is any amino acid
  Variant (773)..(776): Xaa in position 773 to 776 is any amino acid
  Variant (779)..(780): Xaa in position 779 to 780 is any amino acid
  Variant (783)..(783): Xaa in position 783 is any amino acid
  Variant (790)..(790): Xaa in position 790 is any amino acid
  Variant (792)..(793): Xaa in position 792 to 793 is any amino acid
  Variant (795)..(795): Xaa in position 795 is any amino acid
  Variant (797)..(801): Xaa in position 797 to 801 is any amino acid
  Variant (804)..(805): Xaa in position 804 to 805 is any amino acid
  Variant (807)..(808): Xaa in position 807 to 808 is any amino acid
  Variant (811)..(811): Xaa in position 811 is any amino acid
  Variant (819)..(819): Xaa in position 819 is any amino acid
  Variant (821)..(822): Xaa in position 821 to 822 is any amino acid
  Variant (827)..(827): Xaa in position 827 is any amino acid
  Variant (830)..(830): Xaa in position 830 is any amino acid
  Variant (836)..(837): Xaa in position 836 to 837 is any amino acid
  Variant (840)..(840): Xaa in position 840 is any amino acid
  Variant (845)..(846): Xaa in position 845 to 846 is any amino acid
  Variant (849)..(849): Xaa in position 849 is any amino acid
  Variant (852)..(852): Xaa in position 852 is any amino acid
  Variant (857)..(857): Xaa in position 857 is any amino acid
  Variant (859)..(860): Xaa in position 859 to 860 is any amino acid
  Variant (862)..(862): Xaa in position 862 is any amino acid
  Variant (869)..(869): Xaa in position 869 is any amino acid
  Variant (870)..(873): Xaa in position 870 to 873 is any or no amino acid
  Variant (876)..(879): Xaa in position 876 to 879 is any amino acid
  Variant (881)..(882): Xaa in position 881 to 882 is any amino acid
  Variant (884)..(885): Xaa in position 884 to 885 is any amino acid
MXXXGXXXXXXXXXXXXXXXXXKXXXXXXXXXXXXXXXXXXXXXXLXXXXXXXXXXVEFKXXQLXEFXXXLKXXIXXXXXXXXXXXXXXXXXXXSXXXXXXXXXXXXXXXXXXXXXXXXXXXXXXXLXXXXXXXKXDXXLVPKXIXERXADXDXXXXXLXDXSXXXXXXXXPXXXXLYXSEXRXXXXXXXXXXXXLXXXXKXLXFXSILXLDEMLLEXXXXDXXKFNXXMYECXFXNLXXLXXXXXXXXXXXXXXVIXKXXXLLERYDXXLXXXXXXXXXXXXXXXXXXKMTQXILNXCXXYSXKXXSFXXMDXFXXKFXXXYXXXPNKQNXTTVIXFYSXXEXXKXAWXTFDTMKFLSXXHXPDXXXYNXMLXXCXKEXNFXKXLDLFQEXXDXNXXXXXXTYXXMAXXLAXSSXXXXXSEGKXDSLRLLGWKYXHELXXXXXXXKXLXXXXXXXXXLXXXMMXLXAXDGDXXXXRALYYXXXXXKXKXXXAXXXXXXXXXXXXDXXXIWKXXLXPXMLNYLMLAYXXFDXXXLPVLXGYXXGXXLRRXXXXXXDXXXXXXXXDXXXXXXXXXLPFLPXXXXXXXXQXXAESXAXWXFNLEXGGXXXXXXXXXXXXXXXXXXXXXXXXXXXXXAXDXNEFKXXXMXXXXXXXXXXXNXXVXNXXSLXTXLXIPIXLXXXXEFXXRLXXFTFQQHEFXXVXXXXYEXXXXXXXXXXXXXXXXSXXXXXXXXXXXXXXXXXXXXXXXYXXXLXXKIXMXXXXYELVMKAAXXFXXXXLAXXVWXDRGKFRXTXXFXKXXXXXRIXXDXXFAXLMVEFFTXQXXYSDAXAIXLSSKNXXNWXYSMVXXLHXALXEIEDXNXXEXLLDVVNXXXXXKSXXXXLXXEXXEL

SEQ ID NO: 1677 - protein, 61 aa, Artificial sequence
  protein pattern
  Variant (2)..(4): Xaa in position 2 to 4 is any amino acid
  Variant (7)..(7): Xaa in position 7 is any or no amino acid
  Variant (9)..(9): Xaa in position 9 is any or no amino acid
  Variant (11)..(11): Xaa in position 11 is any amino acid
  Variant (16)..(16): Xaa in position 16 is Gln or Ser
  Variant (19)..(19): Xaa in position 19 is Ser or Thr
  Variant (20)..(20): Xaa in position 20 is Lys or Arg
  Variant (21)..(21): Xaa in position 21 is any amino acid
  Variant (23)..(24): Xaa in position 23 to 24 is any amino acid
  Variant (26)..(26): Xaa in position 26 is any amino acid
  Variant (29)..(29): Xaa in position 29 is Asn or Gln
  Variant (30)..(30): Xaa in position 30 is any amino acid
  Variant (33)..(33): Xaa in position 33 is Ser or Thr
  Variant (34)..(34): Xaa in position 34 is Leu or Met
  Variant (39)..(39): Xaa in position 39 is any amino acid
  Variant (40)..(40): Xaa in position 40 is Glu or Lys
  Variant (42)..(42): Xaa in position 42 is any amino acid
  Variant (45)..(46): Xaa in position 45 to 46 is any amino acid
  Variant (47)..(47): Xaa in position 47 is Thr or Val
  Variant (50)..(50): Xaa in position 50 is any amino acid
  Variant (53)..(53): Xaa in position 53 is Glu, Gln or Arg
  Variant (54)..(54): Xaa in position 54 is Ile or Val
  Variant (56)..(56): Xaa in position 56 is Glu or Gln
  Variant (59)..(59): Xaa in position 59 is Lys or Arg
  Variant (61)..(61): Xaa in position 61 is Phe or Tyr
YXXXPNXKXNXTTVIXFYXXXEXXKXAWXXFDXXKFLSXXHXPDXXXYNXMLXXCXKEXNX

SEQ ID NO: 1678 - protein, 61 aa, Artificial sequence
  protein pattern
  Variant (3)..(3): Xaa in position 3 is His or Lys
  Variant (10)..(10): Xaa in position 10 is Thr or Val
  Variant (11)..(11): Xaa in position 11 is any amino acid
  Variant (13)..(14): Xaa in position 13 to 14 is any amino acid
  Variant (19)..(19): Xaa in position 19 is Ile or Met
  Variant (21)..(22): Xaa in position 21 to 22 is Ile or Val
  Variant (28)..(28): Xaa in position 28 is any or no amino acid
  Variant (30)..(30): Xaa in position 30 is any amino acid
  Variant (31)..(31): Xaa in position 31 is any or no amino acid
  Variant (33)..(33): Xaa in position 33 is Ala, Asp or Thr
  Variant (38)..(38): Xaa in position 38 is Lys or Arg
  Variant (39)..(39): Xaa in position 39 is Asn or Ser
  Variant (42)..(42): Xaa in position 42 is His or Lys
  Variant (43)..(43): Xaa in position 43 is Ala or Gly
  Variant (45)..(45): Xaa in position 45 is any amino acid
  Variant (47)..(47): Xaa in position 47 is Ala or Ile
  Variant (48)..(48): Xaa in position 48 is Asp or Glu
  Variant (50)..(51): Xaa in position 50 to 51 is any amino acid
  Variant (52)..(52): Xaa in position 52 is Asn or Ser
  Variant (53)..(53): Xaa in position 53 is Ile or Val
  Variant (55)..(55): Xaa in position 55 is any amino acid
FAXLMVEFFXXQXXYSDAXAXXLSSKNXFXXWXYSMVXXLHXXLXEXXDXXXXEXLLDVVN

SEQ ID NO: 1679 - protein, 51 aa, Artificial sequence
  protein pattern
  Variant (3)..(3): Xaa in position 3 is any or no amino acid
  Variant (5)..(8): Xaa in position 5 to 8 is any amino acid
  Variant (9)..(9): Xaa in position 9 is any or no amino acid
  Variant (11)..(11): Xaa in position 11 is Asp or Glu
  Variant (18)..(18): Xaa in position 18 is any amino acid
  Variant (19)..(19): Xaa in position 19 is Glu or Lys
  Variant (21)..(21): Xaa in position 21 is Gly or Gln
  Variant (22)..(22): Xaa in position 22 is Asp or Asn
  Variant (23)..(23): Xaa in position 23 is any amino acid
  Variant (24)..(24): Xaa in position 24 is Asp or Glu
  Variant (25)..(25): Xaa in position 25 is Ala or Leu
  Variant (27)..(28): Xaa in position 27 to 28 is any amino acid
  Variant (31)..(31): Xaa in position 31 is any amino acid
  Variant (35)..(35): Xaa in position 35 is Glu or Lys
  Variant (36)..(36): Xaa in position 36 is Phe or Tyr
  Variant (38)..(38): Xaa in position 38 is any amino acid
  Variant (40)..(40): Xaa in position 40 is Thr or Val
  Variant (41)..(41): Xaa in position 41 is Pro or Ser
  Variant (43)..(43): Xaa in position 43 is Ala or Leu
  Variant (44)..(45): Xaa in position 44 to 45 is any amino acid
  Variant (46)..(46): Xaa in position 46 is Asp or Pro
  Variant (47)..(47): Xaa in position 47 is Gln or Thr
  Variant (48)..(48): Xaa in position 48 is Lys or Arg
  Variant (49)..(49): Xaa in position 49 is any amino acid
KIXMXXXXXYXLVMKAAXXFXXXXXAXXVWXDRGXXRXTXXFXXXXXXXRI

SEQ ID NO: 1680 - protein, 54 aa, Artificial sequence
  protein pattern
  Variant (2)..(2): Xaa in position 2 is any amino acid
  Variant (6)..(6): Xaa in position 6 is Ile, Leu or Met
  Variant (7)..(7): Xaa in position 7 is Asp or Gln
  Variant (9)..(9): Xaa in position 9 is any amino acid
  Variant (11)..(11): Xaa in position 11 is Ile or Val
  Variant (12)..(13): Xaa in position 12 to 13 is any amino acid
  Variant (14)..(14): Xaa in position 14 is Asp or Thr
  Variant (15)..(16): Xaa in position 15 to 16 is any amino acid
  Variant (19)..(19): Xaa in position 19 is Ile or Leu
  Variant (20)..(21): Xaa in position 20 to 21 is any amino acid
  Variant (23)..(23): Xaa in position 23 is Lys or Arg
  Variant (24)..(24): Xaa in position 24 is Ser or Val
  Variant (27)..(27): Xaa in position 27 is any amino acid
  Variant (30)..(30): Xaa in position 30 is Ala or Ser
  Variant (31)..(31): Xaa in position 31 is Asp or Asn
  Variant (32)..(32): Xaa in position 32 is Ala, Asn or Thr
  Variant (33)..(33): Xaa in position 33 is Ile or Val
  Variant (34)..(34): Xaa in position 34 is Thr or Val
  Variant (39)..(39): Xaa in position 39 is Ala, Pro or Ser
  Variant (40)..(40): Xaa in position 40 is Asp or Ser
  Variant (45)..(45): Xaa in position 45 is Leu or Met
  Variant (46)..(46): Xaa in position 46 is Gly or Ser
  Variant (50)..(50): Xaa in position 50 is Ile or Leu
  Variant (52)..(52): Xaa in position 52 is Glu or Lys
  Variant (53)..(53): Xaa in position 53 is Ile or Leu
  Variant (54)..(54): Xaa in position 54 is Glu or His
DXFQEXXDXNXXXXXXTYXXXAXXLAXSSXXXXXSEGKXXSLRLXXWKYXHXXX

SEQ ID NO: 1681 - protein, 35 aa, Artificial sequence
  protein pattern
  Variant (2)..(3): Xaa in position 2 to 3 is any amino acid
  Variant (4)..(4): Xaa in position 4 is any or no amino acid
  Variant (6)..(6): Xaa in position 6 is Phe or Leu
  Variant (8)..(8): Xaa in position 8 is Trp or Tyr
  Variant (12)..(12): Xaa in position 12 is Ala or Ser
  Variant (14)..(14): Xaa in position 14 is Ala or Ser
  Variant (15)..(15): Xaa in position 15 is any amino acid
  Variant (17)..(17): Xaa in position 17 is Asp or Lys
  Variant (18)..(18): Xaa in position 18 is any amino acid
  Variant (19)..(19): Xaa in position 19 is Arg or Ser
  Variant (20)..(20): Xaa in position 20 is any amino acid
  Variant (25)..(25): Xaa in position 25 is any amino acid
  Variant (28)..(28): Xaa in position 28 is Glu or Pro
  Variant (29)..(29): Xaa in position 29 is Glu or Lys
  Variant (31)..(31): Xaa in position 31 is any amino acid
  Variant (32)..(32): Xaa in position 32 is Glu or Ser
LXXXMXNXLMLXYXXFXXXXLPVLXGYXXGXXLRR

SEQ ID NO: 1682 - protein, 42 aa, Artificial sequence
  protein pattern
  Variant (2)..(5): Xaa in position 2 to 5 is any amino acid
  Variant (7)..(7): Xaa in position 7 is any or no amino acid
  Variant (9)..(9): Xaa in position 9 is any or no amino acid
  Variant (12)..(12): Xaa in position 12 is any amino acid
  Variant (14)..(14): Xaa in position 14 is Phe or Tyr
  Variant (16)..(16): Xaa in position 16 is Ser or Thr
  Variant (20)..(20): Xaa in position 20 is Asn or Arg
  Variant (22)..(22): Xaa in position 22 is His or Lys
  Variant (23)..(23): Xaa in position 23 is any amino acid
  Variant (24)..(24): Xaa in position 24 is Pro or Gln
  Variant (25)..(25): Xaa in position 25 is any amino acid
  Variant (28)..(29): Xaa in position 28 to 29 is any amino acid
  Variant (32)..(32): Xaa in position 32 is Gln or Thr
  Variant (33)..(33): Xaa in position 33 is any amino acid
  Variant (38)..(38): Xaa in position 38 is Ala or Gln
  Variant (39)..(39): Xaa in position 39 is Phe or His
  Variant (42)..(42): Xaa in position 42 is Glu or Asn
NXXXXNXKXSLXTXLXIPIXLXXXXEFXXRLXXFTFQXXEFX

SEQ ID NO: 1683 - protein, 41 aa, Artificial sequence
  protein pattern
  Variant (2)..(2): Xaa in position 2 is any amino acid
  Variant (3)..(3): Xaa in position 3 is Asn or Ser
  Variant (6)..(6): Xaa in position 6 is any amino acid
  Variant (9)..(9): Xaa in position 9 is Glu or Lys
  Variant (14)..(14): Xaa in position 14 is any amino acid
  Variant (15)..(15): Xaa in position 15 is Ile or Val
  Variant (16)..(16): Xaa in position 16 is Asp, Gly or Asn
  Variant (17)..(17): Xaa in position 17 is Gly or Asn
  Variant (19)..(19): Xaa in position 19 is Ile or Val
  Variant (20)..(20): Xaa in position 20 is Ala, Ser or Val
  Variant (23)..(24): Xaa in position 23 to 24 is any or no amino acid
  Variant (26)..(27): Xaa in position 26 to 27 is any or no amino acid
  Variant (30)..(30): Xaa in position 30 is Glu or Lys
  Variant (32)..(32): Xaa in position 32 is Ile or Leu
  Variant (34)..(34): Xaa in position 34 is Asn or Ser
  Variant (37)..(37): Xaa in position 37 is Gly or Ser
  Variant (38)..(38): Xaa in position 38 is any amino acid
  Variant (40)..(40): Xaa in position 40 is any amino acid
  Variant (41)..(41): Xaa in position 41 is Ala or Pro
FXXILXLDXMLLEXXXXDXXKFXXNXXMYXCXFXNLXXLXX

SEQ ID NO: 1684 - protein, 38 aa, Artificial sequence
  protein pattern
  Variant (2)..(2): Xaa in position 2 is Leu or Met
  Variant (3)..(3): Xaa in position 3 is Ala or Ser
  Variant (5)..(5): Xaa in position 5 is Ala or Ser
  Variant (7)..(7): Xaa in position 7 is Phe or Tyr
  Variant (11)..(12): Xaa in position 11 to 12 is any or no amino acid
  Variant (14)..(14): Xaa in position 14 is any amino acid
  Variant (15)..(16): Xaa in position 15 to 16 is any or no amino acid
  Variant (22)..(22): Xaa in position 22 is any amino acid
  Variant (23)..(24): Xaa in position 23 to 24 is Phe or Ile
  Variant (25)..(26): Xaa in position 25 to 26 is any amino acid
  Variant (28)..(28): Xaa in position 28 is any amino acid
  Variant (29)..(29): Xaa in position 29 is Asp or Lys
  Variant (30)..(30): Xaa in position 30 is Glu or Thr
  Variant (31)..(31): Xaa in position 31 is Leu or Val
  Variant (32)..(32): Xaa in position 32 is any amino acid
  Variant (34)..(36): Xaa in position 34 to 36 is any amino acid
  Variant (37)..(37): Xaa in position 37 is Gly or Pro
  Variant (38)..(38): Xaa in position 38 is Ala or Asn
MXXLXAXDGDXXLXXXRALYYXXXXXKXXXXXAXXXXX

SEQ ID NO: 1685 - protein, 37 aa, Artificial sequence
  protein pattern
  Variant (2)..(4): Xaa in position 2 to 4 is any amino acid
  Variant (5)..(5): Xaa in position 5 is any or no amino acid
  Variant (7)..(7): Xaa in position 7 is any amino acid
  Variant (8)..(8): Xaa in position 8 is any or no amino acid
  Variant (10)..(10): Xaa in position 10 is Ile or Val
  Variant (11)..(11): Xaa in position 11 is Ile or Leu
  Variant (15)..(15): Xaa in position 15 is Asn or Arg
  Variant (17)..(17): Xaa in position 17 is Ile, Leu or Val
  Variant (19)..(19): Xaa in position 19 is any amino acid
  Variant (22)..(22): Xaa in position 22 is Leu or Met
  Variant (24)..(24): Xaa in position 24 is any amino acid
  Variant (27)..(27): Xaa in position 27 is any or no amino acid
  Variant (29)..(30): Xaa in position 29 to 30 is any amino acid
  Variant (31)..(31): Xaa in position 31 is Ser or Thr
  Variant (35)..(35): Xaa in position 35 is Ser or Thr
  Variant (36)..(36): Xaa in position 36 is any amino acid
  Variant (37)..(37): Xaa in position 37 is Glu or Gln
SXXXXEXXQXXAESXAXWXFNXEXGGXTXXXLTSXXX

SEQ ID NO: 1686 - protein, 37 aa, Artificial sequence
  protein pattern
  Variant (2)..(7): Xaa in position 2 to 7 is any or no amino acid
  Variant (10)..(10): Xaa in position 10 is any amino acid
  Variant (11)..(11): Xaa in position 11 is Ile or Met
  Variant (12)..(12): Xaa in position 12 is Phe or Leu
  Variant (14)..(14): Xaa in position 14 is Ala or Asn
  Variant (16)..(16): Xaa in position 16 is Ile or Leu
  Variant (17)..(18): Xaa in position 17 to 18 is any amino acid
  Variant (19)..(19): Xaa in position 19 is Ala or Ser
  Variant (20)..(20): Xaa in position 20 is Ser or Thr
  Variant (22)..(22): Xaa in position 22 is Ala or Cys
  Variant (23)..(23): Xaa in position 23 is any amino acid
  Variant (25)..(25): Xaa in position 25 is Phe or Trp
  Variant (26)..(26): Xaa in position 26 is Glu or His
  Variant (27)..(27): Xaa in position 27 is any amino acid
  Variant (29)..(29): Xaa in position 29 is Asp or Glu
  Variant (30)..(30): Xaa in position 30 is Phe or Tyr
  Variant (32)..(32): Xaa in position 32 is Ile or Leu
  Variant (33)..(33): Xaa in position 33 is any amino acid
  Variant (34)..(34): Xaa in position 34 is Lys or Arg
  Variant (36)..(36): Xaa in position 36 is any amino acid
  Variant (37)..(37): Xaa in position 37 is Asp or Ser
PXXXXXXTQXXXNXCXXXXXKXXSXXXMXXFXXXFXX

SEQ ID NO: 1687 - protein, 26 aa, Artificial sequence
  protein pattern
  Variant (2)..(3): Xaa in position 2 to 3 is any or no amino acid
  Variant (6)..(6): Xaa in position 6 is Ile or Val
  Variant (7)..(7): Xaa in position 7 is any amino acid
  Variant (9)..(9): Xaa in position 9 is Asp or Lys
  Variant (11)..(11): Xaa in position 11 is Ile, Leu or Val
  Variant (12)..(12): Xaa in position 12 is Ile or Leu
  Variant (13)..(13): Xaa in position 13 is Ala or Leu
  Variant (14)..(14): Xaa in position 14 is Lys or Arg
  Variant (15)..(15): Xaa in position 15 is Cys, Asn or Ser
  Variant (16)..(16): Xaa in position 16 is Ile or Leu
  Variant (17)..(17): Xaa in position 17 is Phe or Leu
  Variant (19)..(19): Xaa in position 19 is Lys or Arg
  Variant (20)..(20): Xaa in position 20 is Arg or Ser
  Variant (21)..(21): Xaa in position 21 is any amino acid
  Variant (22)..(22): Xaa in position 22 is Arg or Ser
  Variant (23)..(23): Xaa in position 23 is Asp or Asn
  Variant (24)..(24): Xaa in position 24 is Phe or Trp
  Variant (25)..(25): Xaa in position 25 is Ala or Asn
RXXERXXDXDXXXXXXXDXXXXXXXP

SEQ ID NO: 1688 - protein, 29 aa, Artificial sequence
  protein pattern
  Variant (2)..(2): Xaa in position 2 is any amino acid
  Variant (3)..(3): Xaa in position 3 is any or no amino acid
  Variant (5)..(6): Xaa in position 5 to 6 is any or no amino acid
  Variant (9)..(9): Xaa in position 9 is Leu or Val
  Variant (10)..(10): Xaa in position 10 is Ala or Asn
  Variant (13)..(13): Xaa in position 13 is Lys or Arg
  Variant (16)..(16): Xaa in position 16 is Ser or Thr
  Variant (17)..(17): Xaa in position 17 is any amino acid
  Variant (18)..(18): Xaa in position 18 is Asn or Thr
  Variant (20)..(20): Xaa in position 20 is Lys or Arg
  Variant (21)..(21): Xaa in position 21 is Glu or Ser
  Variant (22)..(22): Xaa in position 22 is Gln or Arg
  Variant (24)..(24): Xaa in position 24 is His or Lys
  Variant (25)..(25): Xaa in position 25 is any amino acid
  Variant (26)..(26): Xaa in position 26 is Thr or Val
  Variant (27)..(27): Xaa in position 27 is Asp or Lys
  Variant (28)..(28): Xaa in position 28 is Glu or Ser
  Variant (29)..(29): Xaa in position 29 is Leu, Pro or Val
EXXEXXFKXXQLXEFXXXLXXXIXXXXXX

SEQ ID NO: 1689 - protein, 24 aa, Artificial sequence
  protein pattern
  Variant (2)..(3): Xaa in position 2 to 3 is any amino acid
  Variant (4)..(7): Xaa in position 4 to 7 is any or no amino acid
  Variant (9)..(9): Xaa in position 9 is any amino acid
  Variant (11)..(11): Xaa in position 11 is Phe, Ile or Leu
  Variant (13)..(13): Xaa in position 13 is Asp or Glu
  Variant (16)..(16): Xaa in position 16 is Phe or Leu
  Variant (17)..(17): Xaa in position 17 is Lys or Arg
  Variant (18)..(18): Xaa in position 18 is Ile or Val
  Variant (20)..(20): Xaa in position 20 is any amino acid
  Variant (21)..(21): Xaa in position 21 is Asp or Glu
  Variant (22)..(22): Xaa in position 22 is Leu or Val
  Variant (23)..(23): Xaa in position 23 is any amino acid
  Variant (24)..(24): Xaa in position 24 is Glu or Lys
AXXXXXXAXDXNXFKXXXMXXXXX

SEQ ID NO: 1690 - protein, 17 aa, Artificial sequence
  protein pattern
  Variant (2)..(2): Xaa in position 2 is Asp or Lys
  Variant (3)..(3): Xaa in position 3 is Leu or Val
  Variant (4)..(4): Xaa in position 4 is Ile or Val
  Variant (5)..(5): Xaa in position 5 is Ile or Leu
  Variant (8)..(9): Xaa in position 8 to 9 is any or no amino acid
  Variant (11)..(11): Xaa in position 11 is any amino acid
  Variant (13)..(13): Xaa in position 13 is any amino acid
  Variant (14)..(14): Xaa in position 14 is any or no amino acid
DXXXXKMXXKXLXXRYD

SEQ ID NO: 1691 - DNA, 1770 bp, Saccharomyces cerevisiae
  CDS (1)..(1770)
atgactatttcttctgcacatccagaaacagaacccaagtggtggaaagaggccacaatttatcaaatttatcccgcaagtttcaaagactccaacaacgatggttggggtgatatgaagggtattgcctccaagttggagtacatcaaagagcttggtaccgatgccatttggatctcgccattttacgactcgccacaagatgatatgggttacgatattgccaactacgaaaaggtctggccaacctacggtacgaacgaggactgctttgccttgatcgaaaagacacataagcttggtatgaaatttatcaccgacttagtcatcaaccattgctccagcgaacatgaatggttcaaagagagcagatcctcaaaaaccaatccaaaacgtgactggttcttctggagacctcctaagggttatgacgccgaaggcaagccaattcctccaaacaattggaggtcttacttcggtggttctgcatggacgttcgatgaaaagacacaagagttttacttgcgtttgttttgctccacccaacctgatctaaactgggagaacgaagactgcagaaaggcaatctacgaaagtgccgttggatactggttagaccatggtgtagacggctttagaattgatgtgggaagcttgtactccaaggttgctggtctaccagacgctcctgtgattgacgaaaactcaaagtggcaactcagtgatcctttcacaatgaacggaccacgtatccatgagtttcatcaagaaatgaacaagttcatcagaaacagagtgaaggatggcagagaaattatgacagttggtgaaatgcgacatgctactgatgagaccaagaggttgtatacaagtgcgtcaagacacgaacttagtgagttattcaacttttcccacactgatgtcgggacttcgcccaagttccgtcaaaatttgataccatatgaactaaaggattggaaggttgcccttgctgaacttttcagatacgttaacggaactgattgttggtcaacaatttatctggaaaatcacgaccaacctcgttcaattaccagatttggtgacgattctcccaaaaaccgtgttatttctggtaagttgttgtctgtgttgttggtgtcactgagcggtactctatatgtgtaccaaggacaggaactgggtgaaatcaatttcaagaactggcctatcgaaaaatacgaggatgtcgaagttagaaataactatgatgcgatcaaggaagagcatggagaaaactcgaaggagatgaagaggtttttggaagcaattgcccttatttccagagaccatgctagaacacctatgcaatggtctcgtgaggagccaaatgctggtttttctggtcctaatgctaaaccatggttttacttgaacgagtctttcagggaaggaattaacgctgaagacgaatccaaggaccccaactcggttttgaacttctggaaggaggccttgagatttagaaaggcacacaaggatattactgtgtatggatatgattttgagtttattgatttggacaataagaaactgttcagcttcacaaagaaatacgacaacaaaacattgtttgctgctttgaacttcagctctgattcgatcgacttcacgattccaaacaatagctcatcgtttaagttggaattcggaaactacccaagaagtgaagttgatgcgtcttccagaacattgaagccatgggagggcagaatttacatatctgaatga

SEQ ID NO: 1692 - protein, 589 aa, Saccharomyces cerevisiae
MTISSAHPETEPKWWKEATIYQIYPASFKDSNNDGWGDMKGIASKLEYIKELGTDAIWISPFYDSPQDDMGYDIANYEKVWPTYGTNEDCFALIEKTHKLGMKFITDLVINHCSSEHEWFKESRSSKTNPKRDWFFWRPPKGYDAEGKPIPPNNWRSYFGGSAWTFDEKTQEFYLRLFCSTQPDLNWENEDCRKAIYESAVGYWLDHGVDGFRIDVGSLYSKVAGLPDAPVIDENSKWQLSDPFTMNGPRIHEFHQEMNKFIRNRVKDGREIMTVGEMRHATDETKRLYTSASRHELSELFNFSHTDVGTSPKFRQNLIPYELKDWKVALAELFRYVNGTDCWSTIYLENHDQPRSITRFGDDSPKNRVISGKLLSVLLVSLSGTLYVYQGQELGEINFKNWPIEKYEDVEVRNNYDAIKEEHGENSKEMKRFLEAIALISRDHARTPMQWSREEPNAGFSGPNAKPWFYLNESFREGINAEDESKDPNSVLNFWKEALRFRKAHKDITVYGYDFEFIDLDNKKLFSFTKKYDNKTLFAALNFSSDSIDFTIPNNSSSFKLEFGNYPRSEVDASSRTLKPWEGRIYISE

SEQ ID NO: 1693 - DNA, 1662 bp, Bacillus halodurans C-125
  CDS (1)..(1662): transl_table=11
ttgaacagacaatggtggaaggaagcggttgcttaccaaatttacccgagaagtttttgtgactctaacggggacggaattggtgatcttcaaggagttattgaaaaattagattatgtaaaagacctagggatcgatgtgatttggatctgtccgatgtatcgatcaccaaatgatgataacggttacgatattagcgactatcaagatattatggatgagtttgggacaatggaagattttgatcaattattacatgaggttcatcgccgaggtatgaagctcattatcgaccttgtcattaaccatacatcggatgaacatccgtggtttattgaatcaagatcgtccaaggttaacccgaaaagggattggtatatatggcgtgacccgaaagaggacggttctgaaccaaataactgggagtctattttcaacggttccgcttgggagtatgatcaggctacaggccaatattacatgcatattttctcgagaaaacaacctgatttaaattgggaaaacagggacgtgcgtaaagcgttatatcaaatgattaattggtggctcgaaaaaggaatcgacggatttcgtgtggatgccatttctcatattaaaaaagtaaaagggttaccagatttaccgaatccaaaagggctcgattatgttccttcttttgaggggcatatgaaccgtgaaggtattcatgaatacttgcaagagttgaaacgggagacgttcgatcactttaatattatgaccgtaggcgaagcaaatggggtaactgtggaacaagcggacgattgggttggagaagatcatggtgcctttaatatgatctttcagtttgaacatttaggattgtgggataaaggagtaaatggcacggttgaccttgctgaactcaagagcatctttacgacatggcagaaaggacttgaaggaaaagggtggaatgcgttatttcttgaaaatcatgaccaaccaagaagcgtatccacatggggaaatgataagggatattggaaagaaagtgcaaaagcattggggacgcttttcttctttatgcagggtactccgtttatttaccaagggcaggagattgggatgacgaatgtccgttttccttcaatagaggactacgatgatgtagggatgaaaaacttttatcgaattgaaacagaaaaaggacgctctcatgaagaaattatggagatcatttggcaaaagggcagagataattcccgtacgccgatgcaatggaacgatcaaaagcatgcaggcttctcaacagcaacggaaacatggatgggggtcaacccaaattataaacaaatcaatgtagagaagcagctaaaagaagaggattctgttctatcttattataagaagatgattgaattaaggaagtcatcggacctttttgtctatggcagttacgatcttgtcttgcctgagcataaacagatttttgcctataagcgtacactagagaaagagagcgcgctcattctggtgaatatgtttgctgatgaggtatcgttccaattcccactcaagttaattggggagaaggaacgtgtgcttggtaactacaaaacacaaggggcgaaagataagctacgtccttatgaagcaagggtataccgctggcaatcttaa

SEQ ID NO: 1694 - protein, 553 aa, Bacillus halodurans C-125
MNRQWWKEAVAYQIYPRSFCDSNGDGIGDLQGVIEKLDYVKDLGIDVIWICPMYRSPNDDNGYDISDYQDIMDEFGTMEDFDQLLHEVHRRGMKLIIDLVINHTSDEHPWFIESRSSKVNPKRDWYIWRDPKEDGSEPNNWESIFNGSAWEYDQATGQYYMHIFSRKQPDLNWENRDVRKALYQMINWWLEKGIDGFRVDAISHIKKVKGLPDLPNPKGLDYVPSFEGHMNREGIHEYLQELKRETFDHFNIMTVGEANGVTVEQADDWVGEDHGAFNMIFQFEHLGLWDKGVNGTVDLAELKSIFTTWQKGLEGKGWNALFLENHDQPRSVSTWGNDKGYWKESAKALGTLFFFMQGTPFIYQGQEIGMTNVRFPSIEDYDDVGMKNFYRIETEKGRSHEEIMEIIWQKGRDNSRTPMQWNDQKHAGFSTATETWMGVNPNYKQINVEKQLKEEDSVLSYYKKMIELRKSSDLFVYGSYDLVLPEHKQIFAYKRTLEKESALILVNMFADEVSFQFPLKLIGEKERVLGNYKTQGAKDKLRPYEARVYRWQS

SEQ ID NO: 1695 - DNA, 1665 bp, Bacillus subtilis subsp. subtilis str. 168
  CDS (1)..(1665): transl_table=11
atgaaaaaggcttggtggaaggaagccgtagtttaccaaatttacccccgcagttttaaagattcaaatggcgacggaatcggggatattcaaggaatcagaaccaagctttcttacataaaagagctgggcgctgacgtcatatggatttgcccgctgtatgattcaccgaatgccgataatggctatgatatcagggattatcaaaacatattaagcgagtttggcacgatggaagattttgatgagctgcttggtgacattcatgatctggatatgaagctgattatggatctcgttgtgaaccacacaagcgacgaacatccatggttcatagaatcccgttcatccatacactcggaaaagcgcgactggtatatttggaaagacggcaaaaacggaaaaacgcccaacaattgggaaagcattttcggcgggccggcttgggagtatgatcaaaagacaagccagtattatctgcacctttttgataaaaaacagcctgatttgaattgggaaaatgaaaaggtgaggaatgccgtttatgacatgatcaattggtggcttgataaaggaattgacggatttcgggtggatgccattacgcatattaagaaaaaagaagggtttcctgacatgccgaatccaaagggactggactatgtcccttcctttccttatcatatgaatgctgacggcattatggatttgttaacagagctgaaggaaaacacattttcccgctatccgattatgacagttggtgaagcaaacggcgtcgctccaaaagaagcagctgattgggctggagaaaaaaacggcatattcagcatgatttttcaatttgagcatctcggcctgtgggatgtagagatcaatgaaagtattgatatcgttgcatttaaacgaattttaactgactggcaggacagtctggaagggatcggctggaatgctttgtttatggagaatcacgaccagccccgttcagtttctgtgtggggagacgacggagtgtacctgaaagaaagtgcaaaagcgctttccgctgtttattttctcatgaaaggcacaccgtttatttatcagggacaggaactcgggatgacgaacgtggcttttccatctattgaggactatgatgatgtcgcattgaaacgcctgtatgaaacaaaaacagcgaaaggcacatcacacgaggatgtgatgaagattgtctggaaaaagggaagagacaattcgcgaacgccgatgcaatggaatgctggtccatacgccggattttctgaggccaaaccgtggatcggaatcaatgagaattacaaatggctgaatgccgaggcgcaaaaaaacgataaaacatccgtttaccatttttacaaaagcttgatcaagctgcgccaaacatatgatgtttttattaacgggacatacgagctcattttaccggaagatcagcaaatctttgcatatcttcggaaaaacgagagccatactgcactgattgcggccaatctgacaggaacaccggcgttgttcaggcactctggattgccattgtcatcagatgcactcgtcttgtcaaatattgaaacagagccgcacaagcatatgacatcagtactcttaaagccgtatgaagcaagaatatatctatggtgctaa

SEQ ID NO: 1696 - protein, 554 aa, Bacillus subtilis subsp. subtilis str. 168
MKKAWWKEAVVYQIYPRSFKDSNGDGIGDIQGIRTKLSYIKELGADVIWICPLYDSPNADNGYDIRDYQNILSEFGTMEDFDELLGDIHDLDMKLIMDLVVNHTSDEHPWFIESRSSIHSEKRDWYIWKDGKNGKTPNNWESIFGGPAWEYDQKTSQYYLHLFDKKQPDLNWENEKVRNAVYDMINWWLDKGIDGFRVDAITHIKKKEGFPDMPNPKGLDYVPSFPYHMNADGIMDLLTELKENTFSRYPIMTVGEANGVAPKEAADWAGEKNGIFSMIFQFEHLGLWDVEINESIDIVAFKRILTDWQDSLEGIGWNALFMENHDQPRSVSVWGDDGVYLKESAKALSAVYFLMKGTPFIYQGQELGMTNVAFPSIEDYDDVALKRLYETKTAKGTSHEDVMKIVWKKGRDNSRTPMQWNAGPYAGFSEAKPWIGINENYKWLNAEAQKNDKTSVYHFYKSLIKLRQTYDVFINGTYELILPEDQQIFAYLRKNESHTALIAANLTGTPALFRHSGLPLSSDALVLSNIETEPHKHMTSVLLKPYEARIYLWC

SEQ ID NO: 1697 - DNA, 1662 bp, Listeria monocytogenes EGD-e
  CDS (1)..(1662): transl_table=11
atgaaagaaaaagattggtggaaaaaaagcgtagtgtaccaaatctatccaaagagttttaatgattcgaatggtgatggagttggtgatattcaaggaattatcgagaaattagattatttaaaagagcttggtgtagacgttatctggttgtccccggtgtacgattcgccgcaagatgacaatggttacgatattcgcgattatcaaaaaatttacgaagaatatggtgacatggcgacttttgatcaattgcttcaaggtttacacgaccgcgatatgaaactcgtgatggacttagttgttaaccatacttctgatgaacataagtggtttgaagaatctcggaaatccaaagataacccatatcgcgattactatttctggcgcgaggaaaacgaaatcaacaactggggttccattttcagcggtccagcatgggaattagacgaaaaaacaggcgagtactatttacacctgttctccaaaaaacaacctgatttaaactgggaaaaccctaaattacgccaagatgtatataatatgatgaaattctggctagataaaggcattgatggtttccgcatggacgtaattaattttatttccaaaaacaccgatttcccagatggtccagtgccagatggtcaaatttacggcgatgctggcaatgatttctgcaatggaccgcggattcatgagttcttgcaagaaatgaaccaagaagttacttccaaatacgatgtgatgactgttggtgaaatgcctggtgctagtacaactgacgcgcagatttatacgaatccagcaaataacgaagtcgatatgatttttacatttgaacatatgaacttagattccgatagcgacaataaatgggatttgaaaccaatttacttaccagatttaaaagaaaacatgtccgaatggcaagtggcgcttcaagaaaatggctggaacagcttatactggaacaatcatgaccaaccacgaatcgtttctcgcttcggaaatgacaatcgtttccgcgttcgttcagcgaaaatgctcgcaacttgtctgcatatgatgaaaggaacgccgtacatttatcaaggtgaagaaatcgggatgacgaatgttcattttgaaacgctagatgattatcgtgatatcgaaacgctaaacatgtacaaagaacgcaaagagcaaggccacagtcacgaaagtatcatgcagtcgatttacacaaaaggtcgcgacaatgcgagaaccccttatcagtgggataatagcgagaatgctggcttcacaaccggaacgccttggcttaaagtcaacccgcgctatacagaaatcaacaacgaagaagcgctgaaaaacccagattccattttctactactaccaaaatcttattaagttacgaaaaacgactgaaatcatcacaacaggtaattatcgcctgttattacctaaagatgaagcgattttcgcatatgaacgctacacagaaaatgaaaaattagttgttttatgtaatttcacagaagaagaacaagttatttctgatgaaaccattttgaacgaaatccaaaaaggttccgttcttgtaaacaatgttcctaatattatagaaggaactttacgaccttacgaagcaatcgtttatcaaatcaagtaa

SEQ ID NO: 1698 - protein, 553 aa, Listeria monocytogenes EGD-e
MKEKDWWKKSVVYQIYPKSFNDSNGDGVGDIQGIIEKLDYLKELGVDVIWLSPVYDSPQDDNGYDIRDYQKIYEEYGDMATFDQLLQGLHDRDMKLVMDLVVNHTSDEHKWFEESRKSKDNPYRDYYFWREENEINNWGSIFSGPAWELDEKTGEYYLHLFSKKQPDLNWENPKLRQDVYNMMKFWLDKGIDGFRMDVINFISKNTDFPDGPVPDGQIYGDAGNDFCNGPRIHEFLQEMNQEVTSKYDVMTVGEMPGASTTDAQIYTNPANNEVDMIFTFEHMNLDSDSDNKWDLKPIYLPDLKENMSEWQVALQENGWNSLYWNNHDQPRIVSRFGNDNRFRVRSAKMLATCLHMMKGTPYIYQGEEIGMTNVHFETLDDYRDIETLNMYKERKEQGHSHESIMQSIYTKGRDNARTPYQWDNSENAGFTTGTPWLKVNPRYTEINNEEALKNPDSIFYYYQNLIKLRKTTEIITTGNYRLLLPKDEAIFAYERYTENEKLVVLCNFTEEEQVISDETILNEIQKGSVLVNNVPNIIEGTLRPYEAIVYQIK

SEQ ID NO: 1699 - DNA, 1662 bp, Listeria innocua Clip11262
  CDS (1)..(1662): transl_table=11
atgaaagaaaaagactggtggaaaaaaagcgtagtttaccaaatctatccaaagagtttcaatgactcaaatggcgatggagtcggtgatattcaagggattattgagaaattagattatttaaaagagcttggcgtagacgttatctggctatctccggtgtatgattcgccgcaagatgacaatggatacgatattcgcgattaccaaaaaatttacgaagaatatggcgatatggcaacgtttgacaatctgttacaaggtttacatgatcgtgatatgaaactcgtaatggatttagttgttaaccacacttccgacgaacataaatggtttgaagaatctcggaaatccaaagacaacccttatcgtgattactatttctggcgtgaagaaaatgaaatcaacaactggggctcgattttcagtggtccagcatgggaattggacgagaaaacaggcgagtactacttacaccttttctctaaaaaacaaccagatttaaactgggaaaatcctaaattacgccaagatgtatataatatgatgaaattctggcttgataaaggtatcgatgggttccgcatggacgtaattaacttcatttccaaaaacacagctttcccagatggaccagttgcagaaggtcaaatttacggagatgcaggtaacgatttttgcaatggaccacgtattcatgagttcttgcaagagatgaaccaagaagtaacttccaaatatgatgtaatgactgttggcgaaatgccaggtgctagcacaactgacgcgcaaatttatacaaatccagcaaataatgaagtggatatgatttttacatttgaacatatgaacctagactccgatggtgataacaaatgggatctaaaaccaatttatttaccagatttaaaagaaaatatgtccgagtggcaagtagcgcttcaagaaaacggctggaacagtttatattggaacaatcatgaccaaccacgtattgtttctcgttttgggaatgataatcgtttccgcgttcgttcggcgaaaatgcttgcaacatgtctgcacatgatgaaaggaacaccgtacatttatcaaggtgaagaaatcgggatgactaatgttcattttgaaacgctggaagaatatcgagatatagaaacattaaacatgtataaagaacgtaaagagcaaggacacagccacgaaagcattatgcagtctatttacactaaaggacgcgacaacgcaagaacaccataccagtgggataatagcgaaaatgctggcttcacaaccggaacgccgtggcttaaagttaacccgcgttatacagaaatcaacaacgaagaagcgctgaaaaatccagattcgattttctactactaccaaaacctaattaagttacgcaaaacaacagaaatcatcacaactggtaattatcgcctgttgttaccaaaagatgaagcgattttcgcatatgaacgttatacagaaaatgaaaaattagtcgttttatgtaatttcacagaagaagagcaagttcttaccgatgaaaatattttaaacgacatcaaaaaaggctccgtacttgcaaataatgttcctgatattatagaaggaactttacgaccatacgaagcgatagtttatcaaattaaataa

SEQ ID NO: 1700 - protein, 553 aa, Listeria innocua Clip11262
MKEKDWWKKSVVYQIYPKSFNDSNGDGVGDIQGIIEKLDYLKELGVDVIWLSPVYDSPQDDNGYDIRDYQKIYEEYGDMATFDNLLQGLHDRDMKLVMDLVVNHTSDEHKWFEESRKSKDNPYRDYYFWREENEINNWGSIFSGPAWELDEKTGEYYLHLFSKKQPDLNWENPKLRQDVYNMMKFWLDKGIDGFRMDVINFISKNTAFPDGPVAEGQIYGDAGNDFCNGPRIHEFLQEMNQEVTSKYDVMTVGEMPGASTTDAQIYTNPANNEVDMIFTFEHMNLDSDGDNKWDLKPIYLPDLKENMSEWQVALQENGWNSLYWNNHDQPRIVSRFGNDNRFRVRSAKMLATCLHMMKGTPYIYQGEEIGMTNVHFETLEEYRDIETLNMYKERKEQGHSHESIMQSIYTKGRDNARTPYQWDNSENAGFTTGTPWLKVNPRYTEINNEEALKNPDSIFYYYQNLIKLRKTTEIITTGNYRLLLPKDEAIFAYERYTENEKLVVLCNFTEEEQVLTDENILNDIKKGSVLANNVPDIIEGTLRPYEAIVYQIK

SEQ ID NO: 1701 - DNA, 1755 bp, Drosophila melanogaster
  CDS (1)..(1755)
atggttgtagtgaaaatagctttcattttgagtgtgggcctagtaggcatattggcccataagcaccagtcaaaggagctggatgcgaaatataattggtggcagcacgaggtcttctatcagatctatccgagatcctttcaggacagcaatggtgatggtattggtgatcttcaaggtattacttctaggctacagtacttcaaggatacgggcatcacgtccgtatggttgagtcccatttatgagtcaccaatggtagactttggatacgatatatctaactatacaaatatacagccggaatatggcacccttgaggactttgacgccttgatagccaaggccaatgaactgggcgtgaaagttattttggactttgttcccaatcacagctcaaataagcatccctggttcataaagtcagtagcccgagagccagggtacgaggatttctatgtgtgggaggatggtattctcctggagaacggaactcgtgtgccgcccaacaattggctgtcggtgttctccggatccgcttggatgtggaacgatgagaggcagcagtactatctcaggcagttcacttatggacaacccgatttgaactaccgaaatcccgccgtgattaaggccatggatgatgtgatgctcttctggctaaacaagggtattgccggcttccgcatcgatgccattatatatatttacgaggatgctcaactgagggatgagcctccgagtggcactaccgatgatccaaataatgaggcctacttgagccacatctataccagaaatcagcctgaggattacggtctacttcagcattggcggcaacttctggataattatacagctaaccacgatgggccattgaggataatgatgaccgagggttatgcttcggtgtcgcaactaatggaatactatgaagattcgaatggtgtacagggcccccagtttcccttcaactttgacttcatcaccgaactgaatgccaattcgacagctgcggactttgtcttctatatctccaggtggctcatctatatgccacatggtcatgtggccaactgggtgatgggaaatcacgacaatcctcgagtggcatcacgattcggtgagaaatctgtggacgccatgaatatgctgctgatgacattgccaggaattggtattacttataatggcgaggagttgggcatgactgactacagggacatcagctggagcgatacggtggatcagcccgcttgtgaggctggaatcgacaactacaagacgatttctagagatcctgagcgaactcccatgcaatggagtagtgatgtgaatgcaggattctcctccgccgatcgcacttggttgcctgtcaatccgaattataaggaacttaatcttcggaatcagcagcaggcgaggcgaagtcattacaagatctatcagtcccttctgaagctcagacaactgccagttctgaagaacggatcctttgttccagaagtggttaatcgcagggtcttcgctttcaagcgagaactgaagaacgagcacactctgctgaccattgtgaacgtgagcaaccgcactgaactggttgacatcgcggactttatagaacagcccaatcgattgagtgtccttgtggcgggagtggactcgcaacaccgggtgggggatcgacttaaggccgagacaattgaattggcgcccaacgagggattagttattcagctgaataagcgaaagtaa

SEQ ID NO: 1702 - protein, 584 aa, Drosophila melanogaster
MVVVKIAFILSVGLVGILAHKHQSKELDAKYNWWQHEVFYQIYPRSFQDSNGDGIGDLQGITSRLQYFKDTGITSVWLSPIYESPMVDFGYDISNYTNIQPEYGTLEDFDALIAKANELGVKVILDFVPNHSSNKHPWFIKSVAREPGYEDFYVWEDGILLENGTRVPPNNWLSVFSGSAWMWNDERQQYYLRQFTYGQPDLNYRNPAVIKAMDDVMLFWLNKGIAGFRIDAIIYIYEDAQLRDEPPSGTTDDPNNEAYLSHIYTRNQPEDYGLLQHWRQLLDNYTANHDGPLRIMMTEGYASVSQLMEYYEDSNGVQGPQFPFNFDFITELNANSTAADFVFYISRWLIYMPHGHVANWVMGNHDNPRVASRFGEKSVDAMNMLLMTLPGIGITYNGEELGMTDYRDISWSDTVDQPACEAGIDNYKTISRDPERTPMQWSSDVNAGFSSADRTWLPVNPNYKELNLRNQQQARRSHYKIYQSLLKLRQLPVLKNGSFVPEVVNRRVFAFKRELKNEHTLLTIVNVSNRTELVDIADFIEQPNRLSVLVAGVDSQHRVGDRLKAETIELAPNEGLVIQLNKRK

SEQ ID NO: 1703 - DNA, 1659 bp, Oceanobacillus iheyensis HTE831
  CDS (1)..(1659): transl_table=11
atgaataaaatatggtggaaagaagcagttacctatcaaatatatccaaggagctttatggattcaaacggtgacggtattggtgatatacaaggaattatttcaaagttagattatattaagggccttggtattgatgttatttgggttagtcctatttatgaatcacctaatgatgataatggatatgatatcagtgattatcaagacattatggatgagtttggcaccatggaggattttgatgaactattagaacaagttcatcatcgtggcatgcgtctgataatggatttagtgattaaccatacatctgatgagcatccttggtttatagaatctcgatcatctaaagataatccatatcgtgattattatatttggcgttcaagtgaaaacaatctggaaccgaataattgggcttctatatttggaggttctgcttggaaatatgataaaaagacagatgaatattttatgcatattttctccaaaaaacagcctgaccttaattgggaaaacccaaaggtgagagaagagttatacgatatggtaaattggtggttagacaaaggaatcgatggcttccgagtagacgctatttctcatattaaaaagacagctgactttccaaatcttcctaatccagaaaataaaaagtatgttccttcctttgaaggccatatgaatcgtgatggaatacagatattcttgcaagaatttaaagaaaagacattagataactatgatattatgactgttggggaagcaaatggggtatctatttcacaggcggatgaatgggttggcgaggataatggtgtattcaatatgatatttcaatttgaacatttggacttatggggaaaaaatacggataatggattagacttgaaagctttaaaagaaacgttaaccaaatggcaaaaaggtctagaatctgtcggttggaatgcattatttttagaaaatcatgatcaaccaagatcaatttctagttggggtgacccaaagacatatcatatagaatctgcgaaagcattggctactctttattttcttatgcaaggtacaccgtttatttaccagggacaagaaattggtatgacaaatgtccactatccttccatcgaagattatgatgatatagatgctaaaaatctttatgaagaaatgatgcaagagggagcgtcttccaaagaagtacttgagattatatggaagacggggagagataattctcgtactccaatgcagtggaataattccaaaaatgctgggtttaccagtgggaatccctggttaaaagtgaatgataattatactagtataaatgttgaacagcaattgaatgatttagattcaatatatcattattatcgtaaattgattgaactacgaaaacaacatgaaacgctaatttatggtggttatgatttaattttagagaatcattcgcaaatttacgcttatacgagaacattggatgagaaacaattcgttgtttttattaacttatttcctgaaaaatgtagttttgaactaccatcttctttagctaagatggaaaggtcattactattaagtaattatgaagcagcagttaatggagaattacagccatatgaagcaagagtctatcaaataactaaaaaatga

SEQ ID NO: 1704 - protein, 552 aa, Oceanobacillus iheyensis HTE831
MNKIWWKEAVTYQIYPRSFMDSNGDGIGDIQGIISKLDYIKGLGIDVIWVSPIYESPNDDNGYDISDYQDIMDEFGTMEDFDELLEQVHHRGMRLIMDLVINHTSDEHPWFIESRSSKDNPYRDYYIWRSSENNLEPNNWASIFGGSAWKYDKKTDEYFMHIFSKKQPDLNWENPKVREELYDMVNWWLDKGIDGFRVDAISHIKKTADFPNLPNPENKKYVPSFEGHMNRDGIQIFLQEFKEKTLDNYDIMTVGEANGVSISQADEWVGEDNGVFNMIFQFEHLDLWGKNTDNGLDLKALKETLTKWQKGLESVGWNALFLENHDQPRSISSWGDPKTYHIESAKALATLYFLMQGTPFIYQGQEIGMTNVHYPSIEDYDDIDAKNLYEEMMQEGASSKEVLEIIWKTGRDNSRTPMQWNNSKNAGFTSGNPWLKVNDNYTSINVEQQLNDLDSIYHYYRKLIELRKQHETLIYGGYDLILENHSQIYAYTRTLDEKQFVVFINLFPEKCSFELPSSLAKMERSLLLSNYEAAVNGELQPYEARVYQITKK

SEQ ID NO: 1705 - DNA, 1821 bp, Bifidobacterium longum NCC2705
  CDS (1)..(1821): transl_table=11
atgaccacttcacaacgcacagtaattccagattccatccgcaccaacggtgccaccccaaatccgtggtggtccaatgcggtcgtttaccagatttacccgcgttccttccaagacaccaacggcgacggcctcggcgatctcaagggcattacgtcacggctcgactatctggccgacctcggcgtggatgtgctgtggctatccccggtatacaagtctccgcaagacgataatggctacgatatttccgactatcaggacattgatcctctgttcggcacactcgacgacatggatgagctgctggccgaggcccacaagcgcgggctcaagatcgtgatggatcttgttgtcaatcacacttccgatgaacacgcctggtttgaagcgtccaaaaacaaggatgatgagcacgccgactggtattggtggcgtcccgcccgtcccggcaccactgccggcgagcccggtgccgagcccaaccagtggggctcctactttggcggttctgcatgggagtattgccctgagcgtggcgaatactacctgcatcagttctcgaagaagcagccggacctcaactgggaaaatccggctgtgcgccgcgcggtatacgacatgatgaactggtggcttgaccgcggcgttgacggcttccgcatggatgtgattacgctgatttccaagcgcacggacctgtctggcaagctgcccggcgagtacggttccgagctggacgatctgcccgtgggtgaggaaggctattccaacccgaatccgttctgcgcggacggccctcgccaagacgaattcctggccgaaatgcgccgtgaagtgttcgaaggccgtgagggcttcctcaccgtgggcgaggctcccggcgttaccgcacagcgcaacgaatacatcaccgaccccgccaacggcgagctggacatgctcttcctattcgagcacgttgattttgactgcgaaggcgtcaaatggaagccactgccacttgacctgccgaagctcaagagcattatggccggttatcaagcggccgtgaagaatgcaggctgggcaagcctgtttactggtaaccacgaccagcctcgcgtcgtttctcgttggggtgatgactcctcggaggaatctcgtgtgcgttcggccaaggcacttggcctgatgctgcacatgcatcgcggcaccccgtacatatatcagggcgaagagctaggcatgaccgacgcccacttcacgcgcctagaccagtaccgtgacctcgagtccctgaacgcttaccgtcaaagggttgaggaagccaaagtgcagtcgcccgaatcgatgttggcgggtatcgccgcgcgcggtcgtgataattcgcgtaccccgatgcaatgggacggctctgtctatgccggtttcactgcgccggatgccgctaaggagccatggatctccgtcaatcccaaccatgcggcgatcaacgcggtcggcgaattcgacgatccggattcggtatatgccttctacaagcagctcatcgcgctgcgccacgacatgcctgtcgtggcggccggcgactggcatctgctcgatgcggatgacgcgcatgtctacgccttcacccgcaccctcggcgatgagaagctgctggtcgtggtcaacatgtccggccgaaccgttgatctaccgcgcgaaaccgccgaactggccgccgccggaatcaccgagtcgaacgtggtaatcagcacgtatgatgccccgcacgccgtggcctccctcgccaaccgtgagctcgatccttgggaggccgccgtcattcagctgtag

SEQ ID NO: 1706 - protein, 606 aa, Bifidobacterium longum NCC2705
MTTSQRTVIPDSIRTNGATPNPWWSNAVVYQIYPRSFQDTNGDGLGDLKGITSRLDYLADLGVDVLWLSPVYKSPQDDNGYDISDYQDIDPLFGTLDDMDELLAEAHKRGLKIVMDLVVNHTSDEHAWFEASKNKDDEHADWYWWRPARPGTTAGEPGAEPNQWGSYFGGSAWEYCPERGEYYLHQFSKKQPDLNWENPAVRRAVYDMMNWWLDRGVDGFRMDVITLISKRTDLSGKLPGEYGSELDDLPVGEEGYSNPNPFCADGPRQDEFLAEMRREVFEGREGFLTVGEAPGVTAQRNEYITDPANGELDMLFLFEHVDFDCEGVKWKPLPLDLPKLKSIMAGYQAAVKNAGWASLFTGNHDQPRVVSRWGDDSSEESRVRSAKALGLMLHMHRGTPYIYQGEELGMTDAHFTRLDQYRDLESLNAYRQRVEEAKVQSPESMLAGIAARGRDNSRTPMQWDGSVYAGFTAPDAAKEPWISVNPNHAAINAVGEFDDPDSVYAFYKQLIALRHDMPVVAAGDWHLLDADDAHVYAFTRTLGDEKLLVVVNMSGRTVDLPRETAELAAAGITESNVVISTYDAPHAVASLANRELDPWEAAVIQL

SEQ ID NO: 1707 - DNA, 1677 bp, Lactobacillus plantarum WCFS1
  CDS (1)..(1677): transl_table=11
atggcagcaacaatcaagtggtggcaacaagccgttgtctatcaggtctatccacggagttttcaagataccaatcatgatggtattggtgacttaaaggggatcacggcccacctagactacttaaagcaattaggaatcgacgtcatttggctcaatcccatttatcgttcacccaacgatgataatggttatgatattagtgattatcaacaaattgcggccgactttggcactatggctgattttgatgaattattgcaagccgcccatgaccggggcttaaagatcatcatggacttggttgttaaccatacctctgatgagcatccatggttcaaacgcagtcgccaggaccgcaccaatcaatatcgtgatttctacttttggcgctcaggtaacggcaaaaaggcgcccaataattgggatgcggcttttggtggttcagcatggcaatatgatgagcagacccagcagtattatttacacacgttttcaacaaaacaacctgatttaaactgggagaatccgaccttacgagagtcagtttatacgatgatgacctggtggctgaacaagggtgttgacggttttcgaatggacgtcattaaccaaatctctaagttacccgggttaccagatggtccactgaaaccgcacagtcagtttggcgatgctcgagtaacgaacggaccgcgagttcatgaattcttgcaagaaatgaaccaagaagtgttgtcacagtttgatatcatgacggttggtgagacccacggggtgacaccagcggatgcgctgaagtatgcgggcgctgatcggcacgaattagatatggtctttgaatttcaacatctgcgacttgataatagtcagcatggtcttggtaagtggagtacgcgtaagacaccgttagtggcgctaaagaaagtcattagtgactggcaagtcggacttgaagggcgggcttggaacagcctgttttggaacaatcatgatacgccacgagcggtctcacgttttggtgatgaccgaccagcatatcgggtacgttcggctaaaatgctcgcaacgtgtttacacatcttgcagggaaccccgtatatttatcaaggtgaagaactggggatgactgacgctcattttactgaattaaccagttaccgggatattgaatcgctcaatgcctatcgtgatttagtgactgagcgccaactactatcaccggcagatatgatggcccgattagcggcgcgttctcgggacaactcgcgaacgccgatgcaatgggacacggaggttaacgcgggttttagtgacgcggcgccatggctcacggtcaatcccaactatcgtcaaatcaatgctgccgcagctttggctgatccggattcagtgtggtactattaccagcacttgattcaattacgacatcaataccccttagtgacgttaggttcgtttgagctcttgtgggctgatgatccgcaggtattcttatatgcacggcaatgggaagggcgaacctggctagtttgttgcaatttcacagccgagacactgtcccgaccactggatcaatatctgacgcccacggccaaatgcttgattagtaattatggcgagcagcagccaaataaattacggccttatgaggcttgggtctaccaactcgcatag

SEQ ID NO: 1708 - protein, 558 aa, Lactobacillus plantarum WCFS1
MAATIKWWQQAVVYQVYPRSFQDTNHDGIGDLKGITAHLDYLKQLGIDVIWLNPIYRSPNDDNGYDISDYQQIAADFGTMADFDELLQAAHDRGLKIIMDLVVNHTSDEHPWFKRSRQDRTNQYRDFYFWRSGNGKKAPNNWDAAFGGSAWQYDEQTQQYYLHTFSTKQPDLNWENPTLRESVYTMMTWWLNKGVDGFRMDVINQISKLPGLPDGPLKPHSQFGDARVTNGPRVHEFLQEMNQEVLSQFDIMTVGETHGVTPADALKYAGADRHELDMVFEFQHLRLDNSQHGLGKWSTRKTPLVALKKVISDWQVGLEGRAWNSLFWNNHDTPRAVSRFGDDRPAYRVRSAKMLATCLHILQGTPYIYQGEELGMTDAHFTELTSYRDIESLNAYRDLVTERQLLSPADMMARLAARSRDNSRTPMQWDTEVNAGFSDAAPWLTVNPNYRQINAAAALADPDSVWYYYQHLIQLRHQYPLVTLGSFELLWADDPQVFLYARQWEGRTWLVCCNFTAETLSRPLDQYLTPTAKCLISNYGEQQPNKLRPYEAWVYQLA

SEQ ID NO: 1709 - DNA, 1677 bp, Lactobacillus plantarum WCFS1
  CDS (1)..(1677): transl_table=11
ttggaaaaatggtggaagaatgcagtagtttatcaggtttatccgtctagctatcaagacagcaataacgatggtattggtgatttaccagggattacaaaaagattggattatattaaaaagttaggcgtagatattgtttggctaagcccgatctataaatcaccgcaagttgataatggctatgatatttcagactatcgtgcgatcaatccagactttggtagcatggaagattttgataagttattagggaaagcccatgatttgggactgaaaattatgatggatcttgttgttaatcatacttctgatgaaaataaatggtttgaggagtcacgtaaaagtaagactaatccataccgtgactattacatttggcgtgacggtaacgctggtaagtcacctaataactggggatcattctttagaggccctgcttggaaatatgacgaacaaacaggtcaatactacttgcacctgtttgcaccacaacagccggacttaaattgggaaaatccaaatgtacgtcattctgtttatgacatgatgaattggtgggctagtaaaggtgttgatgggtttaggatggatgtcattaactatatctctaagcctgagggattgcctgatgcacaactacaagcagatgaagaactaggaaatcctgaaccattagttgctaatgggcaccgtgttcatgaattcttacaagaaatgaataataaggttatgagcaagcacaggatggtgacagtcggtgaagccccttctgtaacaaccgacgaagccattaagtatgccggcctagatggaaaagaattggatatggtattccagtttgaacatatggggttagatggtaatgagaacccagtgctggggcattggtctgatcgtaaggcatcgctgaaagacctcaggagcaatcttactaagtggcaagaggcgcttgaaggtaaggcttggaattcactttattggaataaccatgatcagccaagagtcgtttcaagatttggtgatgatagtaacgaggaataccgagttttaagtgcgaaaatgctagcgactatgctccatttacaacagggaacaccctttatatttgagggcgaggagattggcatgacgaatagctatttcaagaaactgagtgattatgttgatttggactcaatcaatacttatcaccaatttgttgataaacagcatttggttggtagccagacaatgctcaaatatttagcgatgcacagtagggacaatgcacgtacgccaatgcagtggaattcaactgataatggcggtttttctaaacatgaaccgtgggaacacgtaaatcctaattacaagcatattaatgtcaagcaatcgttggacgaccccaattctatcttctattactatcaaaaattaattagacttcggcatgagctaccggttattactgatggcaagtatcggttggttaaggggaatgaagacgacgaagcggtttatgcttatacacgtaaggatgaaaatacgacattactggttattctaaattatacaaagaccactctagaccgggattatcaagtcccggacaatgcggaattagtgattaacaattaccctgatgacaaaggaaacacgcttcgcccatatgaagcaaaggtttataaatattaa

SEQ ID NO: 1710 - protein, 558 aa, Lactobacillus plantarum WCFS1
MEKWWKNAVVYQVYPSSYQDSNNDGIGDLPGITKRLDYIKKLGVDIVWLSPIYKSPQVDNGYDISDYRAINPDFGSMEDFDKLLGKAHDLGLKIMMDLVVNHTSDENKWFEESRKSKTNPYRDYYIWRDGNAGKSPNNWGSFFRGPAWKYDEQTGQYYLHLFAPQQPDLNWENPNVRHSVYDMMNWWASKGVDGFRMDVINYISKPEGLPDAQLQADEELGNPEPLVANGHRVHEFLQEMNNKVMSKHRMVTVGEAPSVTTDEAIKYAGLDGKELDMVFQFEHMGLDGNENPVLGHWSDRKASLKDLRSNLTKWQEALEGKAWNSLYWNNHDQPRVVSRFGDDSNEEYRVLSAKMLATMLHLQQGTPFIFEGEEIGMTNSYFKKLSDYVDLDSINTYHQFVDKQHLVGSQTMLKYLAMHSRDNARTPMQWNSTDNGGFSKHEPWEHVNPNYKHINVKQSLDDPNSIFYYYQKLIRLRHELPVITDGKYRLVKGNEDDEAVYAYTRKDENTTLLVILNYTKTTLDRDYQVPDNAELVINNYPDDKGNTLRPYEAKVYKY

SEQ ID NO: 1711 - DNA, 1671 bp, Bacillus cereus ATCC 14579
  CDS (1)..(1671): transl_table=11
atgactatgaataagacatggtggaaagaagcggttgcttatcaaatttatccacgaagctttatggattcaaatggtgatggtattggagatttacaaggtattattgcaaaactggattatttaaaagatttaggtatagatgtaatttggatttgtccaatgtataagtcgcctaatgatgataatggttatgatattagtgattatcaagatattatggatgagtttggtacaatggcagactttgatgctttactagatgaagttcataagcgtgatatgaagcttattattgatttagttattaatcatacgagtgatgaacatccatggtttattgaatcacgttcatctaaagataatccgaagcgtgattggtatatttggcatgatggtaaagatggtgcggagccaaacaactgggaaagtatttttaatggttcggcatgggaatatgatgaagaaacagaacaatattatttacatttattctcacgtaaacaaccagatttaaactgggagaataaagaagttcgcgaagtactatacgatacggttaattggtggcttgataaaggtattgatggtttccgcgttgatgcgatcagtcatattaaaaaagaagaaggcctcaaggatatgccaaatccaaaagggttaaaatatgtgccatcttttgataaacatatgaatgtgaaaggtattcaacctttattagaagagctaaaagaaaatacattctctaagtacgatattatgactgttggtgaagcaaatggtgttaagattgaagatgctgagctttgggttggagaagagcaaggtaagttcaatatggtattccaatttgaacatttaagtttatgggatgcagagaagaagaaagaccttgatgttgtaggattgaaaaaagtattaacgaaatggcaaaaaggattagaaaataaaggatggaacgctttatatattgagaatcacgataaaccacgtatcgtttcaacatggggagatgataaacaatattggcgtgaaagtgcaacagctctaggggcgatgtatttctttatgcacggtacaccttttatttatcaaggccaagaaattggtatgacaaatgttcagttaccaaatattgaagattacgatgatgtagcaattaaaaatttatatcgcgagaaaattgcagagggcgtaccacatcaagatatgatggagattatatgggcttcttgccgcgataattcacgtacacctatgcagtggaatgatgagatgaatgctggtttcacaacaagtacaccttggtttagcatgaatccaaattacaaagaaattaatgttgagaagcaaaaaaatgaagaaaagtctattttcaatttctataagaaaatgattgccctgaaaaaagagcacgatgtactgaactatggcacgtacgatttacttttagaagacgatccacaaatttatgcatatacacgtacgttacaggatgaaaaagtcattgtaattagtaatatctcaaaagaggaagctgtgtataatgagggttcatttgcactagaacgcaaacgtttgcttttaaataactatgaagttgcggaacatgaagaagtaacaacaattgctttaaagccttatgaaacaagggtttatcgcatttcataa

SEQ ID NO: 1712 - protein, 556 aa, Bacillus cereus ATCC 14579
MTMNKTWWKEAVAYQIYPRSFMDSNGDGIGDLQGIIAKLDYLKDLGIDVIWICPMYKSPNDDNGYDISDYQDIMDEFGTMADFDALLDEVHKRDMKLIIDLVINHTSDEHPWFIESRSSKDNPKRDWYIWHDGKDGAEPNNWESIFNGSAWEYDEETEQYYLHLFSRKQPDLNWENKEVREVLYDTVNWWLDKGIDGFRVDAISHIKKEEGLKDMPNPKGLKYVPSFDKHMNVKGIQPLLEELKENTFSKYDIMTVGEANGVKIEDAELWVGEEQGKFNMVFQFEHLSLWDAEKKKDLDVVGLKKVLTKWQKGLENKGWNALYIENHDKPRIVSTWGDDKQYWRESATALGAMYFFMHGTPFIYQGQEIGMTNVQLPNIEDYDDVAIKNLYREKIAEGVPHQDMMEIIWASCRDNSRTPMQWNDEMNAGFTTSTPWFSMNPNYKEINVEKQKNEEKSIFNFYKKMIALKKEHDVLNYGTYDLLLEDDPQIYAYTRTLQDEKVIVISNISKEEAVYNEGSFALERKRLLLNNYEVAEHEEVTTIALKPYETRVYRIS

SEQ ID NO: 1713 - DNA, 1677 bp, Bacillus cereus ATCC 14579
  CDS (1)..(1677): transl_table=11
atggaaaaacaatggtggaaagaaagtgtagtatatcaaatttatcctcgtagctttatggatagtaatggtgatggtataggagaccttcaagggattatttcaaagctagattacttaaaagagttagggattgatgtgatttggttatcaccagtctatgaatctccaaatgatgataatggttatgatataagcgattattgtaaaattatgaacgagttcggaacaatggaagattgggatgagctattacatgaaatgcatgaacgtaatatgaaattgatgatggatttagttgttaatcatacatctgatgaacataattggtttattgaatcacgtaaatcaaaagataataaatatagagattactatatatggcgccctggaaaagaaggaaaagaaccgaacaactggggagctgcttttagtggatctgcatggcagtatgatgaaatgacagatgaatattatttacatctgttttctaaaaaacagccagatttaaattgggataatgaaaaggtaagacaagatgtttatgaaatgatgaagttttggttagaaaaaggaattgatggtttccgtatggatgttattaattttatttctaaagaagagggattaccagctgttgaaacagaagcagaggggtatgtttcaggtcataagcattttatgaacggtccaaacattcataaatatttacatgaaatgaatgaggaagtattatcgcattatgatattatgacggttggtgaaatgcctggtgtaacgacagaagaagcgaaattgtatactggagaagaacgaaaagaattgcaaatggtattccaatttgaacatatggatttagattcaggagaaggtggaaagtgggatgtaaaaccatgctcacttcttactttaaaagagaatttaacaaagtggcaaaaagcattagagcataccggatggaatagcctttattggaataatcatgatcagcctcgcgttgtatctcgttttggtaatgatggaatgtatcgcattgaatcagcaaaaatgttagcgacagttcttcatatgatgaaaggaacgccatatatttatcaaggagaggaaatcggaatgacgaacgtccgatttgagtcaattgatgaatatcgagatattgaaacgttaaatatgtataaagaaaaagtgatagaccatggtgaagatatagaaaaagtaatggaatctatttatataaagggtcgtgataatgctagaactccgatgcagtggaatgatcagaatcacgctggatttacaaaaggtgaaccttggattactgtaaatcctaactataaagagattaatgtgaaacaagcaatccaagatgaaggttcaattttttattactataagaaattaattgaactacgcaaaaataatgaaatagttgtgtatggatcatatgatttaatattaaataatgacccttctatttttgcttatgtaagaacatatggagatgaaaaactacttgtcattgcaaactttactgcggatgaaagtgtatttgaaatgcctaaggatattagttatagtgaatcagagttatttatacataattacgatgtagaaatcggatcaatagataacattccattacgtccgtatgaagcgatagtgttcaaattgaaataa

SEQ ID NO: 1714 - protein, 558 aa, Bacillus cereus ATCC 14579
MEKQWWKESVVYQIYPRSFMDSNGDGIGDLQGIISKLDYLKELGIDVIWLSPVYESPNDDNGYDISDYCKIMNEFGTMEDWDELLHEMHERNMKLMMDLVVNHTSDEHNWFIESRKSKDNKYRDYYIWRPGKEGKEPNNWGAAFSGSAWQYDEMTDEYYLHLFSKKQPDLNWDNEKVRQDVYEMMKFWLEKGIDGFRMDVINFISKEEGLPAVETEAEGYVSGHKHFMNGPNIHKYLHEMNEEVLSHYDIMTVGEMPGVTTEEAKLYTGEERKELQMVFQFEHMDLDSGEGGKWDVKPCSLLTLKENLTKWQKALEHTGWNSLYWNNHDQPRVVSRFGNDGMYRIESAKMLATVLHMMKGTPYIYQGEEIGMTNVRFESIDEYRDIETLNMYKEKVIDHGEDIEKVMESIYIKGRDNARTPMQWNDQNHAGFTKGEPWITVNPNYKEINVKQAIQDEGSIFYYYKKLIELRKNNEIVVYGSYDLILNNDPSIFAYVRTYGDEKLLVIANFTADESVFEMPKDISYSESELFIHNYDVEIGSIDNIPLRPYEAIVFKLK

SEQ ID NO: 1715 - DNA, 1674 bp, Bdellovibrio bacteriovorus HD100
  CDS (1)..(1674): transl_table=11
gtgtccgaagttcagaagaattggtggaaagaagcagtcgtttatcaggtctatcctcgcagctttaaggattccaacggcgatggtatgggggacctgcaaggtctgatttccaagctggattacctgaaagaactgggtatcaatgtcatctggatctgtccgatgtacaaatccccgcaggatgacaacggctatgacatcagcgattaccaggatattcaccacgagtttggcacgatgaaggactttgaccagcttttgcagcaggttcatgctcgcggcatgaagctgatcatcgatctggtcgtgaatcacaccagcgacgaacatccttggtttatcgagtcccgcagctccagaaacaatcccaagcgcgactggtacatctggcgggatggtaaaaacggtaaagagcccaacaactgggaaagtattttcagcggatcggcgtggaagtatgacgaactgacccagcagtacttcatgcatattttttcaagcaaacagcccgacttgaactgggaaaatctggacatgcgcaaggccgtctatgacatgatcaactggtggctggataagggcattgatggattccgtgtggatgccatcagccatgcccgcaaagaaccaggcctggctgacatgcccaacccgaacaatctagagtatgtgccgtcctatgataaacacatgaacgtgaatggcattcaggaatatctgaaagatctttgcaccaacaccttcaacaaatatgacatcatgaccgtggctgaagccaacggcgtgtcggcggaaaatgcagaagagtgggtgggcagagagcagaagaaattcaacatgatcattcagttcgaacacgtgggtctgtgggatgcgaatcctgagcgccgggtggatctggcgaagctaaaatctgtcctgggtcgctggcaaaaaggtcttgagggccgtggttggaacgcactgttcgtggaaaaccacgacgtgcctcgcatcacctccaaatggggtgatattcagaatttctggcgcgaaagcaccacctctattgcgaccatgtactttatgatgcaggggacaccgtttatttatcagggccaggaaattggcatgaccaatacggtgtttaatggtcctgaggactttaacgatgtttctgcgaaaaacatcttcacgatccgccgcaagcaaggggccacagatgccgagatcacggctgaccttgccagtgcctctcgtgacaatgcccgaactcctatgcaatgggactcctctgaacagggtggtttcaccacgggtcgtccttggttgaaggtgaatccaaactacaagaacatcaacgtggcggcccaggacaaggatccaacttctgttctgaatttttatcgcaatctgattcgcttacgcaaagcccattcagtgtttatatatggtgtctatgacgaggttctaagtaagcacgatcagatctatgcttacacccgcaccgacggaaatgaaaaaatgctggtgatggccaacatgaccggcaagcctgcgaagtttgacctgccgggattcagtttgtcttctgcgaatcttttaatggccaactatgccgtggctgatcacagctcaatcacgggcggggagcttcgtccgtttgaaagccgcatttacaaaattaattaa

SEQ ID NO: 1716 - protein, 557 aa, Bdellovibrio bacteriovorus HD100
MSEVQKNWWKEAVVYQVYPRSFKDSNGDGMGDLQGLISKLDYLKELGINVIWICPMYKSPQDDNGYDISDYQDIHHEFGTMKDFDQLLQQVHARGMKLIIDLVVNHTSDEHPWFIESRSSRNNPKRDWYIWRDGKNGKEPNNWESIFSGSAWKYDELTQQYFMHIFSSKQPDLNWENLDMRKAVYDMINWWLDKGIDGFRVDAISHARKEPGLADMPNPNNLEYVPSYDKHMNVNGIQEYLKDLCTNTFNKYDIMTVAEANGVSAENAEEWVGREQKKFNMIIQFEHVGLWDANPERRVDLAKLKSVLGRWQKGLEGRGWNALFVENHDVPRITSKWGDIQNFWRESTTSIATMYFMMQGTPFIYQGQEIGMTNTVFNGPEDFNDVSAKNIFTIRRKQGATDAEITADLASASRDNARTPMQWDSSEQGGFTTGRPWLKVNPNYKNINVAAQDKDPTSVLNFYRNLIRLRKAHSVFIYGVYDEVLSKHDQIYAYTRTDGNEKMLVMANMTGKPAKFDLPGFSLSSANLLMANYAVADHSSITGGELRPFESRIYKIN

SEQ ID NO: 1717 - DNA, 1665 bp, Bacillus cereus ATCC 10987
  CDS (1)..(1665): transl_table=11
atgaataaaacatggtggaaagaagcggttgcttatcaaatttacccacgtagctttatggattcaaatggtgatggtattggggatttacaaggtattattgcaaaactggattatttaaaagatttaggtatagatgtaatttggatttgtccaatgtataagtcacctaatgatgataatggttatgacattagtgattatcaagatattatggatgagtttggtacgatggaggacttcgatgctttactagatgaagttcataagcgtgatatgaagcttattattgatttagttattaatcatacaagtgatgaacatccatggtttattgagtctcgttcatctaaagacaatccgaagcgtgattggtatatttggcatgatggtaaagatggtgcggaaccaaacaactgggaaagtatttttaatggttcggcatgggaatacgatgaagtaacaggacaatattatttacacttattctcacgtaaacaaccagatttaaactgggagaataaagaagttcgcgaagtgttatacgatacagttaattggtggcttgataaaggaattgatggtttccgtgtggatgcgatcagccatattaaaaaagaggatggctttaaagatatgccaaatccaaaagaactaaagtatgtaccatcttttgataaacatatgaatgtggatggtattcaacctttattagaagagttaaaagaaaatacattttctaagtacgatattatgactgtcggtgaagcgaatggtgttaagattgaagatgctgagctttgggttggagaagaacaaggtaagttcaatatggtattccaattcgaacatttaagcttatgggatgcagaaaagaagaaagatcttgatgttgtagggttgaaaaaagtattaacgaaatggcaaaaaggtctagaaaataaagggtggaatgctttatatattgagaatcacgataagccacgtatcgtttcaacttggggagatgataaacaatattggcgtgaaagtgcgacagctcttggagcgatgtatttctttatgcatggtacaccgtttatttatcaaggacaagaaattgggatgacaaatgttcaattcccaaatattgaagattacgatgatgtagcaattaaaaatttatatcgtgagaaaattgcagagggtgtatctcatcaagatatgatggagattatatgggcttcttgccgcgataattcacgtacacctatgcagtggaacgatgagatgaatgctggcttcacaacaggtgccccttggtttgggatgaatccaaactataaagaaattaatgttgaaaagcaaaagagtgaagagaactctattttcaatttctataagaaaatgattgctttgaaaaaagagcacgatgtactgaattatggtacgtacgatttacttttagaagatgatccgcaaatttatgcatatactcgtacattaagcgatgaaaaaatcgttgtaattagtaatatctcaaaagaggaagctgtatataatgagggttcattcgcgatagaacgcaaacgtttgcttttaaataactacgaagttgcggaacatgaacaagtaactacaatcacgttaaagccttatgaaacaagggtttatcgtatttcataa

SEQ ID NO: 1718 - protein, 554 aa, Bacillus cereus ATCC 10987
MNKTWWKEAVAYQIYPRSFMDSNGDGIGDLQGIIAKLDYLKDLGIDVIWICPMYKSPNDDNGYDISDYQDIMDEFGTMEDFDALLDEVHKRDMKLIIDLVINHTSDEHPWFIESRSSKDNPKRDWYIWHDGKDGAEPNNWESIFNGSAWEYDEVTGQYYLHLFSRKQPDLNWENKEVREVLYDTVNWWLDKGIDGFRVDAISHIKKEDGFKDMPNPKELKYVPSFDKHMNVDGIQPLLEELKENTFSKYDIMTVGEANGVKIEDAELWVGEEQGKFNMVFQFEHLSLWDAEKKKDLDVVGLKKVLTKWQKGLENKGWNALYIENHDKPRIVSTWGDDKQYWRESATALGAMYFFMHGTPFIYQGQEIGMTNVQFPNIEDYDDVAIKNLYREKIAEGVSHQDMMEIIWASCRDNSRTPMQWNDEMNAGFTTGAPWFGMNPNYKEINVEKQKSEENSIFNFYKKMIALKKEHDVLNYGTYDLLLEDDPQIYAYTRTLSDEKIVVISNISKEEAVYNEGSFAIERKRLLLNNYEVAEHEQVTTITLKPYETRVYRIS

SEQ ID NO: 1719 - DNA, 1677 bp, Bacillus cereus ATCC 10987
  CDS (1)..(1677): transl_table=11
atggaaaaacagtggtggaaagaaagtgtagtatatcaaatttatcctcgtagctttatggatagcaacggtgatggtatcggggatcttcgcggtattatttcaaagttagattacttaaaagaattagggattgatgtaatttggttatcaccagtctatgaatctccaaatgatgataatggttatgatataagtgattattgtaaaattatgaatgagttcggaacaatggaagattgggatgagctattacatgaaatgcatgaacgtaatatgaaacttatgatggacttagttgtgaatcatacttctgatgaacataattggtttattgaatcacgtaaatcaaaagataataaatatagagattactatatatggcgccctggaaaagaaggaaaagagccgaataactggggagcagcgtttagtggatcagcatggcagtatgatgaaatgacagatgaatattatttacatctgttttctaaaaaacagccagatttaaattgggataatgaaaaggtaaggcaagatgtttatgaaatgatgaagttttggttagaaaaaggaattgatggcttccgtatggatgttattaattttatttctaaagaagagggattaccagctgttgaaacagaagaagaggggtatgtttcaggtcataagcattttatgaacggtccaaacattcataaatatttacatgaaatgaatgaagaagtattgtctcattatgatattatgacggttggtgaaatgcctggtgtaacgacagaagaagcgaaattgtataccggggaagaacgaaaagaactgcagatggtattccaatttgaacatatggatttagactcaggagaaggcggaaaatgggatgtaaaaccatgttcactccttactttaaaagagaatttaacgaagtggcaaaaagcattagaacatacaggctggaatagcctgtattggaataaccatgatcagcctcgcgttgtatctcgttttggtaatgatggaatgtatcgcattgaatctgcgaaaatgttagcgacggtgcttcatatgatgaaaggaacaccgtatatttatcaaggagaagaaattggaatgacaaacgtccgatttgagtcgattgatgaatatcgagatattgaaacgttaaatatgtataaagaaaaagtgatagaccgtggtgaagatatagaaaaaataatggaatctatttatataaagggtcgtgataatgctagaactccgatgcagtgggatgacaaagatcacgctggatttacaacaggtgaaccttggattacagtaaaccctaactacaaagaaattaatgtgaaacaagcgatccaaaataaagattcaattttttattattataaaaaattaattgagttacgtaaaaataatgaaatagttgtgtatggatcatatgatttaatattggagaataatccatctatttttgcatatgtaagaacgtatggggaagaaaaacttcttgttattgcaaactttactgcagaagaatgtgtatttgaattgcctgaggacattacttatagtgaagcagagttatttatacacaattacgacgtagagaatggaccgatagaaaacataccattacgtccgtatgaagcaatggtgttcaaattgaaataa

SEQ ID NO: 1720 - protein, 558 aa, Bacillus cereus ATCC 10987
MEKQWWKESVVYQIYPRSFMDSNGDGIGDLRGIISKLDYLKELGIDVIWLSPVYESPNDDNGYDISDYCKIMNEFGTMEDWDELLHEMHERNMKLMMDLVVNHTSDEHNWFIESRKSKDNKYRDYYIWRPGKEGKEPNNWGAAFSGSAWQYDEMTDEYYLHLFSKKQPDLNWDNEKVRQDVYEMMKFWLEKGIDGFRMDVINFISKEEGLPAVETEEEGYVSGHKHFMNGPNIHKYLHEMNEEVLSHYDIMTVGEMPGVTTEEAKLYTGEERKELQMVFQFEHMDLDSGEGGKWDVKPCSLLTLKENLTKWQKALEHTGWNSLYWNNHDQPRVVSRFGNDGMYRIESAKMLATVLHMMKGTPYIYQGEEIGMTNVRFESIDEYRDIETLNMYKEKVIDRGEDIEKIMESIYIKGRDNARTPMQWDDKDHAGFTTGEPWITVNPNYKEINVKQAIQNKDSIFYYYKKLIELRKNNEIVVYGSYDLILENNPSIFAYVRTYGEEKLLVIANFTAEECVFELPEDITYSEAELFIHNYDVENGPIENIPLRPYEAMVFKLK

SEQ ID NO: 1721 - DNA, 1731 bp, Nasonia vitripennis
  CDS (1)..(1731)
atgtggaaagtactgttgttggggctggccttcttggcactgcaccaagtggaaggtgcaaacgacccagtgaagaagccggaatggtgggaaagtggcatcatctatcaagtttaccctcggagcttcaaggatagcaatggcgatggaatcggagatcttaacgggatcaccagcaaacttgaacacattcgagacagcggagccgtggctctttggctttctccgatctactcgagcccgcaagtggattttggatacgacatttccaacttcaccgaaatcgatccaaactacggaacactcgccgactttcgcaatctcgtcactagggcaaaattgctgggtttgaaggttctactagatctagtgccgaaccatagttctgatcaacacgagtggttcaagaagagcgccaagcgtatcaagccctacgacgaatactacatctggagggatggcaaagtattggctaacggcaccagagttccacctaacaactggatttccattttctctggaccagcctggacatggaacgaggagcgtaagcagtactactaccatcagttcgcctcagctcagccggatttgaactaccgcgatgccaatctcagacttgaaatggataacgtcattacattttggttggaccagggtgtcgacggctaccgaatcgacgccatcatccatatgtttgaagacgctgccttacgcgacgagccattgtctcatcgacctggtgtgccgcctactgactacgactatctggagcatccgtatacgaaagaccaaaacgaaacatacgacgtggttgctcgctggcgccagataatggacaagcactctcaagatcacaaaacagataagaagtacgccatagtcgaggcaggctcaccatatccgttgatgatgaggtactaccaggtcggtgtcgatccgttcaacttcatgttcattgcgactctgcgcaattcttcacggccatcggatttcgcaaacgctattaacgaatggatgtacaacatgcccaaggatcagagcgccaactgggtcgtcggaaaccacgacaacagcagggttgcctccaggtttggttaccaaagtaacagagcagatcagatgtccatgctggcagcggttctgcccggtatcaccgttatctacaacggagacgagatcggtatgatcgatcgccctatgacctacgaagagacagtggatccagctggttgcaatgccggccgagaaaggtatcaattaaaatctcgcgatcctgccaggactcctttccagtgggacaacacgacgagcgccggtttttcaactagccggaagacgtggttgcctgtgcacgagaactacaaaactttgaacttggcggcacagaagctagcttccatctcccattacaaagtctttttagccttggctaaacttaaaaaaaccaaactacatcatgagggtcagttggagatcagtacggacaatgacaaggttttaggagtcgtaagacggcggcctcatcagacgcccttggtacttctaatcaactttgaagagacgccaatcaagctggatttgagaagttggctacatcttcctgacagcattgacatttacacggcgtgcgtcaagtcgggattaaaagttgggactacggtcaaaagcgcacaatttgtgattccgggcgcggctgccgtgattctggcaggtaatgatttggcatga

SEQ ID NO: 1722 - protein, 576 aa, Nasonia vitripennis
MWKVLLLGLAFLALHQVEGANDPVKKPEWWESGIIYQVYPRSFKDSNGDGIGDLNGITSKLEHIRDSGAVALWLSPIYSSPQVDFGYDISNFTEIDPNYGTLADFRNLVTRAKLLGLKVLLDLVPNHSSDQHEWFKKSAKRIKPYDEYYIWRDGKVLANGTRVPPNNWISIFSGPAWTWNEERKQYYYHQFASAQPDLNYRDANLRLEMDNVITFWLDQGVDGYRIDAIIHMFEDAALRDEPLSHRPGVPPTDYDYLEHPYTKDQNETYDVVARWRQIMDKHSQDHKTDKKYAIVEAGSPYPLMMRYYQVGVDPFNFMFIATLRNSSRPSDFANAINEWMYNMPKDQSANWVVGNHDNSRVASRFGYQSNRADQMSMLAAVLPGITVIYNGDEIGMIDRPMTYEETVDPAGCNAGRERYQLKSRDPARTPFQWDNTTSAGFSTSRKTWLPVHENYKTLNLAAQKLASISHYKVFLALAKLKKTKLHHEGQLEISTDNDKVLGVVRRRPHQTPLVLLINFEETPIKLDLRSWLHLPDSIDIYTACVKSGLKVGTTVKSAQFVIPGAAAVILAGNDLA

SEQ ID NO: 1723 - DNA, 1806 bp, Aedes aegypti
  CDS (1)..(1806)
atgaagaagtgcgcagtcgtgtgcttgctgggcctgttggctctggcaggtgcaaaatccgccgtgaaacaagatggtcacgatcacgatatgccggagttggattggtgggagggtggagtgttctaccagatctatccgcggtcgttcaaggataccaacaacgacggcgtaggggatattgccggaatcatggagaagctggaccatttggtggatctgggagtgacgggagtgtggttcagtccgctgttcaagtcaccgatgaaggatttcgggtacgatatttccgactttaaggatgtcgacccgacgttcggtacgttggaggatctgaaagctttgatcaagaaggccaaggagttgggtatcaaggtgatcttggactttgttccgaatcatactagcgacgaacacgagtggttcaagaaggcactggctgatgatccggattatattgattactatgtgtggaaggatggaaatgccgaaggaggtccaccgaataattggcaatccgtgttccacactgatgcgtggaccaaaccggccggtaagtccaagtactatctgcaccagttcgacaagggccaaccggatttgaactacgaaaacccgaaagtcaaggcagagatggaggagatgctccatttctggtttgaattgggcgtggatggtttccgcatcgatgccatcaaccacgcttatgaggacgcaggtttcttggacgaaccgatcattgatgaaaacaagggactgttctacgaaaacatggaacacatctacacgatgaaccagaatgaatcgtatgagctgatctacgattggcgcgtggttttcgatgagtggtcggaaaagtcgaaccaaaccaagctgatgatgacggaagcgtatgccaatatggagcaaaccatgcgctggtacggtgatggcaaacgtaacggatcgcacttcccattcaactttgccatgatcaaccggattgagagcagctccaatgctgccgactttaaggaagtcattgacgagtggttggataacatgccggaaggaggtaacgctaactgggtgctgggaaatcacgatcgtccacgtattgcttcgcgatttggtcgggatcgtgctgctagctttgccattatggaaatgactctgcctggcattgctgttgtctactatggggaggaaatcggcatggaggactaccgtgacatcagcttcgaagatacccaggatcctcaggctgccaacaccaacaaggaaatttatcagttgtatactcgtgacccggtgagaactcctttccagtgggacaatacgacatatgcgggcttcacaggaagtgctgccgaaaagacatggttgcctgttcatcccaactacaaggaattgaatctggctgcccagaaagaggacccgaagagtcttttcactctgtataaaaacttgatccaactccgcaaagatcacactttcaagtacggtagcttcgaatctaaggctctggtcaacaacgtgttcggtttcaccagaaagctggatgaccacaagtcgtacgctgttgtggtcaacatgaactcaatggaagcccaactcaacctgaagcatttggacgaaggtatcgagaagttgaaggtggttctgagtgcacccgagtccaagtatgctgtcgatgatgtgataagcaacgtcgagtacctgactttggacaaatacgacgcagtagtgttcgagatgagcggcagtgctgccttaactggatctttgacgttgctgctggtagcggtgctgaggtttttgatctag

SEQ ID NO: 1724 - protein, 601 aa, Aedes aegypti
MKKCAVVCLLGLLALAGAKSAVKQDGHDHDMPELDWWEGGVFYQIYPRSFKDTNNDGVGDIAGIMEKLDHLVDLGVTGVWFSPLFKSPMKDFGYDISDFKDVDPTFGTLEDLKALIKKAKELGIKVILDFVPNHTSDEHEWFKKALADDPDYIDYYVWKDGNAEGGPPNNWQSVFHTDAWTKPAGKSKYYLHQFDKGQPDLNYENPKVKAEMEEMLHFWFELGVDGFRIDAINHAYEDAGFLDEPIIDENKGLFYENMEHIYTMNQNESYELIYDWRVVFDEWSEKSNQTKLMMTEAYANMEQTMRWYGDGKRNGSHFPFNFAMINRIESSSNAADFKEVIDEWLDNMPEGGNANWVLGNHDRPRIASRFGRDRAASFAIMEMTLPGIAVVYYGEEIGMEDYRDISFEDTQDPQAANTNKEIYQLYTRDPVRTPFQWDNTTYAGFTGSAAEKTWLPVHPNYKELNLAAQKEDPKSLFTLYKNLIQLRKDHTFKYGSFESKALVNNVFGFTRKLDDHKSYAVVVNMNSMEAQLNLKHLDEGIEKLKVVLSAPESKYAVDDVISNVEYLTLDKYDAVVFEMSGSAALTGSLTLLLVAVLRFLI

SEQ ID NO: 1725 - DNA, 1851 bp, Culex quinquefasciatus
  CDS (1)..(1851)
atggcgcaggtcggaagtaatcaatggttaatttgcgcctcaattgcactgttggtggtgttgctgcaagtcggtgcatcgtacggtgataaccttcgtgaacttagtgtgagcgattggtgggaaaaggccggattctaccagatctatccgcgctcgttcaaagacagcgatggtgacgggattggcgatctgaagggaatcgagggcaagctggagtatttgaaagggatcggaatgaaagcgttttggctgtcgccgatctacaagagtccgatggcggactttgggtatgacattgctgactttgtggacattcagccggagtacgggacgatgtcggattttgagagcctggtgaagaaggctaaggagttgggtttgaaactgatcctggactttgtgccgaatcactcgagcgatgagcatgagtggttcgtgaagagtgaaaaacgcgaggaagggtatgaggacttttacgtatggaatgacggtattgttgatagtgatgggctgagatcgccaccgaataactggaatgaagcattccgaggaagtgcctggcagtggagtgcaacacggcagcagtactacctgcatcagttccaccggaagcaacctgatctgaactaccgcaatccggctgtggtggaagcaatgaagaacgtgttgagattctggctcggcaagggtgttgatgggttccgaattgatgccgtgccatggctgttcgaagatgagcaacttcgcgatgagcctctttcgggatggtcgtcagatgatccgctgcgccctgaatatctgaaccacatttacacgcaggatctaccggaaactgttgacatggtctatcagtggcgtgaagttctggatgagtataagaacgtaaaaggcggtgaaactcgggtgttgatgaccgaatcttggtctgccttatcggttgtacaaacatacttcaatgattccaacggtcgcttaggatcacaaatgccgttcaacttccaattgatcatgcgactggatcaggactcgaaggcatcggattacaaaacggttattgactcatggttggatgcggttcccgtcggacacgctcccaattgggtgctcggaaaccacgacaagcgtcgcgtagcctcacgtatgggaggagagcacatggcggacatcatggagatggtcgaactgtccatgccgggtgtttccatcacctatcagggagaagagctgggcatgaccgatacctatataagctgggccgacaccaaggatccttccgcatgtcaaaccaacaaaaacgtatacgaacagtacacccgtgatcccgcacgaactccattccagtgggatgctacggcgaacgctggcttcacgaccgccagcaaaccgtggcttccggtcaactccaactacgcgacgatcaacgtagattcggagcagaaagcggacaaaagtcacctgaaagtgttcgaagagttggtaaaacttcgcgatgacgacgacttccacagcagtcagtttggaacagcggttttgggccagagcacatttgctatcattcggatcgcaaacggcaggacatactttacgttggtcaatctggcgaatgctcaggacacggtcaatgtcgctgcactcttcaccaaattcagcactaccaaatcgttcgatactgcagttgttagggttgcaagcgtttcttcaaagaggactgctaaggaatcggttacgttgagttcgattcagctggatccgtatgaagggcttgtagtgcaaagtggggcgaaaaattgcgtggcaggtttcctgttgattatcgttgctgtacttacgcttttaaagttgcgttaa

SEQ ID NO: 1726 - protein, 616 aa, Culex quinquefasciatus
MAQVGSNQWLICASIALLVVLLQVGASYGDNLRELSVSDWWEKAGFYQIYPRSFKDSDGDGIGDLKGIEGKLEYLKGIGMKAFWLSPIYKSPMADFGYDIADFVDIQPEYGTMSDFESLVKKAKELGLKLILDFVPNHSSDEHEWFVKSEKREEGYEDFYVWNDGIVDSDGLRSPPNNWNEAFRGSAWQWSATRQQYYLHQFHRKQPDLNYRNPAVVEAMKNVLRFWLGKGVDGFRIDAVPWLFEDEQLRDEPLSGWSSDDPLRPEYLNHIYTQDLPETVDMVYQWREVLDEYKNVKGGETRVLMTESWSALSVVQTYFNDSNGRLGSQMPFNFQLIMRLDQDSKASDYKTVIDSWLDAVPVGHAPNWVLGNHDKRRVASRMGGEHMADIMEMVELSMPGVSITYQGEELGMTDTYISWADTKDPSACQTNKNVYEQYTRDPARTPFQWDATANAGFTTASKPWLPVNSNYATINVDSEQKADKSHLKVFEELVKLRDDDDFHSSQFGTAVLGQSTFAIIRIANGRTYFTLVNLANAQDTVNVAALFTKFSTTKSFDTAVVRVASVSSKRTAKESVTLSSIQLDPYEGLVVQSGAKNCVAGFLLIIVAVLTLLKLR

SEQ ID NO: 1727 - DNA, 1818 bp, Culex quinquefasciatus
  CDS (1)..(1818)
atgaagcgtgtccaagtgttgttctggctaggcctgctggtggcggtggtcagtgccaagactaccggccgagaagaggatggtcacgaccatgacctgcccgagctggactggtgggagggtggagtgttctaccagatttatccccggtctttcaaggactcaaacggggacggtaccggagacatcaagggaatcctggagaagctggaccacctggtggacttaggcgtcacgggagtgtggtttagtccgctgttcaagtccccgatgaaggactttgggtacgacatttccgactttctcgacgtcgatccaacgttcggcacgatgaaggatttggaagatctgctggcgaaggcgaagcagctgggaatcaaggtgatcctagactttgtgccgaaccacaccagcgacgagcacgagtggttcgtcaagtccaagagtggagatccagattttcgggacttttatgtgtggaaagacggcaaagctggcggattgccaccgaacaattggcaatcggtgttccatacggacgcgtggaccaagccggaaggtagcacccaattctatctgcatcagttcgataaaggccagcccgatctgaactacgagaaccccaaggtgaaggaggaaatgaagaagatgatcgagttctggttttcaaagggtgttgacggattccgtatagatgcgatcaaccacgcgtacgaggatgagcgattcttggacgagccgctgattgatgagaatcgtgagttgttctacgagaatatggatcacaaatataccatgaatcaggacaaatcgtactcgctgatctacgactggcgtgagctgttcgacaagtggtccgttgagacgaagcaaaccaagctgatgatgacggaggcttacgctaacctggagcagaccatgcgttggtatggggatggtacgcgcaagggatcgcacttcccgttcaactttgccatgatcaaccgcgttacgaacagttcgggagctgcccagctgaaggaggtgatcgacgagtggctcgacaccatgccaaagggagccaacgctaactgggtgctgggaaaccacgatcgtcctcgtattgcgtctcgctttggacgtgaacgtgctgccagcttcgcagttctagagctgacactcccgggaatcgcagttgtttactatggtgaggagatcggcatggaggactaccgagacatttcgttcgaagatacgcaggatcctcaggctgccaacacgaacaaggagatctaccagctgtactctcgcgatccggtgaggactcccttccagtgggatagctcagcttacgctggattcaccgcggcaaccactgtgaagacttggcttccggtgcactcaaacttcaaggagctgaacctggctgcccagaaaaccgctcccaagagtatcttcaagctgtaccagcagctgatcaagctgcgcagcgatcacaccttcatgtacggcgactttgagtcgaaggctctgatcaacaacgtgttcgggtacacacggaagctggcggaacacaagacatacgccgtggtcgtcaacatgaactcggccgatgtgcagctgaacatgaagaacctggagaaggacacccagaagctgaaagtcgtggtcagcacgccggagtccaagttcgaggagaaccaggagattaccgacgtggagaacatgattctggagagcttcgatgcggtcgtgttcgaggtagtcacggctggcagctcggcactggttggctcggtgcttttgctgctgggagccgtgttgcgagcattgatgtag

SEQ ID NO: 1728 - protein, 605 aa, Culex quinquefasciatus
MKRVQVLFWLGLLVAVVSAKTTGREEDGHDHDLPELDWWEGGVFYQIYPRSFKDSNGDGTGDIKGILEKLDHLVDLGVTGVWFSPLFKSPMKDFGYDISDFLDVDPTFGTMKDLEDLLAKAKQLGIKVILDFVPNHTSDEHEWFVKSKSGDPDFRDFYVWKDGKAGGLPPNNWQSVFHTDAWTKPEGSTQFYLHQFDKGQPDLNYENPKVKEEMKKMIEFWFSKGVDGFRIDAINHAYEDERFLDEPLIDENRELFYENMDHKYTMNQDKSYSLIYDWRELFDKWSVETKQTKLMMTEAYANLEQTMRWYGDGTRKGSHFPFNFAMINRVTNSSGAAQLKEVIDEWLDTMPKGANANWVLGNHDRPRIASRFGRERAASFAVLELTLPGIAVVYYGEEIGMEDYRDISFEDTQDPQAANTNKEIYQLYSRDPVRTPFQWDSSAYAGFTAATTVKTWLPVHSNFKELNLAAQKTAPKSIFKLYQQLIKLRSDHTFMYGDFESKALINNVFGYTRKLAEHKTYAVVVNMNSADVQLNMKNLEKDTQKLKVVVSTPESKFEENQEITDVENMILESFDAVVFEVVTAGSSALVGSVLLLLGAVLRALM

SEQ ID NO: 1729 - DNA, 1827 bp, Culex quinquefasciatus
  CDS (1)..(1827)
atgaccggaagtcctaaacgacaaattgctctgctgatactaattctcggcggatcgttcggcgataacctgcgcgggcttagcgtgagcgattggtgggagaaggccggcttctaccagatctatccgcgctcgttcaaagacagcgacggtgatggggttggtgatctgaagggaattacggaaaagctggagtacatcaagtcgcttgggatgagagcgttttggctgtcgccgatatacaagagtccgatggcggactttgggtatgacatctcgagttttgtggagatccagccggagtacgggacgatgtcggactttgagaatatggtgaagaaggctaaggagttgggcttgaaggtgattctggactttgtgccgaatcactcgagcgacgagcatgagtggttcgtgaagagtgagaatcgcgaggttggatatgaggacttttacgtgtggcatgacggaattgttggtagtaatgggcagagatcgccaccgaataattggaatgaagcattccgaggaagtgcctggcagtggagtgcgacacggcagcagttctacctgcatcagttccaccggaagcaaccggatctgaactatcgcaattcggctgtcgtggaggcgatgaagaacgtgttgagattctggcttggcaagggcgttgatggattccgggtagatgccgtttcgaatctgtttgaagatcaacagctgcgagatgagccaccgtccggagaatctttggacgatccgttccgaccgcaatacctggaccacatctacacgcaggatcaaccggaaactgttaatatggtgtaccaatggcgagaggtgatggatgcgtatcaaaagcagcatggtggtgaaactcgagtattgatgactgaggcctggtctgctctgtcagttattaaaacgtacttccacgattccgatggacggttgggatcccaaaagccgttcaactttcaatttattcttcacctgaatcagaactcgaatgctgctgactttaagacggtgattgagtcgtggctggatacggttcccgtaggacatgcacccaactgggtgctagggaatcacgacgttcgtcgcgtggcctcacgtatgggaggagaacacatggcggacatcatggagatggtcgagctgtccctgccgggtgtttccatcacctatcagggagaagaactgggcatgaccgataccgagcttagctgggccgagaccaaggacccgtccgcatgtcaaaccgatgaatacgtctatcaacagtacacccgagatcccgcacgcactccattccagtgggatagtacggcaaatgctggcttcacgaccgccagcaaaccgtggcttccgattaaccccaactacacgacgatcaacgtagattcggagcagaaagcggacaaaagttacctgaaagtgttcgaagagttggtgaaacttcgcgacgaagatgattttcacagttttcaatacgggacagctgcgctgggccagagcacatttgctatcatccgaaccacaaacagcaggacatactttacgttggtcaatctggcgaatgctcaggacacggtaaatgtcgctgaactgttcagcaggtttaatactaccaaatcgttcgatactgcaatcgttagggtggcaagtgtttcctcaaagaggaccgctaaggaatcggttacgttgagttcgattcagctggatccgtatgaagggcttgtagtgcaaagtggggcgaatcactgtagatctgttttcgttttggtaatcctggcacttgctgttatttacgggggcaattga

SEQ ID NO: 1730 - protein, 608 aa, Culex quinquefasciatus
MTGSPKRQIALLILILGGSFGDNLRGLSVSDWWEKAGFYQIYPRSFKDSDGDGVGDLKGITEKLEYIKSLGMRAFWLSPIYKSPMADFGYDISSFVEIQPEYGTMSDFENMVKKAKELGLKVILDFVPNHSSDEHEWFVKSENREVGYEDFYVWHDGIVGSNGQRSPPNNWNEAFRGSAWQWSATRQQFYLHQFHRKQPDLNYRNSAVVEAMKNVLRFWLGKGVDGFRVDAVSNLFEDQQLRDEPPSGESLDDPFRPQYLDHIYTQDQPETVNMVYQWREVMDAYQKQHGGETRVLMTEAWSALSVIKTYFHDSDGRLGSQKPFNFQFILHLNQNSNAADFKTVIESWLDTVPVGHAPNWVLGNHDVRRVASRMGGEHMADIMEMVELSLPGVSITYQGEELGMTDTELSWAETKDPSACQTDEYVYQQYTRDPARTPFQWDSTANAGFTTASKPWLPINPNYTTINVDSEQKADKSYLKVFEELVKLRDEDDFHSFQYGTAALGQSTFAIIRTTNSRTYFTLVNLANAQDTVNVAELFSRFNTTKSFDTAIVRVASVSSKRTAKESVTLSSIQLDPYEGLVVQSGANHCRSVFVLVILALAVIYGGN

SEQ ID NO: 1731 - DNA, 1866 bp, Acyrthosiphon pisum
  CDS (1)..(1866)
atgcgtcgtgagtgcatgattttgttattgctaaatctttcggaacatttcaccaatggaaataaaacttgcgtcaaagatgaagagaaaagtttagaatggtggaaaactgcggtttactaccaagtctatccaagatcatttaaggatagcaatggtgacggtataggagatcttaaagggattgaagagaaagctgaacacttcaaagacataggagtggactgtgtttggttatcacccatttttaaatcacctatggctgactttggttatgatatttcggattataatatgattgatcccgtatatggcacaatggatgattttatttcgttgcagaaaaaattgcaatctttgggcattaaaattattttggacttcgtacctaatcattcaagtgatgaacacgaatggtttaaaaagtctgtggacaaaattatgccatacaaagattattatgtatggagagatggtaaatgcgatgacaatagttcgataacgccaccaaataattggcaaagtttattcagtaattcagcatggacatggaataaaaaacgtgaacagtattatttacaccaatttgaccgtaaacaaccagatttaaattacagaaataaagacttggttaaagaaatgaaaaacaatttgaggttttggttggatcttggtgtagatggatacagagtagatgccgtaccgtttttgttcgagcatccagactttttagacgatatcagaaaaccagaagagcttgccaaaaaagagaaaaatacttatgaacaatattatcatccctatacaatggatttagatgaaacgtatgatatgattagtcagtttagggacgttatggaagaatacaaactgagagacggaaaaaccagagttatgataactgaagcatacacttccatggaaaacactatgagatattatggtgatgagaccagtttgggagcacatatgccatttaattttggattgatcgatcgactaaatgaatattcgaacgccactaaattcaacgaagcgataaataattggttggacaatatgcctgagggaaaatgtgcgaactgggtgatcgggaaccacgacaatccgcgggtggccacccggtttggcggagaaatggtggacgccatgaacatgctgaacatgttgttgcccggcgccgcgttcacgtacatgggcgaggagatcggcatgtcggacacggtcatccgctgggaacagacggtggacccgaggggccggaacgcgggacccgacggtttccggacattgagcagggaccctgccaggtcaccgtaccagtggaacgccagtgccaacgccgggttcacggtatcctcatcgaaaccatggttgccggtgaaccccaactactggaagctgaacctggacgcgcagcgcaagcagcactgcagccactacaccgtgtacaagcggttggccaagctccggaagacccggacggtgcagcgcggttcgttcgacggcagagagctgtcccagtgggtgtacgcgtttacgaggtcactgccgtcagcagaaacttacctggtggtaatgaacgtgggctcggaggatgaacgtgtcgacttgagtaattggccaactttggaaaaagaccaaacgtggctggtacacacgccaagcgtcaattcacaatactcaataggatattcacttaaaacaaatggattcacattgagaccaaaatctgccatggttttgtgtaacaaaagacatccatcgtcatcctcgtcaacaaccccgtcgatatctccatcttcgctggtgtttccagtggcaatgttcgtggtcgccttgagtttcatacttgccaacccgtag

SEQ ID NO: 1732 - protein, 621 aa, Acyrthosiphon pisum
MRRECMILLLLNLSEHFTNGNKTCVKDEEKSLEWWKTAVYYQVYPRSFKDSNGDGIGDLKGIEEKAEHFKDIGVDCVWLSPIFKSPMADFGYDISDYNMIDPVYGTMDDFISLQKKLQSLGIKIILDFVPNHSSDEHEWFKKSVDKIMPYKDYYVWRDGKCDDNSSITPPNNWQSLFSNSAWTWNKKREQYYLHQFDRKQPDLNYRNKDLVKEMKNNLRFWLDLGVDGYRVDAVPFLFEHPDFLDDIRKPEELAKKEKNTYEQYYHPYTMDLDETYDMISQFRDVMEEYKLRDGKTRVMITEAYTSMENTMRYYGDETSLGAHMPFNFGLIDRLNEYSNATKFNEAINNWLDNMPEGKCANWVIGNHDNPRVATRFGGEMVDAMNMLNMLLPGAAFTYMGEEIGMSDTVIRWEQTVDPRGRNAGPDGFRTLSRDPARSPYQWNASANAGFTVSSSKPWLPVNPNYWKLNLDAQRKQHCSHYTVYKRLAKLRKTRTVQRGSFDGRELSQWVYAFTRSLPSAETYLVVMNVGSEDERVDLSNWPTLEKDQTWLVHTPSVNSQYSIGYSLKTNGFTLRPKSAMVLCNKRHPSSSSSTTPSISPSSLVFPVAMFVVALSFILANP

SEQ ID NO: 1733 - DNA, 1800 bp, Anopheles gambiae str. PEST
  CDS (1)..(1800)
atggccctctactactggctagctttactactgttgggctggtctactgtgaccgcccagaaggattggtgggaaagtgcgagcttctatcaaatctatccgcgatcgtttcaagatagtaacggcgatggaataggcgatcttaatggcatcaaaagtcggttgccgtatctgaagtcactcggtatgactgcattttggctttccccgatctacccttcgccgatggccgactttgggtatgatatctccaactttatggacattcatccgagctttggaacgttggctgactttaagcagctggtggaagaagcgaaaaaactgcaattacgcatcatcctcgacttcgtgcctaaccattcgagcgacgagcatgagtggttcaagaaaagcgttcagcgagtaagtgggtacgaagactattacgtgtggcaggatcccaaaccgggcacggaacgcgaccctccaaacaactgggttgcagcatggtacggttcggcgtgggaatggaatgacgaaagaaagcaattttatttgcaccagtttcacaagaagcagcccgatctgaactaccgcaacccggccgtggtgcaggctatgaaggatgtgttgcgcttctggttggaccagggcgtcgacggcttccgtattgatgcggtcccgtggctgttcgagacggtgggtttcccggacgaacctgttagcggtcattccaccgatccgttaagtcagaactaccttacccacatttatacgctcgatcaaccggaaaccgttgacatggtgtatcaatggcgggaattgatggatcagtacaaacaagagcacaataccaccaccaaagtgctcatgaccgaggcatggtcctcgttggatgttgtaaaaacgtacttcaacgacagtaacaaccggcaaggatcgcaaatgccgttcaacttccagttaatcatgcggctggatcaaaattctaaagcatccgattttcagacggttattaactcgtggctggatatcattcctcctggccacacgcccaactgggtgcttggtaatcacgacaaacgtcgtgtttcgtcacgaatgggtggagaccatatggtagacataatggctatgatcgagctcaccttacccggcataacggtcacttaccagggagaagaaattggaatgcatgacgttgatatctcgtgggcggacactcaagatcctgctgcatgccagctgaccgaagagacgtatcaggaaggtacacgcgacccagccagaacaccgttccagtgggattctactgcaaacgcaggttttacgaacgcttctgtaaaaccgtggcttccgctagctaccgattatccgctggtgaacgtaaaaacacaacaagaatcagcccaaaacagtcatataaaggtgttcaaggagctgatgaacttacgcggcacgaacacgcttatctggggctcgtttaagtcactggtacttggcgaaaatgtgtacgctatactgcgttctttccccaacgacaaacgaacatatgtcgtgctggcaaacattggctccaagagcgaaataattgacgctacaaaactggacaacagtttaccgaacgagcttgtgtttcgcgtggtaagcgtatcgtcaaatcatatcaccggagaatcggtcgcaacaaacaacattcttttacagccttacgaagccgtagttttggctaaccatgcaattcgactggcgcagcagctttatgtattgatcggtgcttttggtatgttggtgggtgtgcaattgtttaaggcgtaa

SEQ ID NO: 1734 - protein, 599 aa, Anopheles gambiae str. PEST
MALYYWLALLLLGWSTVTAQKDWWESASFYQIYPRSFQDSNGDGIGDLNGIKSRLPYLKSLGMTAFWLSPIYPSPMADFGYDISNFMDIHPSFGTLADFKQLVEEAKKLQLRIILDFVPNHSSDEHEWFKKSVQRVSGYEDYYVWQDPKPGTERDPPNNWVAAWYGSAWEWNDERKQFYLHQFHKKQPDLNYRNPAVVQAMKDVLRFWLDQGVDGFRIDAVPWLFETVGFPDEPVSGHSTDPLSQNYLTHIYTLDQPETVDMVYQWRELMDQYKQEHNTTTKVLMTEAWSSLDVVKTYFNDSNNRQGSQMPFNFQLIMRLDQNSKASDFQTVINSWLDIIPPGHTPNWVLGNHDKRRVSSRMGGDHMVDIMAMIELTLPGITVTYQGEEIGMHDVDISWADTQDPAACQLTEETYQEGTRDPARTPFQWDSTANAGFTNASVKPWLPLATDYPLVNVKTQQESAQNSHIKVFKELMNLRGTNTLIWGSFKSLVLGENVYAILRSFPNDKRTYVVLANIGSKSEIIDATKLDNSLPNELVFRVVSVSSNHITGESVATNNILLQPYEAVVLANHAIRLAQQLYVLIGAFGMLVGVQLFKA

SEQ ID NO: 1735 - DNA, 1869 bp, Magnaporthe grisea 70-15
  CDS (1)..(1869)
atgggctgcattccattagacctacaaactgacgcctcaaatcggctgtacggcaagttaccatggtggaaagatgccgtattttaccaagtctacccggctagctttgtagacagcaacggggatgggtggggtgacattccgggcctagtcacaaagctcgattacctcgccaaccttggcgtcgactgcgtctggctatcgcccgtcttcgacagcccacaagccgacatgggatacgacgtctcggactatcagagcatatatgcgccttatgggaccgtcgccgacgtcgacgctctgcttgcgggctgtcatgcaagagggatgaaattaatcttggacttggtggtcaaccacacgagcgtcgaacactcgtggttcaaggagggtcgcagcagcagagcaagctctaagcgtgactggtatatatggaggccagcacggtatgatcccatcacaggtggaaggctgcccccgacgaactggcggggctactttgccggctcaacttggacatgggatgagcagacgcaggagtactatcttcatctgtacgctcccgagcagccggatttgaactgggataacgaggactgtcgaatggccatctataaagacactatgaacttttggcttgaccgcggagttgacggctttcgcatagatacagtcaacaagtattccaagagggattacgtcgacgtcccggtgacggaccccagcagctacactcagcccgctccggacatgtggtgcaacggcccttgtatccatgagtatatccgcgagatggcagccgaaacactacaccggtatcccggcgccgtcagcgttggggagttgagcaacatgaccaagggcccctcgcaggtcctcgaatacgtgtccgcgtcgcgcagcgagctggacatggtgtttgagttctccgcaatcaggctaggaaccggggacggctttggtgccaagtacatatacacgccatttccattgtcccacctcaagcgcatcacagagacttggcaggcgttcatcgagggaacagacggctggacaacggcttttgtcgagaaccacgacaacggccgggccgtgtcgaggtttggcgacgaccgctcgcccgaggcgtggcgggccagcgcgaggtgtatcgcactgtggcaggctacattgacaggtactctattcttgtaccaagggcaggagatcggaatgaccaacatgcccgagaattgggacatcgatgagtacaaagatgttgagagccagggcttctacaaggaggcggtaggaagcggtgatgtggacagtataaagaagacgatgcacggtctgagaattcttgcacgggaccacagccggctgccgatgcgatgggacggcggggcacctaatgccggattcgggcagtccacagatggctgcaagccatggatgcgagtcgtccaagacgcagaatgccgcggcggcggtgccgaggttagcgtggctgcgcaaactggcagaaaggagagcgttttggagttttatcgacttgtgttggcgctgaggaagaaacatcgcgagctgatggtacatggcagcttcaggctcctagatccggaagatgagtacatctttgcgtacgtcaaggaggcaagtcaaggcgtcaacgccaaagaaaacgacaggacagtcaaaaagtgcgtcgtcgtgctcaatttctcaggagaagcacaagagtgcgtggatgttgctgcggcaatgggctgtggactgacagacgtacgactactggtcgatactattgtgggcgaaccggaggacggacgggtcatctcgatcccagcacttggagcctgggaagggagagtatatgtcaacttttag

SEQ ID NO: 1736 - protein, 622 aa, Magnaporthe grisea 70-15
MGCIPLDLQTDASNRLYGKLPWWKDAVFYQVYPASFVDSNGDGWGDIPGLVTKLDYLANLGVDCVWLSPVFDSPQADMGYDVSDYQSIYAPYGTVADVDALLAGCHARGMKLILDLVVNHTSVEHSWFKEGRSSRASSKRDWYIWRPARYDPITGGRLPPTNWRGYFAGSTWTWDEQTQEYYLHLYAPEQPDLNWDNEDCRMAIYKDTMNFWLDRGVDGFRIDTVNKYSKRDYVDVPVTDPSSYTQPAPDMWCNGPCIHEYIREMAAETLHRYPGAVSVGELSNMTKGPSQVLEYVSASRSELDMVFEFSAIRLGTGDGFGAKYIYTPFPLSHLKRITETWQAFIEGTDGWTTAFVENHDNGRAVSRFGDDRSPEAWRASARCIALWQATLTGTLFLYQGQEIGMTNMPENWDIDEYKDVESQGFYKEAVGSGDVDSIKKTMHGLRILARDHSRLPMRWDGGAPNAGFGQSTDGCKPWMRVVQDAECRGGGAEVSVAAQTGRKESVLEFYRLVLALRKKHRELMVHGSFRLLDPEDEYIFAYVKEASQGVNAKENDRTVKKCVVVLNFSGEAQECVDVAAAMGCGLTDVRLLVDTIVGEPEDGRVISIPALGAWEGRVYVNF

SEQ ID NO: 1737 - DNA, 1716 bp, Gibberella zeae PH-1
  CDS (1)..(1716)
atgggtagtacaggtcaaactctacgagcttggtggaaagagagctcggtatatcaaatataccctgcgtcttaccaagactccacaggctctggtgttggtgacctcaaaggtatcatctctcgagttgactacctcaaagacttgggcgttgatatcatatggctttctcccatcttcaagagtccccaggttgatatggggtacgatatcagcgactactacaccgttgatcctccgtatggcaacgtctctgatgttgatgttctcaaagacaaactacatgagcgaggaatgaaacttgttctcgatttggtgatgaaccacaccagcgaccaacacgagtggttcaaggagtctcgcaagtccaaggacaacccctaccgagactggtatatctggaagcctgcaaagtacgatgcagacggaaacagacacccccccaacaactgggatgctcacttccagggaagtgcctgggagtacgacgagatcacagatgagtactacctctgcctcttctgcaagcagcagccagatctcaactgggagaacccagcggtcagaaaacaggtccaccaggtaatgcgcttctggcttgaccgaggcgtcgatggtttccgcatggacgtcatcaactttgtcagcaaggaccaagcattccccgactcagacaagactgtcctccgtgggacagagtactatgcatgtggtcctaggtgtcatgagttcctcaaggaaatcggtagcattctccaggagtacgatgcctttagtgttggtgaaatgccttgtgttcatgatgagagggagttgatcaaggctgtgcacggtgaccgaggagagctgagcatgatcttccattttgagctgatggatcttgatcacggcgtcgaaggcaagttcacgcccagatcctggaaactatcagagctgaaggctacaaccctcaagtggcagaggttcatgtacgacaacgaaggctggaacgcgctgtacctggagaaccacgatcagccacgagctgtcagccgcttcgtccacgatgatcctgagcatcgcgttgccagcgcgaaactgatcgcactcttcctcggcttccagtcaggcacacccttcatctaccaaggccaggagattggtatgaccaatgttccgaaggactgggacttggaagagtacaaggaccttgactgtcttaaacattgggatcttcacaagaatgatgatgttgcagcccagaattcctacaaggtcgagtatcaaaggaagtctcgtgacaacgctcgtacccctatgcaatgggatgcaagcccaaacgcaggcttcaccactgctgatgccaacccgtggatgcgcgtcaacgacaactataccgacatcaacgctgcttcacagacatcagattccaactctgtgtacagctgttatcgtcaagtacttgggaagcgcaaggagtacaaggatatctttgtctatggtaacttccaactcgtggacgagtccaacgacaagatctttgcgtactcacgacgggctgatagcggggagacggctctcgtcgtgtgcaacttctcagtggattccgttgcatggaagttacctggcgaggctcgagaggtgctgactagtccagcgggaaggacactcaatgacttgaacagtggtgagatcaagctagcaccctgtgaggctttcgctgtcctcctgaaatga

SEQ ID NO: 1738 - protein, 571 aa, Gibberella zeae PH-1
MGSTGQTLRAWWKESSVYQIYPASYQDSTGSGVGDLKGIISRVDYLKDLGVDIIWLSPIFKSPQVDMGYDISDYYTVDPPYGNVSDVDVLKDKLHERGMKLVLDLVMNHTSDQHEWFKESRKSKDNPYRDWYIWKPAKYDADGNRHPPNNWDAHFQGSAWEYDEITDEYYLCLFCKQQPDLNWENPAVRKQVHQVMRFWLDRGVDGFRMDVINFVSKDQAFPDSDKTVLRGTEYYACGPRCHEFLKEIGSILQEYDAFSVGEMPCVHDERELIKAVHGDRGELSMIFHFELMDLDHGVEGKFTPRSWKLSELKATTLKWQRFMYDNEGWNALYLENHDQPRAVSRFVHDDPEHRVASAKLIALFLGFQSGTPFIYQGQEIGMTNVPKDWDLEEYKDLDCLKHWDLHKNDDVAAQNSYKVEYQRKSRDNARTPMQWDASPNAGFTTADANPWMRVNDNYTDINAASQTSDSNSVYSCYRQVLGKRKEYKDIFVYGNFQLVDESNDKIFAYSRRADSGETALVVCNFSVDSVAWKLPGEAREVLTSPAGRTLNDLNSGEIKLAPCEAFAVLLK

SEQ ID NO: 1739 - DNA, 1728 bp, Gibberella zeae PH-1
  CDS (1)..(1728)
atgtctcccgcaatacagaatatcaacagtcccatcactgcagcctggtggaaggaggcgtcggtttaccagatttacccttcgtcctttaaagacactaacggagatggcatcggtgatatcccgggcataatcgagaaactcgactacttcaagcaacttggtgttgacattatttggttatgtcccatctatccatcgccccaaattgatatgggatacgacgtcgccgattaccgcgacattgatcctcagtatggaactatggctgatgttgaacgattgatcgagggcctacactcgagagggttgaagctgctgatggatcttgttgtcaaccatacctctgatcagcacaagtggtttcaagagtccaagtcgtcacgagataatccttacaggaactggtacatctggaggaagcctcgatatgacgaagacggccagcgacatccaccaaacaactggctctcttactttcgaggcagtgcgtgggaatacgacccagcttctgatgagtactatcttcacctgttcgccaaggaacaacccgatctcaactgggaacatgctcctgtacgtgaagccgtacacgaaatcattcgtttctggttagataagggcgtcgacggctttcgcaaatcggagggactacctgatgccccgatcacggttctaggatccgagtatcaatttggtcacgaccattacgcctgcggccctcggcttcatgagtatcttcgcgacattggctctatcctcaaagagtatgatgccttctccgtcggtgagatgcctgcagttcaagaccccgaagaaatcatcaagagcgttggagaaagccgaggcgagctgaatatgatcttcaactttgagatcgttgacatggatcatggtgaccaagggaagttctccgcaaagaaatgggaaatgaaagagctcaagatgattgtcaataaatggcagacgtttatgtataacaacaagggctggaacgctctttaccttgaaaatcacgaccaatcgcgctccatcagtcgatgggtatccgacaagcctgtataccgtgagatgtcggctaagatgttatcgacatttctctgcttccaaagcggaactgtttttgtgtaccaaggcgaggaattgggcatggccaacatgcctccagattgggaaatgactgagcatcgtgatgtagaaacgttgaaccattgggaagagctgaagcggacaacgggttccgatgcaaaggttctagagcttgctcgaaaggagtaccagctcaaggcgcgagatcacgcgagaacaccagtacaatgggattcttcgcccaatgccgggttcacaacgggcaagccctggatcagagtcaatgacgactaccaacagtggaacgcagcaacccaaaccaacacaaagggtagtgtgtttgactattggcgatctgcgctttccctgcggaaagagcttaaggatattgttgtctatggcgactttgagttgcttgacgcggagaatagcgatatctttgcgtatgctcgatctgacggaaagcaaaagcttattgttgtttgcagttttcgagatcgagagattgcctggccggtacctgcttcgaccggtctacagtcgagcaaggttttgctgtccaactacccggagattgatttgtcccaggatgtgatctccatacgccccttcgaggcttttgtatgcctggttggttaa

SEQ ID NO: 1740 - protein, 575 aa, Gibberella zeae PH-1
MSPAIQNINSPITAAWWKEASVYQIYPSSFKDTNGDGIGDIPGIIEKLDYFKQLGVDIIWLCPIYPSPQIDMGYDVADYRDIDPQYGTMADVERLIEGLHSRGLKLLMDLVVNHTSDQHKWFQESKSSRDNPYRNWYIWRKPRYDEDGQRHPPNNWLSYFRGSAWEYDPASDEYYLHLFAKEQPDLNWEHAPVREAVHEIIRFWLDKGVDGFRKSEGLPDAPITVLGSEYQFGHDHYACGPRLHEYLRDIGSILKEYDAFSVGEMPAVQDPEEIIKSVGESRGELNMIFNFEIVDMDHGDQGKFSAKKWEMKELKMIVNKWQTFMYNNKGWNALYLENHDQSRSISRWVSDKPVYREMSAKMLSTFLCFQSGTVFVYQGEELGMANMPPDWEMTEHRDVETLNHWEELKRTTGSDAKVLELARKEYQLKARDHARTPVQWDSSPNAGFTTGKPWIRVNDDYQQWNAATQTNTKGSVFDYWRSALSLRKELKDIVVYGDFELLDAENSDIFAYARSDGKQKLIVVCSFRDREIAWPVPASTGLQSSKVLLSNYPEIDLSQDVISIRPFEAFVCLVG

SEQ ID NO: 1741 - DNA, 1890 bp, Gibberella zeae PH-1
  CDS (1)..(1890)
atgttagacaacagccctccagaccgacagtggtggaaagaagcagttgtctaccagatttacccagcaagcttccttgactcaaatgctgatgggcttggtgacctgcctggcatcatctcaaagcttgactacatccgctcagtcggtgccactgccatatggctgtccccaatctttaagagtcctcaacatgatatgggttacgatatttcagactatcgcgacatccatcgcccttatggttccattcaagatgtcgaggctctcatcaagggatgccatgagcgagacatcaagatactactagatctcgtggtcaatcacaccagccatgaacatgagtggttccgagagtcacgatcatcaaaaacatctccaaagagagattggtatttctggcgcgaccccaagtttgacgccgatggaaaccacaaaccgcccaacaactggtcatccatcttcggcggcagtgcttggacatacgacgaacccacaggtcaatactacttgtcactctttctacccgaacagcctgacttgaactgggccaacgaagacatgcgtcaagcaacatatgccgacatgaagttctggctcgacaagggcgctgatggcttccgcattgactcgatgaacctcatgtccaagcaccccgaccttcctgacgcgcccatcacacggcccgactcagagttccagccaggagacaagtactttgctagcggaccccgcatgcacgagtatatcagggaaatacgggaggaggttatcgacaaatatgactgcatgactgttggagaactcggctttacaaaagacgaggccagtgtcgccagctacgtggcaaaggaacgccatgagctaaacatgttgtttaccggagacatcgtcgacatggatttcggtgccaaccataagtacgaaagagatgactttcgcctttcaaagctcaagacaatcactagccgctggcaaggagctatgcccaagttcgatggctggaacacgatctatatggacaatcatgattcgggtcgttctctgtcacgatatggatctgacttaccccagtttcgcaaagaggcagccaagatgttagctatctatctcagtaccttgagcggaacattatttcttcttcaaggccaagagatcggtatggctaatgttccagaatcgtggaagattgaggactatattgatgttgaggggctgaattattacaatagtcaactagaaaaacgaggcctaggcgctgatatgtctgacatcatgagggagatgagactcaaggcccgcgataatggaagactacccatgcaatggacagccgacaagaacgccggtttctcaaagggtgagaagccttggatgcgggtcaacgacgacttcaaggagtggaatgttgcgcagcaggagaatgatggtgacagtgtgctggcattctggagacaggttctggagcttcgagagaaggaaagagacgtatttgtttacggccgattcaccaacctacctgactacgaggatagcgaagacatctttgcatacaccatgactagctttgatgggaggtcagctcttgttctgttgaacttctcggacaaggaacagaaggtcgaggtgaagaatgggtcctggggtaagaagttgattggaaagaacgcaaatgagtttggcaaggaaggtgtgctactccaggcttatgaagtcgttactaccgtggttaaaatgattgtgaaggtctatctaaaaccctttgttgcagaactcagctccgctacgtcttccattcacttgcctttcgcttataagagcaagaaaattctgacgctaactactgattctgcacacgaaatactgtggtcaatgtttctgatgccttga

SEQ ID NO: 1742 - protein, 629 aa, Gibberella zeae PH-1
MLDNSPPDRQWWKEAVVYQIYPASFLDSNADGLGDLPGIISKLDYIRSVGATAIWLSPIFKSPQHDMGYDISDYRDIHRPYGSIQDVEALIKGCHERDIKILLDLVVNHTSHEHEWFRESRSSKTSPKRDWYFWRDPKFDADGNHKPPNNWSSIFGGSAWTYDEPTGQYYLSLFLPEQPDLNWANEDMRQATYADMKFWLDKGADGFRIDSMNLMSKHPDLPDAPITRPDSEFQPGDKYFASGPRMHEYIREIREEVIDKYDCMTVGELGFTKDEASVASYVAKERHELNMLFTGDIVDMDFGANHKYERDDFRLSKLKTITSRWQGAMPKFDGWNTIYMDNHDSGRSLSRYGSDLPQFRKEAAKMLAIYLSTLSGTLFLLQGQEIGMANVPESWKIEDYIDVEGLNYYNSQLEKRGLGADMSDIMREMRLKARDNGRLPMQWTADKNAGFSKGEKPWMRVNDDFKEWNVAQQENDGDSVLAFWRQVLELREKERDVFVYGRFTNLPDYEDSEDIFAYTMTSFDGRSALVLLNFSDKEQKVEVKNGSWGKKLIGKNANEFGKEGVLLQAYEVVTTVVKMIVKVYLKPFVAELSSATSSIHLPFAYKSKKILTLTTDSAHEILWSMFLMP

SEQ ID NO: 1743 - DNA, 1794 bp, Gibberella zeae PH-1
  CDS (1)..(1794)
atgactgtcaacaagcgcactaagcagtggtggaagcaggccaccatctaccaaatttaccctgcatccttctgcgactccaacggcgatggcatgggagatctccaaggcatcatatccaagcttgattacatttccagcttgggtgttgatgttatctgggtctgccccatgtatgattccccacaagttgacatgggctatgacatctccaactacgaagatgtctatgctccctatggtactctccaagacatggaagagttgatccgcaagactcacgaaaagggcatgaagattatgctcgatcttgttatcaaccatacatctgacaagcatgcttggtttgaggagtcacgacttagcaaggacagccccaagcgcgactggtacatctggcgaccagccaagtactcacccgatggccaacgtctccctcccaacaactggcgctccaactttggaaaaggcagtgtctgggaatgggacgaggcaacgggggagtattatctacacctctttgctaaggagcaacccgacctcaactgggagaacccagagacccgaagagccatctacgcttcctccatggaattctggcttgaccgaggcgtcgacggtttccgtgtcgataccgtcaacatgtactccaagatccaagacttccctgacgcccctatcgtcgacctcaaagccgaataccaacctgctggcctactctactgcaacggtcctcgaatgcacgagtttctcagcgagatgagcgaggttcttgaacgatacggtgccatcactgtcggcgaacttcctcatacaccagacctagagcgtgtcttgcgatatgtcagcgccaaggagaagcagctcaacatggtgttccaatttgatgttgtcgatgttggtttcggaaagactcataaatatgagactacacccagaaactatactcttcctcaactaaaggacgcttttggtagaacacagagtttgatccatgggacagatgcttggacgacagtctttatggagaaccacgatcaagctcgttctgtatcacgttttacaaacgacagtccccagtacagagtggcaggagccaaactcttggctttgcttcagtcttgcctgagcggtacacaatatgtttaccagggccaagagattggttcagtgaatgctccaaaagagagttaccctctggagaattacgtcgatatcgagagctatcagttcctagacattgtcaaagagcgctccaacaatgatgagcaagaaattgacaaggctttcaatgctctgcagcacctagctcgagatcatgcacgcatccccatctgttggagcgactctaagcacggaggattctcagaagccgctgaaaaggctggactacccatcaaaaagccttggatgcaagctcaccctctatcccaagaagtcaatgtcgcgtctcaactagacgacccacaaagtgttctttccttctggaagaaagctattagtttccgaaaggagtttcctgatctcacggtttacggagattacaaggttattcgacaggatgatcctgacatttatgcttttgttaaagagtcacttgcagatggatccaaggtagctgttgttctcaattttacgactgaaaataaggcgtggagtgccccgacttctgaagagctgggtgttcacagtggaaaggatataaagcttgtgccgataatgtcgacgcactctgggaaggaaaagactgctgttttatcgccgtttgaaggaagagtttatttggttacttag

SEQ ID NO: 1744 - protein, 597 aa, Gibberella zeae PH-1
MTVNKRTKQWWKQATIYQIYPASFCDSNGDGMGDLQGIISKLDYISSLGVDVIWVCPMYDSPQVDMGYDISNYEDVYAPYGTLQDMEELIRKTHEKGMKIMLDLVINHTSDKHAWFEESRLSKDSPKRDWYIWRPAKYSPDGQRLPPNNWRSNFGKGSVWEWDEATGEYYLHLFAKEQPDLNWENPETRRAIYASSMEFWLDRGVDGFRVDTVNMYSKIQDFPDAPIVDLKAEYQPAGLLYCNGPRMHEFLSEMSEVLERYGAITVGELPHTPDLERVLRYVSAKEKQLNMVFQFDVVDVGFGKTHKYETTPRNYTLPQLKDAFGRTQSLIHGTDAWTTVFMENHDQARSVSRFTNDSPQYRVAGAKLLALLQSCLSGTQYVYQGQEIGSVNAPKESYPLENYVDIESYQFLDIVKERSNNDEQEIDKAFNALQHLARDHARIPICWSDSKHGGFSEAAEKAGLPIKKPWMQAHPLSQEVNVASQLDDPQSVLSFWKKAISFRKEFPDLTVYGDYKVIRQDDPDIYAFVKESLADGSKVAVVLNFTTENKAWSAPTSEELGVHSGKDIKLVPIMSTHSGKEKTAVLSPFEGRVYLVT

SEQ ID NO: 1745 - DNA, 1773 bp, Kluyveromyces lactis NRRL Y-1140
  CDS (1)..(1773)
atgacgattaccaagtttgtatccgagcacccccaaacagacccaaagtggtggaaagaagcaattgtttaccaggtttaccctgctagtttcaaagactctaaccatgatggatggggtgatatcaaaggtattgattcgaagctggagtacattaaagaacttggagctaacgcgatttggatctgcccattctatgattctccacaagaggatatgggttatgatatttcagattacgaaaaggtttggccacgctacggtacgaatgaagatatcttcaatttgatcgacagagcacacggtttgggaatcaaaatcattgtggatcttgttatcaatcactgctcttctgaacacgcttggttcaaagaagctcggtcgagcttggataaccccaaacgtgattggtttatctggaaagcaccaaagggattcgactccaatggcaaaccaattcctcccaataactggagatctttctttggtggttctgcctgggagtacgatgaacataccggccaattctacctgcgtttatttgcgaaaggtcaaccagatttcaattgggagaatgaagtgactcgtaatgccatttacgaaagtgctgtaggattctggttagaccatggtgtcgatggtttcagaatcgatacagctggtctatactccaagcaaccagggttccctgatgtgccaataatcaaccctggtttggacttccagcatcctgacccagctattttgaatggtccaaggattcatgaattccacaaggagatgaacaaatttatgagagagcgtgttaaagatggcagagagttgttaacggtgggtgagattccttgtgggactcatgacgtgtgcaaggcgtacaccagtgcaaaagagcaagaaattactcaactattcgaatttgagcacgtgtctgtgggtaggaagccgggaaatgttggtgtagttaactttaaactgtcagaattcaaggatggtattgcggcagcattccagttcattgataagacagactcttggtccactgtctacattgaaaaccatgaccagccacgttctgtgacaagattcggggatgacagcccagagtaccgagaaatatcagcaaaattgctggctctgttggaaacaagtttgacaggcactctgtacgtataccaaggccaggaattaggtatgattaacttcagagactggccaattgagaaatatgaagatgtcgaagtgaaaggtatgtacaagatgatggttgatcaattcggtgcggactctgatcaagtcaaagattacgttaatggtttgcagttgatttctagagaccatgcgaggactccattcccatggacatccgaggctccatatgctggattcacagacggcaaggaaccatggttccctttaactgagactttccaagaaggtatcaacgccgaagatgagctgaaagacccaaagtctgttttcaatttttggaagacggctattgaagtcagaaagacacacaaggatgtattgaattatggatatgacttcacctttgttgaccatgctaacgagaaactctttgctttcactaagaagtacggagagaaggtattgtatgtggtgttgaacttcagcaaagaagagattgagttcagcttcttggaaggttacaactcttatgactacattttcggtaattatccagaggccgaaatcgacactggatctaacaagttacagccatgggaaggtagattttactatgccaattga

SEQ ID NO: 1746 - protein, 590 aa, Kluyveromyces lactis NRRL Y-1140
MTITKFVSEHPQTDPKWWKEAIVYQVYPASFKDSNHDGWGDIKGIDSKLEYIKELGANAIWICPFYDSPQEDMGYDISDYEKVWPRYGTNEDIFNLIDRAHGLGIKIIVDLVINHCSSEHAWFKEARSSLDNPKRDWFIWKAPKGFDSNGKPIPPNNWRSFFGGSAWEYDEHTGQFYLRLFAKGQPDFNWENEVTRNAIYESAVGFWLDHGVDGFRIDTAGLYSKQPGFPDVPIINPGLDFQHPDPAILNGPRIHEFHKEMNKFMRERVKDGRELLTVGEIPCGTHDVCKAYTSAKEQEITQLFEFEHVSVGRKPGNVGVVNFKLSEFKDGIAAAFQFIDKTDSWSTVYIENHDQPRSVTRFGDDSPEYREISAKLLALLETSLTGTLYVYQGQELGMINFRDWPIEKYEDVEVKGMYKMMVDQFGADSDQVKDYVNGLQLISRDHARTPFPWTSEAPYAGFTDGKEPWFPLTETFQEGINAEDELKDPKSVFNFWKTAIEVRKTHKDVLNYGYDFTFVDHANEKLFAFTKKYGEKVLYVVLNFSKEEIEFSFLEGYNSYDYIFGNYPEAEIDTGSNKLQPWEGRFYYAN

SEQ ID NO: 1747 - DNA, 1707 bp, Debaryomyces hansenii CBS767
  CDS (1)..(1707): transl_table=12
atgactaaagattacatttggtggaaagacgctagtgtttatcaaatctggcctgcttcgtataaagattcgaatggagatggtgtaggtgatattccaggtattatttccacattgaactatgttaaatcattaggaacggacgttatttggctttccccaatgtatgactctccacaggatgacatgggttacgatatttccaactatgaaaaggtctatccaaaatacggaacattagaagatatggataacttaattgagggaacccacaaaagaggtatgaagttgattttagatttagttattaaccatacttcaaccgaacatgactggtttaagcaatcgagatcgtctaaaaccgacccaaaaagagattggtatatctggaagccagcacgctatgatgctgaaggtaatagacatcctccaaataactgggtatctcacttttcgggatctgcttgggcttacgatgaaaccactgatgaatattacttacatctttttgctgaatcgcaaccagacttgaattgggagaatgaagaaacaagaaaggcgatctataagtctgctttgtcattctggtttgaaaaaggaatcgatggtttcagaattgatacagccggtatgtattcaaaagttcaatcattctctgatgccccaatcgttttcccagattcggaatggcaaccatgtcaaaagtatttccaaaatggacctagaattcacgaatttcacaaggagatgtttgcatctgtcacttctaaatacgatgctatgactgtcggagaagttggtcattcacctcgtgaagattctttgaaatatgtaagcgccaaagaaaaagagatgaatatgatgttcttattcgacgctgtggaagttggatcaaacccttctgatagatttatttatgatggatacaaattaactgatttcaaaaaggcagtacaaaatcaaagttcttttatcgaaggtactgatgcctggtctaccgtcttctatgaaaaccatgatcaaccaagatctattaccagatttggtaacgactctaataaatatagggttaaatcaggtaagcttttagctttattacagtctactttgagtggtactttatatatttatcaaggtcaagaaattggtatgactaatttaccaagatcgtggtctattgatgaatatcttgatattaatactatcaattattacaaggaattcaaagctaaatatggagacaacaaagaaaaaatggataaattgatggataacattaatttattggccagagatcatgccagatctcctgttcaatgggatgacactgaaaatgcaggtttctctacaggtaaaccatggatgagagttaacgataactataaggaaattaatgttgcatcgcaagtgaatgatccaaattccttattttccttctggaaacaaagtttaaagattagaaaggaatataaggatttgttgatctacggttctttcaaaattcttgataacgaaaaccagaaaatctttacttatgttaaggaagctgctggccagaaggcatatattgttttaaattttacttcagaaagtttaaagtttgaaaacttggacggaggtaaattagaattattgcactctaacgtcaatgtcgaagatgaaggtaccttgagtccttacgaaggtagattttatctcattaagtag

SEQ ID NO: 1748 - protein, 568 aa, Debaryomyces hansenii CBS767
MTKDYIWWKDASVYQIWPASYKDSNGDGVGDIPGIISTLNYVKSLGTDVIWLSPMYDSPQDDMGYDISNYEKVYPKYGTLEDMDNLIEGTHKRGMKLILDLVINHTSTEHDWFKQSRSSKTDPKRDWYIWKPARYDAEGNRHPPNNWVSHFSGSAWAYDETTDEYYLHLFAESQPDLNWENEETRKAIYKSALSFWFEKGIDGFRIDTAGMYSKVQSFSDAPIVFPDSEWQPCQKYFQNGPRIHEFHKEMFASVTSKYDAMTVGEVGHSPREDSLKYVSAKEKEMNMMFLFDAVEVGSNPSDRFIYDGYKLTDFKKAVQNQSSFIEGTDAWSTVFYENHDQPRSITRFGNDSNKYRVKSGKLLALLQSTLSGTLYIYQGQEIGMTNLPRSWSIDEYLDINTINYYKEFKAKYGDNKEKMDKLMDNINLLARDHARSPVQWDDTENAGFSTGKPWMRVNDNYKEINVASQVNDPNSLFSFWKQSLKIRKEYKDLLIYGSFKILDNENQKIFTYVKEAAGQKAYIVLNFTSESLKFENLDGGKLELLHSNVNVEDEGTLSPYEGRFYLIK

SEQ ID NO: 1749 - DNA, 1737 bp, Debaryomyces hansenii CBS767
  CDS (1)..(1737): transl_table=12
atgacagttattgaattgaataaagctttaaagccatcatggtggaaggaaaccaccgtctaccaagtctatccttcttccttccaagactctaatggtgatggaatcggtgatcttccaggtattacttcacgcttggactatatcaagtctctcggtgtggatgcaatttggttaagtccttgttttgactctccccaggttgatatgggctatgatatttcggattacaagaagatctatcctgcttatggtacaatggaagatgcagatgaacttatcaaaggcgtgcatgaacgtggattaaaaatcttgatggatcttgttgttaatcacacatcagatcagcatccatggttcaaaaaatcacgctctagtattgaaaactcataccgcgactggtatatctggcgtaaaccgagatatgattcagaaggtaacagacaacctccaaataattgggctgctgctttcggaggaagcgcatggaccttcgatgaaacaactcaagaatactatttgcatctttttgcagttgagcagccagacttgaattgggagaacgaaaatgtccgtgcagcagttcatgacattatgagattttggttggataaaggcgctgatggattccgtatggatgttatcaattttatttcaaaagaccaaagattcccggatgctgaggttaagcatccaaatgctaaatatcaggatggttctccctattttgcttgtggaccgagactacatgaatacttacaaggaattgggcaaatccttatcgaatacgacgctttcagtgttggcgaaatgcctgcttgtaatgaccctgaagaaattattaaggcagttaatatcgaccgtcacgaattgaatatgatcttcaactttgaattggtagatattgaccatgggaatgaaggcaagtttacagctggaagctggaagctcgctgatgcttataaaattatcaacaagtggcaaacatttatgcaagagaatggtggttggaatgctatttatttggaaaaccatgatcaaccacgttccgtttctcgttttgctgaagatagcccagaattcagaaagattagtgccaaaatggtcagtactttcttagcacttcaacaaggcacattatttgtttatcagggacaggaactagggctcaagaatgtcccagaaacatgggatatttccaactacagagatcttgaagtccttaaccattataatgaactaaaagaagatggcgcatctccagaaattcttaaggcagccatggctgaataccagaagaaatcaagagataatgcacgttatccagttcaatgggatacttcagctaatgccggctttagctcgtcaaccccatggatagatgtcaatgaggactacttggaatggaatgcagcagaagaagaaaaagatccggaatctgttttaaactattggagaagcattttaaaaattagaaaggaatggaaagatatcttgatatatggaaggtttgaaatggttacaagtattgaagacgaaaaggtcttggcatttaaacgtactactagcgataagagtgctattgtaatttgcaacttttctagcgatgctgttctgtggaccattcctgaggaatttgaaaatagcaaagttatattatctaactacgacagatcaaaggtttctggaccaagtgttgaattgaaaccctatgaagctttcactttacttaaataa

SEQ ID NO: 1750 - protein, 578 aa, Debaryomyces hansenii CBS767
MTVIELNKALKPSWWKETTVYQVYPSSFQDSNGDGIGDLPGITSRLDYIKSLGVDAIWLSPCFDSPQVDMGYDISDYKKIYPAYGTMEDADELIKGVHERGLKILMDLVVNHTSDQHPWFKKSRSSIENSYRDWYIWRKPRYDSEGNRQPPNNWAAAFGGSAWTFDETTQEYYLHLFAVEQPDLNWENENVRAAVHDIMRFWLDKGADGFRMDVINFISKDQRFPDAEVKHPNAKYQDGSPYFACGPRLHEYLQGIGQILIEYDAFSVGEMPACNDPEEIIKAVNIDRHELNMIFNFELVDIDHGNEGKFTAGSWKLADAYKIINKWQTFMQENGGWNAIYLENHDQPRSVSRFAEDSPEFRKISAKMVSTFLALQQGTLFVYQGQELGLKNVPETWDISNYRDLEVLNHYNELKEDGASPEILKAAMAEYQKKSRDNARYPVQWDTSANAGFSSSTPWIDVNEDYLEWNAAEEEKDPESVLNYWRSILKIRKEWKDILIYGRFEMVTSIEDEKVLAFKRTTSDKSAIVICNFSSDAVLWTIPEEFENSKVILSNYDRSKVSGPSVELKPYEAFTLLK

SEQ ID NO: 1751 - DNA, 1776 bp, Aspergillus nidulans FGSC A4
  CDS (1)..(1776)
atgagctacgcgcacgtcaaaccccccagcgagatccaccgggcctggtggaaagaaagctctgtgtaccagatctggccggcatcgttcaaggactctaatgatgacggtattggcgacattcctggcatcatctcgaagctcgactacattcgtgaccttggtgtcgatattgtctggctctgtccgtcttacaagtctccccaggtagacatgggatacgacattgcggactactacagtattgcagacgaatatggtacggtcgcagatgtcgaaaagctgatcaagggctgccacgacaggggcatgaagctccttatggacttggtcgtgaaccacaccagtgataagcatgaatggttcaagaaatcacgcagctcaaaggataacgagtttcgcgattggtatgtctggaagccgccccgctacgacgagaatgggaatcgtcaacctccaaacaactgggtatcgcacttccaaggaagcgcctgggaattcgatgaggcgacaggagagtattatcttcatctatacgccgtcgaacaacctgacttaaactgggagaaccccgccgtgagaaaggcagtgcatgatatcgtgcgtttctggctcgacaaaggagctgatggcttccgcatggacgtcatcaactttatcagtaaggatcaggcgttccccgacgcaccggaacaggacaaggatgccgtatggcagtggggtgacaagtactacgcaaacggtcctcggctccatgagtatctgcagggtattgggaagatacttaaggaatacgacacctttagcgtcggggaaatgccttttgtaaaggataccaatgaagtgctgaaagcggttcgctacgaccgcaacgaaatcaacatgatcttcaattttgagcacgtcgacattgaccatggcccctggggcaacaaattcaagcctggcggctggaaactcactgatctcaaggcctttttcgagcgctggcaagttttcatgtacgacaacggcggctggaacgctttgtattgggaaaaccacgaccaaccccgatcgattgaccgctatgtcaacccccctcaggctctccgaccagcggccggaaagatgttggctaccatactagccttgcacgcgggctctccgttcatttaccagggccaggagataggaatgggaaatgttcctattgaatggggaatggaagaatacaaagacatcgactgtctgaaccattggaaagggttgctggaaaccagaccaacggacaccgaggtacagaaaattgccagacaggaataccggaagaaatcccgagacaacgctcgcactccagtgcagtggtcctcagaacccaatgccggattcaccgggccgaacgttaagccttggatgtctgtcaatccagagtacactcgagttaatgcagcggaccaagtcaaggaccccaactctttgtaccattactgggcatcagtcctgcacctcaggaaaacctacctcgatatctttgtctatggaaattacgagcttgtggatcgtgatagtcaggaggtttacgcctacacccgggcatgccacacctccaaggctctggtattggcgaactggactgaccgtggattgacgtggaacgcggcagcacacaaggctgatcagttcgagcaagtgctgctagacacttatgagtccgcaaacgcagcgcagggaaggttttcaggtggtcaatggacgcttcgaccatatgaagcggttgtgatcttgctaaaatag

SEQ ID NO: 1752 - protein, 591 aa, Aspergillus nidulans FGSC A4
MSYAHVKPPSEIHRAWWKESSVYQIWPASFKDSNDDGIGDIPGIISKLDYIRDLGVDIVWLCPSYKSPQVDMGYDIADYYSIADEYGTVADVEKLIKGCHDRGMKLLMDLVVNHTSDKHEWFKKSRSSKDNEFRDWYVWKPPRYDENGNRQPPNNWVSHFQGSAWEFDEATGEYYLHLYAVEQPDLNWENPAVRKAVHDIVRFWLDKGADGFRMDVINFISKDQAFPDAPEQDKDAVWQWGDKYYANGPRLHEYLQGIGKILKEYDTFSVGEMPFVKDTNEVLKAVRYDRNEINMIFNFEHVDIDHGPWGNKFKPGGWKLTDLKAFFERWQVFMYDNGGWNALYWENHDQPRSIDRYVNPPQALRPAAGKMLATILALHAGSPFIYQGQEIGMGNVPIEWGMEEYKDIDCLNHWKGLLETRPTDTEVQKIARQEYRKKSRDNARTPVQWSSEPNAGFTGPNVKPWMSVNPEYTRVNAADQVKDPNSLYHYWASVLHLRKTYLDIFVYGNYELVDRDSQEVYAYTRACHTSKALVLANWTDRGLTWNAAAHKADQFEQVLLDTYESANAAQGRFSGGQWTLRPYEAVVILLK

SEQ ID NO: 1753 - DNA, 1713 bp, Candida albicans SC5314
  CDS (1)..(1713): transl_table=12
atgagtgaacacaagtggtggaaagaagctgttgtttatcaaatttggccggcatcatacaaggattccaatggtgatggtgttggtgatattccaggaattatttcgacgttagactatattgcgagtttgggagtgacaaccgtatggttgagtcctatgtatgactcgccccaagatgacatggggtacgatgtttctgattacgaaaatgtctacagcaaatacgggaccttgcaggatatggacagattaattgctggttgtcatgacagagggttgaagttgatacttgacttggttatcaaccacacttcggttgagcacaagtggtttaaagagtcgagactgtcgaaggacaacccgaaaagagactggtacatttggaaaccacctagaatcgatagcaatggtaacaaacacccgccaaataattgggggtcatatttttctgggtcggcatggaagtatgatgagttgactggtgagtactacttgcacttgtttgctgaatcacaacctgatttgaattgggaaaacaaggagtgcagagaagctatttataactcggccatcaagttctggttggacaagggtgttgatgggtttagaattgacactgcaggaatgtactccaagtaccagcatttcaaagatgtgcctgttgcttttcctgatactgaattccagccttgtgaaatctaccacaagaatggtccaagaattcatgagttccacaaggagatggccaaggtaatggagccatacgatacgatgactgttggagaggttggccattcgactagagagcaggcgttaaagtatgttagtgctgctgaaaaagaaatgaatatgatgtttttatttgacgttgttgagttgggctcggacccacgtgacagattccgttacaatgggtttgacttggttgatttaaagaaggctatcaaatcacaaggtgagtttgctgagggaaccgatgcttggtctactgtatttattgaaaaccatgatcaggcaagagccattagcagatttggtaatgactcgccagagtttagggtgttgtcaggtaaggctattgccatgttgcagtgttgtctcactgggactttgtttatttatcagggtcaggagattggtatgaccaatgtgccaagatcatggccaattgaggagtacaaggatatcaacaccatcaattattaccgtgcctttaaggaaaagtatggcaaagatgctgattataaacagaaggaagaaaagttggttgatgttattaaccgtttggctagagataatgctagaacgccggttcagtggagccaccaacaatatgctgggttttcagaggttgagccgtggatgagagtgaatgacaactataaggagattaatgttgaggaccaggacggtgacgaccattcattgcttaacttttatagaaagttgttgaagttgaggggagagtacaaggatctttttgtttatggggagatgaagtttttagattttgatgacaagaagcttttcacgtttgccaaggaagcgcctggctctcctgttgcatacattgtgatcaactttagtggtgaggatgtcaagtttgagccgttgattaagggtaattacaagttggtacttacaaatgtcgacaaagacagtaaagacgctttgtctccatacgaggctagaatgtatgtagttgattaa

SEQ ID NO: 1754 - protein, 570 aa, Candida albicans SC5314
MSEHKWWKEAVVYQIWPASYKDSNGDGVGDIPGIISTLDYIASLGVTTVWLSPMYDSPQDDMGYDVSDYENVYSKYGTLQDMDRLIAGCHDRGLKLILDLVINHTSVEHKWFKESRSSKDNPKRDWYIWKPPRIDSNGNKHPPNNWGSYFSGSAWKYDELTGEYYLHLFAESQPDLNWENKECREAIYNSAIKFWLDKGVDGFRIDTAGMYSKYQHFKDVPVAFPDTEFQPCEIYHKNGPRIHEFHKEMAKVMEPYDTMTVGEVGHSTREQALKYVSAAEKEMNMMFLFDVVELGSDPRDRFRYNGFDLVDLKKAIKSQGEFAEGTDAWSTVFIENHDQARAISRFGNDSPEFRVLSGKAIAMLQCCLTGTLFIYQGQEIGMTNVPRSWPIEEYKDINTINYYRAFKEKYGKDADYKQKEEKLVDVINRLARDNARTPVQWSHQQYAGFSEVEPWMRVNDNYKEINVEDQDGDDHSLLNFYRKLLKLRGEYKDLFVYGEMKFLDFDDKKLFTFAKEAPGSPVAYIVINFSGEDVKFEPLIKGNYKLVLTNVDKDSKDALSPYEARMYVVD

SEQ ID NO: 1755 - DNA, 1749 bp, Candida albicans SC5314
  CDS (1)..(1749): transl_table=12
atgacaattgaatatacttggtggaaagacgctactatttatcaaatttggcctgcttcatataaagattccaatggtgatggaattggtgatattccagggataatttctacattagattatcttaaaaatttaggaattgatattatttggttaagtccaatgtataaatcccctatggaagatatgggttatgatattagtgattatgaatctataaatcctgattttggtactatggaagacatgcaaaatttaattgatggatgtcatgaaagaggaatgaaaattatttgtgatttagtagttaatcatacatcatctgaacatgaatggtttaaacaatcaagatcactgaaatcaaaccctaaaagagattggtatatttggaaaccaccgagaattgacgcaaaaactggtgaaaaattaccaccaaataattgggggtcatttttttcaggatcagcatgggaatatgatgaattaaccgatgaatattatttaagattatttgccaagggacaacctgatttaaattgggaaaatgaagaatgtcgtcaagcaatttataattctgccatgaaatcatggtttgataaaggtgttgatggatttagaattgatgttgctggattatattctaaagatcaatcatttaaagatgcccccattgtattcccagatcaaatttatcaaccgtcaggtgaattaatttctaatggaccaagaattcatgaatttcatcaagaaatgtatcgtcaagtgacttcgaaatatgatgttatgacagttggagaaattggtcattgtgatagaaatgaggcattaaaatatgttagtgctcaaagaaaagaattaaatatgatgtttttatttgatttagttgaagttggatcaaataatcaagatagatttagatataatggatggaatttaattgatttcaaaaaggcaattcaaaatcaaagtgattttataaagggaacagatgcttggtcgactgttttcattgaaaatcatgatcaaccaagatgtatttctcgatttggaaatactaaatcattagatttaattaataaaactgggaaattattggccatgttacaagctagtttaaccgggacattatttatttatcaaggtcaagaaattggtatgactaatttaccaagatcttggtcaattgatgaatataaagatataaacaccattaattattataaagatttcaaagaaaaatatggtaatgaacctgattttaaacaacgtgaagaaaaattattagatgtgattaatttagtagctagagatcatgctcgttcaccagttcaatggaatgatgatgatactgcatcttatggtggattctctacgcataaaccatggacaagaattaatgataattataaacaaattaatgttgctaatgaattaaaagatccaaattcaatcttgaaattttatcaactggtattgaaattaaggaaagaatataaagatttatttatttatggatcatttgatattttagatttcaataatgaaaaattattcacttatgttaaaagccataaagaaggtaatgaatcaccaaaagcttatgtgacccttaatttttcaaatgaactgattccatttaaaccattgattgaaggtgaatttaaattgatgactactaatgttcaacaatctgattatgatgaatcagttttatctccatatgaaggtagaatttatatcgtcgattag

SEQ ID NO: 1756 - protein, 582 aa, Candida albicans SC5314
MTIEYTWWKDATIYQIWPASYKDSNGDGIGDIPGIISTLDYLKNLGIDIIWLSPMYKSPMEDMGYDISDYESINPDFGTMEDMQNLIDGCHERGMKIICDLVVNHTSSEHEWFKQSRSSKSNPKRDWYIWKPPRIDAKTGEKLPPNNWGSFFSGSAWEYDELTDEYYLRLFAKGQPDLNWENEECRQAIYNSAMKSWFDKGVDGFRIDVAGLYSKDQSFKDAPIVFPDQIYQPSGELISNGPRIHEFHQEMYRQVTSKYDVMTVGEIGHCDRNEALKYVSAQRKELNMMFLFDLVEVGSNNQDRFRYNGWNLIDFKKAIQNQSDFIKGTDAWSTVFIENHDQPRCISRFGNTKSLDLINKTGKLLAMLQASLTGTLFIYQGQEIGMTNLPRSWSIDEYKDINTINYYKDFKEKYGNEPDFKQREEKLLDVINLVARDHARSPVQWNDDDTASYGGFSTHKPWTRINDNYKQINVANELKDPNSILKFYQSVLKLRKEYKDLFIYGSFDILDFNNEKLFTYVKSHKEGNESPKAYVTLNFSNESIPFKPLIEGEFKLMTTNVQQSDYDESVLSPYEGRIYIVD

SEQ ID NO: 1757 - DNA, 1770 bp, Ustilago maydis 521
  CDS (1)..(1770)
atggccactctacctgcgatggacaagcgcaccttttggtttcgcgatgccatcgtctaccaaatctggcctgcttcttacaaggacagcaacaatgatggtatcggcgatattcagggtatcatctcgacgctcgactacgtcgaatcgctaggagtcaacacgatctggctctcaccgatgtacgagtctccccaagtcgacatgggctacgatatctcagactaccagaacgtttacgctccctatggtacgctgcaggacatggacgagctgatccgtgaatgccatgcgcgcgagatcaagctcatcctagacctcgtcatcaatcacacctctgatcagcatgcatggtttcaggagtccaagaagagcaaggtcagtcctaagagggactggtatatctggcgacctgccaagtacgatgccaggacgggcgagcgaaggcctccgaacaattggagaggtgccctcaatcaatctgcttggacgtgggatgaagcaacgcaggaatattacctgcaccttttcacaccgcaacagcccgatctcaattggagtaacgtggaatgtcgacgcacgctgtacagcgacacaatcgagttctggcttaaaagaggcatcaatggtttcagagtcgacacggtgaacctgtacagcaagccgatggattttcccgacgcacccatcacagatcctaatgctgagtggcagatgggtgacacagtcttctgcaacggtcccaggatgcacgaatatctgcaagaaatgggtgtcatcttcgctaaatacgatgccatgacggtgggcgagctaccgagcacgccaaagatcgaggacgtgcttcggtacatctcggcagaacgcaacgaactgagccaagttttccagttcgatatctctaccctgggaagagacgagaacgatttttatgcgacgcatccgttctcgctccaggagctcaaggaggtggtggaaaagtggcaacgatacgttgagggtacagacgcatggccaaccgtgttcttggagaaccacgatctgcccagagccatcagcaaatacgcttcagaccgaccagagtttatcgcggcgagtggaaagatgctcgcactgatggagatcggtctcaccggaacgctttacatctaccaaggacaagagatcggaatgacaaacgtgccaaaggcttgggctcacgaagagtacaaggatgtaattgccgtcaactattaccgagatgcagtgacacgctcgggaggagatgagaaggtgctgaaaaagacactcgaagatatcaataagcaaggcagggacagcgcacgcacaccagtccagtggagctcagagccaaatggcggattcagcactgatccgaacactgtaccttggatgagaaccaacgacaactacacgagcatcaacgtagctgctcaggagaaagacgaccagtcggtgctagcattttatcgcaaaggactagcactcaggaaggaatatgcctgcttgcttgcgagaggagagtttaggctgttggacagggagaaccagcaggtgttgaaatacctcaagattccagaaggtggtcaagaagacgataacggccaaagggtctttgttgtgctcaatttctccaactgcccgcaggaatatacggtgccagaagaggctgggggaaacaaggcatcgatgcttgttgagactctcgagaagggtgagccaggcaagttgaggccgtgggagggaagaatgtacctctaccgaccctga

SEQ ID NO: 1758 - protein, 589 aa, Ustilago maydis 521
MATLPAMDKRTFWFRDAIVYQIWPASYKDSNNDGIGDIQGIISTLDYVESLGVNTIWLSPMYESPQVDMGYDISDYQNVYAPYGTLQDMDELIRECHAREIKLILDLVINHTSDQHAWFQESKKSKVSPKRDWYIWRPAKYDARTGERRPPNNWRGALNQSAWTWDEATQEYYLHLFTPQQPDLNWSNVECRRTLYSDTIEFWLKRGINGFRVDTVNLYSKPMDFPDAPITDPNAEWQMGDTVFCNGPRMHEYLQEMGVIFAKYDAMTVGELPSTPKIEDVLRYISAERNELSQVFQFDISTLGRDENDFYATHPFSLQELKEVVEKWQRYVEGTDAWPTVFLENHDLPRAISKYASDRPEFIAASGKMLALMEIGLTGTLYIYQGQEIGMTNVPKAWAHEEYKDVIAVNYYRDAVTRSGGDEKVLKKTLEDINKQGRDSARTPVQWSSEPNGGFSTDPNTVPWMRTNDNYTSINVAAQEKDDQSVLAFYRKGLALRKEYACLLARGEFRLLDRENQQVLKYLKIPEGGQEDDNGQRVFVVLNFSNCPQEYTVPEEAGGNKASMLVETLEKGEPGKLRPWEGRMYLYRP

SEQ ID NO: 1759 - DNA, 1668 bp, Clostridium difficile 630
  CDS (1)..(1668): transl_table=11
atgaaaaattggtggaaaaaagcaactgtctatcaaatatatccaaaaagtttcaaagatagcaacaatgatggtataggtgatataaatggtattatagaaaaattagattatctgtattctttaggtgttgatttattatggttgactcctatgtacgtttctcctcaaagagataatggatatgatatagaagattattataatatagacccaaaatatgggacaatgagtgactttgaaaaactcttaaaagaagctcataaaagagacataaaaataatgatggatatggtcctaaaccatacatctactgaacacaaatggtttaaagaatctaaaaaaagcaaagacaatccatatcgtgattattatttctggaaagatgctaaacctgatggttctgttcctaataactggatatccagatttagtggaactgcttggaaatatgatgaaaccactaaccaatattatttacatttatttgaagaaactcaagctgatttaaattgggaaaatgaaaaggttcgtgaagaatgttacaaaatactagaattttgggctgataaaggtattgatggttttcgtttagatgtagtcaacctactctccaaaacacctggattacctgatgaccctataacaggaccaaaaggagatggaagaactcactacgctgatggtcctcgtatacacgaatatttacataatatgaatcaaaaagttttcaaacctaaaaatatagttactgtaggtgaaatgtcatctactacacctgaagagtgtatcaactatactagagaaaatcgagaagaactatctatggtttttagcttccatcatatgaaaacagattataaaggaggcgcaaaatggactaatgaaatgttctctctggataaattaaaaaaagcacaatctgactttcaatataaaatgtatgaaggaaaaggatggaatgctctattttactctaatcacgaccaacctagagctttatctcgatttggagatgatagattttttcgtcaagaaagtgctaagatgttagccataacattatttggtctacagggtactacatacatatatcaaggtgaagaaataggtatgacaaatgcctactttactaaaatagatgaatatgatgatgctgaaagcaagaatgcatactatcatatgattaaatctggtattgatgaaaaggaggcattgcttatacttcaacaaaaatccagagataatgcccgtactcctatgcaatgggataatactatttataaggggttttctaatcataaaccgtggttaaaagttaataatgacaatattagtgtagaaaatgagcttaatgattctcgttcagtattttatacttatcaaagattaatcaaatatcgtaaacaatatgatatttttacagaaggtacttatagattgttagatgaaaatcataaaaatctatttgtttatgaaagagagtataaaaaccaaaatcttcttgttataagtaattttactcatgataatgtagtatataaattacctgaaacttatttgaataaattaaactacacaatacttgaaaccaattacactagagatataattgaaaataaaatggaaataaaaccttacgaaagtataatgatatattataaataa

SEQ ID NO: 1760 - protein, 555 aa, Clostridium difficile 630
MKNWWKKATVYQIYPKSFKDSNNDGIGDINGIIEKLDYLYSLGVDLLWLTPMYVSPQRDNGYDIEDYYNIDPKYGTMSDFEKLLKEAHKRDIKIMMDMVLNHTSTEHKWFKESKKSKDNPYRDYYFWKDAKPDGSVPNNWISRFSGTAWKYDETTNQYYLHLFEETQADLNWENEKVREECYKILEFWADKGIDGFRLDVVNLLSKTPGLPDDPITGPKGDGRTHYADGPRIHEYLHNMNQKVFKPKNIVTVGEMSSTTPEECINYTRENREELSMVFSFHHMKTDYKGGAKWTNEMFSLDKLKKAQSDFQYKMYEGKGWNALFYSNHDQPRALSRFGDDRFFRQESAKMLAITLFGLQGTTYIYQGEEIGMTNAYFTKIDEYDDAESKNAYYHMIKSGIDEKEALLILQQKSRDNARTPMQWDNTIYKGFSNHKPWLKVNNDNISVENELNDSRSVFYTYQRLIKYRKQYDIFTEGTYRLLDENHKNLFVYEREYKNQNLLVISNFTHDNVVYKLPETYLNKLNYTILETNYTRDIIENKMEIKPYESIMIYYK

SEQ ID NO: 1761 - DNA, 1674 bp, Exiguobacterium sibiricum 255-15
  CDS (1)..(1674): transl_table=11
atggaacgtaaatggtggcacgacagtgtagtctatcaaatttatccgcggagtttcaatgattcaaacggagacggaatcggggatctcgtcggtatcattgaaaaactggattacttaaaagaacttggaattgatgttatttggctgagtccggtctatgactcaccaaatgatgataacggatatgatattcgggattatgaagccatcatgagcgaattcggaacgatggcggactttgatcgtctgctcgatcaggcgcatgagcggggaatcaaaatcgtaatggatttggtcatcaaccattcgtcggacgagcacgcctggtttgcagagtcacgaaagagtaaggacaatccataccgggactattacatttggagaagcgccaatgaagacgggacgctcccgaacaactggggctcgattttttccggaccggcttgggaactggatgaggcgacaaacgaatattacttgcacctgttttctaaaaagcaacctgatctgaactgggaaaacgaaaaactgcgtcaagaagtctatcagatgattacgcgctggttggatcgcgggattgacggtttccggatggacgtcatcaacttaatctcgaagacacccggtcttccggatgcgacggttcctcccggtgctctatacggggacggcggacaacattatattaacggaccaagaatccatgagtttttaaaagaaatgaatgatgcttcttttggtaattatgatgtcttgacggttggtgaaatgccgggggcgacaactgacgacgccattctttatacagatccagaacgcaaagaagtcaacatggtgtttacgttcgaacatatggacttggattccggtccgggtgggaaatgggatgtaaaaccatttgaccttcagaaactgaaagaaaacttcacgaaatggcaagtcgccttacacgaaaaagggtggaactcgctgtactggaataatcacgaccagccacgcgttgtcagccgattcggaaatgatacgacgtatcgcgtcgaatccgctaaaatgttagcgactctgctccacttgttaaaaggaactccctacatttatcaaggggaagaaatcggcatgacgaacgtggcctttgaatcgattgaggactatgaggatatcgaaatccgtaatatgtggaaagaacggaccgagcaaggggcttcaccggcagagttattgcgtgctgtccatgtgaagggacgggacaatgcccggacaccaattcaatgggatgcgacggagcatgccggatttacgacgggtacaccctggttaaaagttaatccgaactatccgaccatcaatgtcgaacaggccttggaggatccggattccatcttctattactataaacagctgattgcgttacgtcatcagcacgatgtaatcgtatacggtgaatatgccttgattttagaagaggaaacggacatctatgcgtacacaagaacatatgaaaatgaaacatggtacatttactgctccttcagtcaggaagaagtaacggttccgctgtctcacgatacttctgatccggtcatcggaaattacagtgaatcaccggcaggatcaaaagaagaattggttcttcgaccgtatgaagcaatcgtctaccggacgacgcggtaa

SEQ ID NO: 1762 - protein, 557 aa, Exiguobacterium sibiricum 255-15
MERKWWHDSVVYQIYPRSFNDSNGDGIGDLVGIIEKLDYLKELGIDVIWLSPVYDSPNDDNGYDIRDYEAIMSEFGTMADFDRLLDQAHERGIKIVMDLVINHSSDEHAWFAESRKSKDNPYRDYYIWRSANEDGTLPNNWGSIFSGPAWELDEATNEYYLHLFSKKQPDLNWENEKLRQEVYQMITRWLDRGIDGFRMDVINLISKTPGLPDATVPPGALYGDGGQHYINGPRIHEFLKEMNDASFGNYDVLTVGEMPGATTDDAILYTDPERKEVNMVFTFEHMDLDSGPGGKWDVKPFDLQKLKENFTKWQVALHEKGWNSLYWNNHDQPRVVSRFGNDTTYRVESAKMLATLLHLLKGTPYIYQGEEIGMTNVAFESIEDYEDIEIRNMWKERTEQGASPAELLRAVHVKGRDNARTPIQWDATEHAGFTTGTPWLKVNPNYPTINVEQALEDPDSIFYYYKQLIALRHQHDVIVYGEYALILEEETDIYAYTRTYENETWYIYCSFSQEEVTVPLSHDTSDPVIGNYSESPAGSKEELVLRPYEAIVYRTTR

SEQ ID NO: 1763 - DNA, 1821 bp, Bifidobacterium longum DJO10A
  CDS (1)..(1821): transl_table=11
atgactactttcaaccgcgcaataatccccgacgccatccgcaccaacggcgccacccccaatccgtggtggtccaacgcggtggtctatcagatttacccgcgctctttccaagacacgaacggcgatggattcggcgatcttaagggcatcacgtcgcgtcttgattacttagctgatcttggcgtggatgtgctgtggctatccccggtctataagtctccgcaagacgacaacggctatgacatttccgactatcaggacattgatcctctgttcggcacgctcgacgatatggacgagctgctggccgaggcccacaagcgtgggctcaagatcgtgatggatcttgttgtcaatcacacttccgatgaacacgcctggtttgaagcatccaagaacaaagacgacgaacacgccgactggtattggtggcgtccggctcgtcccggcaccacgcccggcgagcccggcgccgagcccaatcagtggggctcctactttggcggctccgcatgggaatactgccccgagcgtggcgaatacttcctgcatcagttctcgaagaagcagccggacctcaactgggagaaccctgccgtgcgccgcgctgtgtacgacatgatgaactggtggcttgaccgaggcgtcgacggcttccgcatggacgtcatcaccctgatctccaagcgcaccgattcgaacggcaagctgccgggcgagtacggctcggagcttgaggatcttcctgtgggcgaggagggctattccaacccgaatccgttctgtgcggacggcccccgtcaggatgaattcctggctgaaatgcgacgtgaggtattcgaggggcgtgaaggcttcctgactgtgggcgaggcgccaggcgtcacggctcagcgtaacgagcacattactgatccgggcaacggtgaattggacatgctcttcctgttcgagcatgttgattttgattgcgaaggtaccaagtggaagccgctgccgcttgacctgccgaaattcaagagcattatggccggttaccagactgccgtgcagaacgcaggatgggccagcttgttcaccggcaatcatgatcagccgcgcgtggtctcccgctggggcgacgactccgcggaggaatcccgcgtccgttcggccaaggcacttggcctgatgctgcacatgcaccgcggcaccccgtacatctatcagggtgaggaactgggcatgaccgacgcccacttcacgcgtctcgaccagtaccgtgaccttgaatccttgaatgcctaccggcagagggtcgaggaggccaaggtgcagtcgtctgagtcaatgatggccggtctggccgcgcgcagccgtgacaacgcgcgtactccgatgcaatgggacggttccggctacgccggtttcaccgctccggacgccgccactgagccatggatttccgtgaatccgaatcatgccgagatcaacgccgccggtgaattcgatgatccggattcggtgtactccttctacaagcaactcgttgcgctgcgtcacaacagcccggtcgtggccgccggcgactggcgactgattgacgccgctgatccgcacgtctatgcctttacccgtgagctcgacgctgagaagttgttggtcgtagtcaatatgtccagtcgaaccgttgacctgccacgtgaggctgccgaactaaccgccgtcggaatcgccgagccgaatgtggtgatcagcacgtatgacgctccgcacaccgtggcctcccttgccaaccgcgagctcgacccgtgggaggcagccgtcatccagttgtag

SEQ ID NO: 1764 - protein, 606 aa, Bifidobacterium longum DJO10A
MTTFNRAIIPDAIRTNGATPNPWWSNAVVYQIYPRSFQDTNGDGFGDLKGITSRLDYLADLGVDVLWLSPVYKSPQDDNGYDISDYQDIDPLFGTLDDMDELLAEAHKRGLKIVMDLVVNHTSDEHAWFEASKNKDDEHADWYWWRPARPGTTPGEPGAEPNQWGSYFGGSAWEYCPERGEYFLHQFSKKQPDLNWENPAVRRAVYDMMNWWLDRGVDGFRMDVITLISKRTDSNGKLPGEYGSELEDLPVGEEGYSNPNPFCADGPRQDEFLAEMRREVFEGREGFLTVGEAPGVTAQRNEHITDPGNGELDMLFLFEHVDFDCEGTKWKPLPLDLPKFKSIMAGYQTAVQNAGWASLFTGNHDQPRVVSRWGDDSAEESRVRSAKALGLMLHMHRGTPYIYQGEELGMTDAHFTRLDQYRDLESLNAYRQRVEEAKVQSSESMMAGLAARSRDNARTPMQWDGSGYAGFTAPDAATEPWISVNPNHAEINAAGEFDDPDSVYSFYKQLVALRHNSPVVAAGDWRLIDAADPHVYAFTRELDAEKLLVVVNMSSRTVDLPREAAELTAVGIAEPNVVISTYDAPHTVASLANRELDPWEAAVIQL

SEQ ID NO: 1765 - DNA, 1662 bp, Listeria monocytogenes str. 4b F2365
  CDS (1)..(1662): transl_table=11
atgaaagaaaaagattggtggaaaaaaagcgtagtgtaccaaatctatccaaagagttttaatgattcaaatggtgatggagttggtgatattcaaggaattatcgagaaattagattatttaaaagagctaggtgtggacgttatctggttgtccccagtatacgattcgcctcaagatgacaatggttacgatattcgcgattatcaaaaaatttacgaagagtatggagatatggcgacttttgatcaattacttcaaggtttacacgaccgcgaaatgaaacttgtaatggatcttgttgttaaccatacttctgatgaacacaagtggtttgaggaatccagaaaatccaaagacaacccgtacagagattactatttctggcgcgaggaaaacgaaatcaataactggggctcgattttcagcggtccagcatgggaattggacgaaaaaacaggtgagtactatttacacctattctccaaaaaacaacctgatttaaactgggaaaaccctaaattacgccaagatgtatataatatgatgaaattctggctagataaaggcattgatggcttccgcatggatgtaattaattttatttccaaaaatactgatttcccagatggtccagtaccagatggtcaaatttatggcgatgctggcaatgatttttgtaatggaccgcggattcatgagttcttgcaagaaatgaaccaagaagttacttctaaatacgatgtgatgactgttggcgaaatgcctggtgctagtacaaccgacgcgcaaatttacacgaatccagcaaataatgaagtcgatatgatttttacatttgaacatatgaacttagattccgatggcgacaataaatgggatctaaaaccaatctacttaccagatttaaaagaaaatatgtctgaatggcaagtggcgcttcaagaaaacggttggaatagcttatattggaataatcatgaccaaccgcgtatcgtttctcgttttgggaatgacaatcgtttccgtgttcgttcagcgaaaatgcttgcaacttgtttgcatatgatgaaaggaacgccatatatttatcaaggtgaagaaattgggatgacgaatgttcattttgaaacgctagatgattaccgtgatatcgaaacgctaaacatgtacaaagaacgcaaagagcaagggcacagccacgaaagcatcatgcagtcgatttacacaaaaggccgtgacaatgcgagaacgccgtaccagtgggataatagcgagaatgctggcttcacaaccggaacgccttggcttaaagtcaacccgcgctatacagaaatcaacaacgaagaagcgctgaaaaacccagattccattttctactactaccaaaatcttattaagttacgaaaaacgactgaaatcatcacaactggtaattatcgtttgttattacctaaagatgaagcgattttcgcatatgaacgctacacagaaaatgaaaaattagtggttttatgtaatttcacagaagaagaacaagttatttctgatgaaaacattttgaacgaaatccaaaaaggttccgtgcttgtaaacaatgttcctaatattatagaaggaactttacgaccttacgaagcaatcgtttatcaaatcaagtaa

SEQ ID NO: 1766 - protein, 553 aa, Listeria monocytogenes str. 4b F2365
MKEKDWWKKSVVYQIYPKSFNDSNGDGVGDIQGIIEKLDYLKELGVDVIWLSPVYDSPQDDNGYDIRDYQKIYEEYGDMATFDQLLQGLHDREMKLVMDLVVNHTSDEHKWFEESRKSKDNPYRDYYFWREENEINNWGSIFSGPAWELDEKTGEYYLHLFSKKQPDLNWENPKLRQDVYNMMKFWLDKGIDGFRMDVINFISKNTDFPDGPVPDGQIYGDAGNDFCNGPRIHEFLQEMNQEVTSKYDVMTVGEMPGASTTDAQIYTNPANNEVDMIFTFEHMNLDSDGDNKWDLKPIYLPDLKENMSEWQVALQENGWNSLYWNNHDQPRIVSRFGNDNRFRVRSAKMLATCLHMMKGTPYIYQGEEIGMTNVHFETLDDYRDIETLNMYKERKEQGHSHESIMQSIYTKGRDNARTPYQWDNSENAGFTTGTPWLKVNPRYTEINNEEALKNPDSIFYYYQNLIKLRKTTEIITTGNYRLLLPKDEAIFAYERYTENEKLVVLCNFTEEEQVISDENILNEIQKGSVLVNNVPNIIEGTLRPYEAIVYQIK

SEQ ID NO: 1767 - DNA, 1677 bp, Bacillus anthracis str. Sterne
  CDS (1)..(1677): transl_table=11
atggaaaaacagtggtggaaagaaagtgtagtatatcaaatttatcctcgtagctttatggatagcaatggtgatggtatcggggatcttcgcggtattatttcaaagttagattacttaaaagaattagggattgatgtgatttggttatcgccagtttatgaatctccaaatgatgataatggttatgatataagtgattattgtaaaattatgaatgagttcggaacaatggaagattgggatgagctattacatgaaatgcatgaacgtaatatgaaactgatgatggacttagttgttaatcatacttctgatgaacataattggtttattgaatcacgtaaatcaaaagataataaatatagagattactatatatggcgtcctggaaaagaaggaaaagagccgaataactggggagcagcttttagtggatcagcatggcagtatgatgaaatgacagatgaatattatttacatctgttttctaaaaaacagccagatttaaattgggataatgaaaaggtaagacaagatgtttatggaatgatgaagttttggttagaaaaaggaattgatggcttccgcatggatgttattaattttatttctaaagaagagggattaccaactgttgaaacagaagaagaggggtatgtttcaggtcataagcattttatgaacggtccaaacattcataaatatttacatgaaatgaatgaagaagtattgtctcattatgatattatgacggttggtgaaatgcctggtgtaacgacagaagaagcgaaattgtatactggggaagaacgaaaagaactgcagatggtattccaatttgaacatatggatttagattcaggagaaggtgggaaatgggatgtaaaaccatgttcactccttactttaaaagagaatttaacgaagtggcaaaaagcgttagaacatacaggttggaatagtctgtattggaataaccatgatcagcctcgcgttgtatctcgttttggtaatgatggcatgtatcgcattgaatctgcgaaaatgttagcgacggtacttcatatgatgaaagggacaccgtatatttatcaaggagaagaaattggaatgacgaacgtccgatttgagtcgattgatgaatatcgagatattgaaacgttaaatatgtataaggaaaaagttatggagcgcggtgaagatatagagaaggtgatgcagtctatctatataaaaggccgagataatgctagaacaccgatgcagtgggatgatcaaaatcacgctggatttacaacaggtgaaccttggattacggtaaatcctaactataaagagattaatgtgaaacaagcgatccaaaataaagattcaattttttattactataaaaaattaattgagttacgcaaaaataatgaaatagttgtgtatggatcatatgatttaatattggagaataatccatctatctttgcatacgtaaggacatatggagttgaaaaacttcttgttattgcaaactttactgcggaagaatgtatatttgaattgcctgaggacattagttatagtgaagtagagttactcatacacaattacgacgtagagaatggaccgatagaaaacataccattacgtccgtatgaagcaatggtattcaaattgaaataa

SEQ ID NO: 1768 - protein, 558 aa, Bacillus anthracis str. Sterne
MEKQWWKESVVYQIYPRSFMDSNGDGIGDLRGIISKLDYLKELGIDVIWLSPVYESPNDDNGYDISDYCKIMNEFGTMEDWDELLHEMHERNMKLMMDLVVNHTSDEHNWFIESRKSKDNKYRDYYIWRPGKEGKEPNNWGAAFSGSAWQYDEMTDEYYLHLFSKKQPDLNWDNEKVRQDVYGMMKFWLEKGIDGFRMDVINFISKEEGLPTVETEEEGYVSGHKHFMNGPNIHKYLHEMNEEVLSHYDIMTVGEMPGVTTEEAKLYTGEERKELQMVFQFEHMDLDSGEGGKWDVKPCSLLTLKENLTKWQKALEHTGWNSLYWNNHDQPRVVSRFGNDGMYRIESAKMLATVLHMMKGTPYIYQGEEIGMTNVRFESIDEYRDIETLNMYKEKVMERGEDIEKVMQSIYIKGRDNARTPMQWDDQNHAGFTTGEPWITVNPNYKEINVKQAIQNKDSIFYYYKKLIELRKNNEIVVYGSYDLILENNPSIFAYVRTYGVEKLLVIANFTAEECIFELPEDISYSEVELLIHNYDVENGPIENIPLRPYEAMVFKLK

SEQ ID NO: 1769 - DNA, 1665 bp, Bacillus thuringiensis serovar konkukian str. 97-27
  CDS (1)..(1665): transl_table=11
atgaataagacatggtggaaagaagcggttgcttatcaaatttatccacgtagctttatggattcaaatggtgatggtattggagatttacaaggtattattgcaaaactggattatttaaaagatttaggaatagatgtaatttggatttgtccaatgtataagtcacctaatgatgataatggttatgacattagtgattatcaagatattatggatgagtttgggacgatggaagactttgatgctttactagatgaagttcataaacgtgatatgaagcttattattgatttagttattaatcatacaagtgatgaacatccatggtttattgagtctcgttcatctaaagacaatccgaagcgtgattggtatatttggcatgatggtaaagatggtgcagaaccaaacaactgggaaagtatttttaatggttcggcatgggagtatgatgaagtaacaggacaatattatttacacttattctcgcgtaaacaaccagatttaaactgggagaataaagaagttcgagaagtgctatacgatacagttaattggtggcttgataaaggaattgatggtttccgagtagatgcaatcagccatattaaaaaagaagatggctttaaagatatgccaaatccaaaaggactaaagtatgttccatcttttgataaacatatgaatgtggatggtattcaacctttattagaagaattaaaagaaaatacgttttctaagtacgatattatgactgttggtgaagcgaatggcgttaagattgaagatgctgagctttgggttggagaagagcaaggtaagttcaatatggtattccaattcgaacatttaagtttatgggatgcagaaaagaagaaagatcttgatgttgtagggctgaaaaaggtattaacgaaatggcaaaaagggttagaaaataaaggatggaatgctttatatattgagaatcacgataagccgcgtatcgtttcaacttggggagatgataaacaatattggcgtgaaagtgcgacagctttaggagcaatgtatttctttatgcacggtacaccgtttatttatcaaggacaagaaattgggatgacaaatgttcaattcccaaacattgaagattacgatgatgtagcaattaaaaatttatatcgcgagaaaattgcagagggcgtatcccatcaagatatgatggaaattatatgggcttcttgccgcgataattcacgtacgcctatgcattgggacgatgagataaatgctggtttcacaacaggtacgccttggtttggtatgaatcaaaactacaaagaaatcaatgttgcaaagcaaaagaatgaagagaactctattttcaatttctataagaaaatgattgccctgaaaaaagagcatgatgtactgaattatggtacgtacgatttacttttagaagatgacccgcaaatttatgcatatactcgtacattaaacgatgaaaaaatagtcgtaattagtaatatctcaaaagaggaagctgtgtataatgaggatttatttgcactagaacgcaaacgtttgcttttaaataactatgaagttgcggaacatgaacaattaactacaatcacgttaaagccttatgaaacaagggtttatcgcatttcataa

SEQ ID NO: 1770 - protein, 554 aa, Bacillus thuringiensis serovar konkukian str. 97-27
MNKTWWKEAVAYQIYPRSFMDSNGDGIGDLQGIIAKLDYLKDLGIDVIWICPMYKSPNDDNGYDISDYQDIMDEFGTMEDFDALLDEVHKRDMKLIIDLVINHTSDEHPWFIESRSSKDNPKRDWYIWHDGKDGAEPNNWESIFNGSAWEYDEVTGQYYLHLFSRKQPDLNWENKEVREVLYDTVNWWLDKGIDGFRVDAISHIKKEDGFKDMPNPKGLKYVPSFDKHMNVDGIQPLLEELKENTFSKYDIMTVGEANGVKIEDAELWVGEEQGKFNMVFQFEHLSLWDAEKKKDLDVVGLKKVLTKWQKGLENKGWNALYIENHDKPRIVSTWGDDKQYWRESATALGAMYFFMHGTPFIYQGQEIGMTNVQFPNIEDYDDVAIKNLYREKIAEGVSHQDMMEIIWASCRDNSRTPMHWDDEINAGFTTGTPWFGMNQNYKEINVAKQKNEENSIFNFYKKMIALKKEHDVLNYGTYDLLLEDDPQIYAYTRTLNDEKIVVISNISKEEAVYNEDLFALERKRLLLNNYEVAEHEQLTTITLKPYETRVYRIS

SEQ ID NO: 1771 - DNA, 1677 bp, Bacillus thuringiensis serovar konkukian str. 97-27
  CDS (1)..(1677): transl_table=11
atggaaaaacagtggtggaaagaaagtgtagtatatcaaatttatcctcgtagctttatggatagcaatggtgatggtatcggggatcttcgcggtattatttcaaagttagattacttaaaagaattagggattgatgtgatttggttatcgccagtttatgaatctccaaatgatgataatggttatgatataagtgattattgtaaaattatgaatgagttcggaacaatggaagattgggatgagctattacatgaaatgcatgaacgtaatatgaaactgatgatggacttagttgttaatcatacttctgatgaacataattggtttattgaatcacgtaaatcaaaagataataaatatagagattactatatatggcgtcctggaaaagaaggaaaagagccgaataactggggagcagcttttagtggatcagcatggcagtatgatgaaatgacagatgaatattatttacatctgttttctaaaaaacagccagatttaaattgggataatgaaaaggtaagacaagatgtttatggaatgatgaagttttggttagaaaaaggaattgatggcttccgcatggatgttattaattttatttctaaagaagagggattaccaactgttgaaacagaagaagaggggtatgtttcaggtcataagcattttatgaacggtccaaacattcataaatatttacatgaaatgaatgaagaagtattgtctcattatgatattatgacggttggtgaaatgcctggtgtaacgacagaagaagcgaaattgtatactggggaagaacgaaaagaactgcagatggtattccaatttgaacatatggatttagattcaggagaaggtggaaaatgggatgtaaaaccatgttcactccttactttaaaagagaatttaacgaagtggcaaaaagcgttagaacatacaggttggaatagtctgtattggaataaccatgatcagcctcgcgttgtatctcgttttggtaatgatggcatgtatcgcattgaatctgcgaaaatgttagcgacggtacttcatatgatgaaaggaacaccgtatatttatcaaggagaagaaattggaatgacgaacgtccgatttgagtcgattgatgaatatcgagatattgaaacgttaaatatgtataaggaaaaagttatggagcgcggtgaagatatagagaaggtgatgcagtctatctatataaaaggccgagataatgctagaacaccgatgcagtgggataatcagaaccacgctggatttacaacaggtgaaccttggattacggtaaatcctaactataaagagattaatgtgaaacaagcgattcaaaataaagattcaattttttattactataaaaaattaattgagttacgcaaaaataatgaaatagttgtgtatggatcatatgatttaatattggagaataatccatctatctttgcatacgtaagaacatatggagttgaaaaacttcttgttattgcaaactttactgcggaagaatgtatatttgaattgcctgaggacattagttatagtgaagtagagttactcatacacaattacgacgtagagaatggaccgatagaaaacataccattacgtccgtatgaagcaatggtattcaaattgaaataa

SEQ ID NO: 1772 - protein, 558 aa, Bacillus thuringiensis serovar konkukian str. 97-27
MEKQWWKESVVYQIYPRSFMDSNGDGIGDLRGIISKLDYLKELGIDVIWLSPVYESPNDDNGYDISDYCKIMNEFGTMEDWDELLHEMHERNMKLMMDLVVNHTSDEHNWFIESRKSKDNKYRDYYIWRPGKEGKEPNNWGAAFSGSAWQYDEMTDEYYLHLFSKKQPDLNWDNEKVRQDVYGMMKFWLEKGIDGFRMDVINFISKEEGLPTVETEEEGYVSGHKHFMNGPNIHKYLHEMNEEVLSHYDIMTVGEMPGVTTEEAKLYTGEERKELQMVFQFEHMDLDSGEGGKWDVKPCSLLTLKENLTKWQKALEHTGWNSLYWNNHDQPRVVSRFGNDGMYRIESAKMLATVLHMMKGTPYIYQGEEIGMTNVRFESIDEYRDIETLNMYKEKVMERGEDIEKVMQSIYIKGRDNARTPMQWDNQNHAGFTTGEPWITVNPNYKEINVKQAIQNKDSIFYYYKKLIELRKNNEIVVYGSYDLILENNPSIFAYVRTYGVEKLLVIANFTAEECIFELPEDISYSEVELLIHNYDVENGPIENIPLRPYEAMVFKLK

SEQ ID NO: 1773 - DNA, 1665 bp, Bacillus cereus E33L
  CDS (1)..(1665): transl_table=11
atgaataagacatggtggaaagaagcggttgcttatcaaatttatccacgtagctttatggattcaaatggtgatggtattggagatttacaaggtattattgcgaaactggattatttaaaagatttaggaatagatgtaatttggatttgtccaatgtataagtcacctaatgatgataatggttatgacattagtgattatcaagatattatggatgagtttgggacgatggaagactttgatgctttactagatgaagttcataaacgtgatatgaagcttattattgatttagttattaatcatacaagtgatgaacatccatggtttattgagtctcgttcatctaaagacaatccgaagcgtgattggtatatttggcatgatggtaaagatggtgcagaaccaaacaactgggaaagtatttttaatggttcggcatgggagtatgatgaagtaacaggacaatattatttacacttattctcgcgtaaacaaccagatttaaactgggagaataaagaagttcgagaagtgctatacgatacagttaattggtggcttgataaaggaattgatggtttccgagtagatgcaatcagccatattaaaaaagaagatggctttaaagatatgccaaatccaaaaggactaaagtatgttccatcttttgataaacatatgaatgtggatggtattcaacctttattagaagaattaaaagaaaatacgttttctaagtacgatattatgactgttggtgaagcgaatggtgttaagattgaagatgctgagctttgggttggcgaagagcaaggtaagttcaatatggtattccaattcgaacatttaagtttatgggatgcagaaaagaagaaagatcttgatgttgtagggctgaaaaaggtattaacgaaatggcaaaaagggttagaaaataaaggatggaatgctttatatattgagaatcacgataagccacgtatcgtttcaacttggggagatgataaacaatattggcgtgaaagtgcgacagctttaggagcaatgtatttctttatgcacggtacaccgtttatttatcaaggacaagaaattgggatgacaaatgttcaattcccaaacattgaagattacgatgatgtagcaattaaaaatttatatcgcgagaaaattgcagagggcgtatcccatcaagatatgatggaaattatatgggcttcttgccgcgataattcacgtacgcctatgcattgggacgatgagataaatgctggtttcacaacaggtacgccttggtttgatatgaatccaaactacaaagaaatcaatgttgcaaagcaaaagaatgaagagaactctattttcaatttctataagaaaatgattgccctgaaaaaagagcatgatgtactgaattatggtacgtacgatttacttttagaagatgatccgcaaatttatgcatatactcgtacattaaacgatgaaaaaatagtcgtaattagtaatatctcaaaagaggaagctgtgtataatgaggatttatttgcactagaacgcaaacgtttgcttttaaataactatgaagttgcggaacatgaagaagtaacaacaattgctttaaagccttatgaaacaagggtttatcgcatttcataa

SEQ ID NO: 1774 - protein, 554 aa, Bacillus cereus E33L
MNKTWWKEAVAYQIYPRSFMDSNGDGIGDLQGIIAKLDYLKDLGIDVIWICPMYKSPNDDNGYDISDYQDIMDEFGTMEDFDALLDEVHKRDMKLIIDLVINHTSDEHPWFIESRSSKDNPKRDWYIWHDGKDGAEPNNWESIFNGSAWEYDEVTGQYYLHLFSRKQPDLNWENKEVREVLYDTVNWWLDKGIDGFRVDAISHIKKEDGFKDMPNPKGLKYVPSFDKHMNVDGIQPLLEELKENTFSKYDIMTVGEANGVKIEDAELWVGEEQGKFNMVFQFEHLSLWDAEKKKDLDVVGLKKVLTKWQKGLENKGWNALYIENHDKPRIVSTWGDDKQYWRESATALGAMYFFMHGTPFIYQGQEIGMTNVQFPNIEDYDDVAIKNLYREKIAEGVSHQDMMEIIWASCRDNSRTPMHWDDEINAGFTTGTPWFDMNPNYKEINVAKQKNEENSIFNFYKKMIALKKEHDVLNYGTYDLLLEDDPQIYAYTRTLNDEKIVVISNISKEEAVYNEDLFALERKRLLLNNYEVAEHEEVTTIALKPYETRVYRIS

SEQ ID NO: 1775 - DNA, 1677 bp, Bacillus cereus E33L
  CDS (1)..(1677): transl_table=11
atggaaaaacagtggtggaaagaaagtgtagtatatcaaatttatcctcgtagctttatggatagcaatggtgatggtatcggggatcttcgcggtattatttcaaagttagattacttaaaagaattagggattgatgtgatttggttatcgccagtctatgaatctccaaatgacgataatggttatgatataagtgattattgtaaaattatgaatgagttcggaacaatggaagattgggatgagctattacatgaaatgcatgaacgtaatatgaaactgatgatggacttagttgttaatcatacttctgatgaacataattggtttattgaatcacgtaaatcaaaagataataaatatagagattactatatatggcgtcctggaaaagaaggaaaagagccgaataactggggagcagcttttagtggatcagcatggcagtatgatgaaatgacagatgaatattatttacatctgttttctaaaaaacagccagatttaaattgggataatgaaaaggtaagacaagatgtttatggaatgatgaagttttggttagaaaaaggaattgatggcttccgcatggatgttattaattttatttctaaagaagaggggttaccaactgttgaaacagaagaagaggggtatgtttcaggtcataagcattttatgaacggtccaaacattcataaatatttacatgaaatgaatgaagaagtattgtctcattatgatattatgacggttggtgaaatgcctggtgtaacgacagaagaggcgaaattatataccggggaagaaagaaaagaactgcagatggtattccaatttgaacatatggatttagattcaggagaaggcggaaaatgggatgtaaaaccatgttcactccttactttaaaagagaatttaacgaagtggcaaaaagcattagaacatacaggctggaatagtctgtattggaataaccatgatcagcctcgcgtcgtatctcgttttggtaatgatggcatgtatcgcattgaatcagcgaaaatgttagcgacggtacttcatatgatgaaaggaacaccgtatatttatcaaggagaagaaattggaatgacgaacgtccgatttgagtcgattgatgaatatagagatattgaaacgttaaatatgtataaggaaaaagttatggagcgcggtgaagatatagagaaggtgatgcagtctatctatataaaaggccgagataatgctagaacaccgatgcagtgggatgatcagaatcacgctggatttacaacaggtgaaccttggattacggtaaaccctaactataaagagattaatgtgaaacaagcgatccaaaataaaaattcaattttttattactataaaaaattaattgagttacgcaaaaataatgaaatagttgtgtatggatcatatgatttaatattggagaataatccatctatctttgcatacgtaagaacatatggagttgaaaaacttcttgttattgcaaactttactgcggaagaatgtatatttgaattgcctgaggacattagttatagtgaagtagagttactcatacacaattacgacgtagagaatggaccgatagaaaacataccattacgtccgtatgaagcaatggtatttaaattgaaataa

SEQ ID NO: 1776 - protein, 558 aa, Bacillus cereus E33L
MEKQWWKESVVYQIYPRSFMDSNGDGIGDLRGIISKLDYLKELGIDVIWLSPVYESPNDDNGYDISDYCKIMNEFGTMEDWDELLHEMHERNMKLMMDLVVNHTSDEHNWFIESRKSKDNKYRDYYIWRPGKEGKEPNNWGAAFSGSAWQYDEMTDEYYLHLFSKKQPDLNWDNEKVRQDVYGMMKFWLEKGIDGFRMDVINFISKEEGLPTVETEEEGYVSGHKHFMNGPNIHKYLHEMNEEVLSHYDIMTVGEMPGVTTEEAKLYTGEERKELQMVFQFEHMDLDSGEGGKWDVKPCSLLTLKENLTKWQKALEHTGWNSLYWNNHDQPRVVSRFGNDGMYRIESAKMLATVLHMMKGTPYIYQGEEIGMTNVRFESIDEYRDIETLNMYKEKVMERGEDIEKVMQSIYIKGRDNARTPMQWDDQNHAGFTTGEPWITVNPNYKEINVKQAIQNKNSIFYYYKKLIELRKNNEIVVYGSYDLILENNPSIFAYVRTYGVEKLLVIANFTAEECIFELPEDISYSEVELLIHNYDVENGPIENIPLRPYEAMVFKLK

SEQ ID NO: 1777 - DNA, 1707 bp, Bacillus licheniformis ATCC 14580
  CDS (1)..(1707): transl_table=11
atgagccaatggtggaaagaggcagtcgtgtatcaaatttacccgcggagtttttatgattccaacggagacggcttcggtgatttgcagggggtgattcaaaagctcgattacatcaaaagccttggagccgatgtcatatggctgtgtcctgtgtttgattccccgcaggatgacaacggctacgacatcagcgactatagaagcatatacgaaaagttcgggacgaacgatgatatgtttcaattgattgatgaagtgcataaacgcggaatgaaaatcattatggatcttgtcgtgaatcacacgtctgatgaacatgcctggtttgccgaaagccgcaagtcaaaggacaatccttaccgtgattattatttttggaaggatccaaaggcggacggttcagagccgaacaattggggatcgatcttttcagggccggcatggacgctcgatgagcggacaggacagtattatcttcactacttttcgaaaaagcagcctgacttaaactgggagaatgaagcggttcgccgcgaagtatacgatttgatgacattttggatggacagaggcgtggacggctggcggatggacgtgatcggttccatctccaaattcgtcgactttcccgattatgaaacagatgacagccgtccatatgtcgtcggccgctatcattcgaacggcccccgtctgcacgaatttatacaagagatgaaccgggaagtgctgtcccgttacgactgtatgacggtcggcgaagcaaacggctcagatgttgaagaagcgaaaaaatacacggatccaagcagacatgagctgaacatgatttttacatttgaacatatggatattgataccaaacagcattctccgaatgggaaatggcagatgaagccgtttgacccgatcgctttaaaaaagacgatgacgaggtggcagaccgctttaatgaatgtcggctggaatacgctttatttcgaaaatcatgatcagccgagggtcatatcccgctggggcaatgaccgcgagctccgcaaacaatgcgccaaagcatttgcaacagttctgcacggcatgaagggaaccccgttcatttatcaaggtgaagaaatcggcatgacaaacagcgagatgccgctcgaaatgtatgatgatctcgaaatcaaaaacgcataccgcgaacttgtcattgaaaacaaaacgatgacagaggaagactttcgaaaagccgtggcgaaaaaagggcgggatcatgcgagaacgccgatgcaatgggatgacgggaaatacgcgggctttacggatggagagccttggctggcggtaaatccccgctatcaagaaatcaatgtgaaagagtcgcttgccgatgaagattcgattttctattattatcagaagctcatcgggctgcgcaaacaaaataaagtcatcgtgtacggagactatcggctgctgctcgaggaagatccgcgaatctttgcgtatatccgcgaatatcggggcgaaaagctgttagtcgccgtgaatttatcagaagaaaaggcgctgtttcatgcttcgccggaattgcttgaggacagatgggatgtgctgttgtcaaactacgcccgagagcggcttaatataagcggcagtatcgacatggagccttatgaagctttcatgatgatcagccgggcaaaggattacacatcatga

SEQ ID NO: 1778 - protein, 568 aa, Bacillus licheniformis ATCC 14580
MSQWWKEAVVYQIYPRSFYDSNGDGFGDLQGVIQKLDYIKSLGADVIWLCPVFDSPQDDNGYDISDYRSIYEKFGTNDDMFQLIDEVHKRGMKIIMDLVVNHTSDEHAWFAESRKSKDNPYRDYYFWKDPKADGSEPNNWGSIFSGPAWTLDERTGQYYLHYFSKKQPDLNWENEAVRREVYDLMTFWMDRGVDGWRMDVIGSISKFVDFPDYETDDSRPYVVGRYHSNGPRLHEFIQEMNREVLSRYDCMTVGEANGSDVEEAKKYTDPSRHELNMIFTFEHMDIDTKQHSPNGKWQMKPFDPIALKKTMTRWQTALMNVGWNTLYFENHDQPRVISRWGNDRELRKQCAKAFATVLHGMKGTPFIYQGEEIGMTNSEMPLEMYDDLEIKNAYRELVIENKTMTEEDFRKAVAKKGRDHARTPMQWDDGKYAGFTDGEPWLAVNPRYQEINVKESLADEDSIFYYYQKLIGLRKQNKVIVYGDYRLLLEEDPRIFAYIREYRGEKLLVAVNLSEEKALFHASPELLEDRWDVLLSNYARERLNISGSIDMEPYEAFMMISRAKDYTS

SEQ ID NO: 1779 - DNA, 1749 bp, Acidobacteria bacterium Ellin345
  CDS (1)..(1749): transl_table=11
atgacctactccgcgcgcatcgcgctcgccttcttttccctattcctcttcctcccgaaaatcagtttcgccgtcgatcaagccctcaacggctacgagcccaagtggtggaaagaagcagttgtataccaggtctatccgcgctcgttcaaagactccaacggcgatggcattggcgacctgaagggcatcacctcgaagctcgattacctgcaatcgctcggcgtggacgtcatctggctgagcccgcactacgattcccccaacgccgacaacggctacgacatccgcgattacgagaaagtgatgaaggagttcggcaccatggccgacttcgacgaacttctcaaaggcgtgaaggctcgcggcatgcgcctggtgctcgatctcgtggtgaaccacactagcgacgagcatcgctggttcgtcgagagccgcaagtcgaaggacaatccgtatcgcgattactacatctggcgccccggcaaagacggtggcccgccgaataattacacctcattcttctccggctccgcgtggacgctcgatcccacgaccaacgagtactacctgcactgcttcgcggtgaagcagcctgacttgaactgggacaacccaaaagtccgccaggaagtgtattccctgatgaagttctggctcgacaagggcgtggacggattccgcatggacgtcatccccttcatctcgaaactgcccgatctgccggacatcccgcccgagtatcgcgaacgtccgcagtacttctacacccaggggccgcatctgcatgaatatctgcaggaaatgaataaagaggttctctcgaagtacgacatgatgacggtcggtgaggcgttcggcgtcacgctcgagggcactccgatgctggtggatgagcgccgtcacgaactcaacatgatcttcaacttcgatgcggtgcgaattggacatccctcgacaccatggatcggctggacactgccaaagctgaaagcgatctataccgacgaagaccagaagctggatcaacacagttggaatacggtcttcctgtcaaaccacgacaatccccgcgtagtctctgcctttggcgacgactctccggagtggcgcgagaaatcagcgaagctgctcgcgacgatggtcctcaccctcaagggcactccgttcatctatcagggcgacgaactcggcatgaccaattatccgttcaagggcatcgaggacttcgacgacatcgaagtaaagaacgcgtggaaggaatacgtggagactggacgcatcagcaaagaacacttcctcgacaacgcccggcgggtggcacgcgacaactcgcgcactccgatccagtgggatgattcgagcaatggtggcttcaccaccggcaagccctggctcgcggtaaacccgaattacaagaaaatcaatgctgcagaggagcagaaagacaaagactccgtctaccaatacttccagcgcatgctggccttccgcaagacgaccaaggctttcagctacggcgattacaaggacctcgatccgcaaaacgaaaagatcttcgcctacacgcgaacgctcggaaaagagaagtatctcgtcgtgcttaatttttcgaaggatgcgctgaagtattccctgcccggagtgaaggcgggaaaactggtgatgtcgaacgaaggtgcggcggaggagaacgcgaccacgctaatgatgaaaggctgggaagcccgggtttacagagtcgagtaa

SEQ ID NO: 1780 - protein, 582 aa, Acidobacteria bacterium Ellin345
MTYSARIALAFFSLFLFLPKISFAVDQALNGYEPKWWKEAVVYQVYPRSFKDSNGDGIGDLKGITSKLDYLQSLGVDVIWLSPHYDSPNADNGYDIRDYEKVMKEFGTMADFDELLKGVKARGMRLVLDLVVNHTSDEHRWFVESRKSKDNPYRDYYIWRPGKDGGPPNNYTSFFSGSAWTLDPTTNEYYLHCFAVKQPDLNWDNPKVRQEVYSLMKFWLDKGVDGFRMDVIPFISKLPDLPDIPPEYRERPQYFYTQGPHLHEYLQEMNKEVLSKYDMMTVGEAFGVTLEGTPMLVDERRHELNMIFNFDAVRIGHPSTPWIGWTLPKLKAIYTDEDQKLDQHSWNTVFLSNHDNPRVVSAFGDDSPEWREKSAKLLATMVLTLKGTPFIYQGDELGMTNYPFKGIEDFDDIEVKNAWKEYVETGRISKEHFLDNARRVARDNSRTPIQWDDSSNGGFTTGKPWLAVNPNYKKINAAEEQKDKDSVYQYFQRMLAFRKTTKAFSYGDYKDLDPQNEKIFAYTRTLGKEKYLVVLNFSKDALKYSLPGVKAGKLVMSNEGAAEENATTLMMKGWEARVYRVE

SEQ ID NO: 1781 - DNA, 1671 bp, Oenococcus oeni PSU-1
  CDS (1)..(1671): transl_table=11
atgtcaaaaaaacaatggtttaaagatacagtagtttatcaagtatacccaatgagtttccaggatagcgataacgatggaattggcgacctgccggggattacaaaacgacttgactatatcaaaaaactaggtgccgatgtcatttggttaaacccgatttatgagtcacccaacaaagacaacggatatgatattgccaattatcgagctatcaacccggagtacggatcgatgaatgattttgatgatttacttaacaaagctcaccaattaaaccttaaaattatgatggatctagtcgttaaccatacttccgatcaacatcattggttccaggaaagtaaaaaaaccaaagacaatccgttttccgatttttatatttggagagatccggtagatggtcacgaacctaataattggttggccgcatttggtggttcagcatggacttatgttccggaacgcaaacaatattatttgcatttgtttgcaaccggtcaaccggatctcaattgggagaatccggatgttcgccaagcagtctttgatatagaacgtttttggctcgataaaggggttgatggttttagaatggacgttattaatcttatttcaaaaccaaagggtctgcctgatgttccggaacctgccaccgcaggaaagacgatggatttcgtagcggatgggcatcgcctaaatgagtttttgagtcaaatgaacagcgaagtattgtccaaatatgacactataacggttggtgaaatgcctggatcaactactgaagacgctattaaatacacgggccttaacagccatgaactgaatatggtatttcagtttgagcatgtcggtttaagtcccaatccggatgttagattgggaaagtggaatgaccagcctgttaaactgactgaattaaaagcctcgttgaacagatggcaaactggtcttgacggcaaaggatggaacagcctttactggaacaatcacgatcaacctcgggcagtatcccgttttggaaatgacgatcctaagtatcgtgttctatcggccaaaatgctggctacaactcttcacttgatgcagggcactccttatgtatatcagggtgaggagcttggaatgacaaatgctcacttcacaaaattaaatcaatacgaggatatcgaatctattaatttttatcatgagttggtcgaacaagaaaaaattgtcgatgggccaacaatgctaaaatatctggcaaatatttcacgtgataatgcccgtacgccaatgcaatggaacgataaaaacaatgccggattctcaagtgcaaaaccatggtttgcccttaaccctaattacaaatcaattaacgttgaggattcattggctgacaaaaattccgtattctattattatcaaaaattaattaagcttcgtcacaataatgaaataatcaaatatggaagcttcgaggaaatagaccccgatgacgatcaagtatacgcatatcgtcgtcattacgaaggaaaaactttgttacttataagcaattttaccgataaaatcgtaagtcgcgattacggtcaatcgaacgcttcaagtttgcttatagataattatgaagatgataaagtaaacgagttaagaccgtatgaggcgaaagcttatctatttaaatga

SEQ ID NO: 1782 - protein, 556 aa, Oenococcus oeni PSU-1
MSKKQWFKDTVVYQVYPMSFQDSDNDGIGDLPGITKRLDYIKKLGADVIWLNPIYESPNKDNGYDIANYRAINPEYGSMNDFDDLLNKAHQLNLKIMMDLVVNHTSDQHHWFQESKKTKDNPFSDFYIWRDPVDGHEPNNWLAAFGGSAWTYVPERKQYYLHLFATGQPDLNWENPDVRQAVFDIERFWLDKGVDGFRMDVINLISKPKGLPDVPEPATAGKTMDFVADGHRLNEFLSQMNSEVLSKYDTITVGEMPGSTTEDAIKYTGLNSHELNMVFQFEHVGLSPNPDVRLGKWNDQPVKLTELKASLNRWQTGLDGKGWNSLYWNNHDQPRAVSRFGNDDPKYRVLSAKMLATTLHLMQGTPYVYQGEELGMTNAHFTKLNQYEDIESINFYHELVEQEKIVDGPTMLKYLANISRDNARTPMQWNDKNNAGFSSAKPWFALNPNYKSINVEDSLADKNSVFYYYQKLIKLRHNNEIIKYGSFEEIDPDDDQVYAYRRHYEGKTLLLISNFTDKIVSRDYGQSNASSLLIDNYEDDKVNELRPYEAKAYLFK

SEQ ID NO: 1783 - DNA, 1671 bp, Leuconostoc mesenteroides subsp. mesenteroides ATCC 8293
  CDS (1)..(1671): transl_table=11
atgacaaaacaatggtttaaggactcagtagtatatcaaatatatcctatgagttttcaagacagtaataacgatggtattggtgaccttgctggtatcactcaacgattgcagtatatccataacttgggtgctgatgtcatctggttaaatcctatttatgtctctccaaataaagacaacggctacgatattgctgattatcgcaatattaacccaaattatggcacaatgcaggattttgaagatttacttcaacaagcacatcgcctagatcttaaaattatgatggatttggttgttaatcatacgtcagatcaacatgtttggtttaaagaaagtcgcaagaatcaaactaacgagtacgccaattattatatttggcgggatccagtagacggacatgaaccaaataattggcttgcagcatttggcggttctgcttggacttatgttcctgaacgaaagcaatactatctacacatgtttgctgaaggacaaccagatctcaattgggaaaatcttgaagttcgcgaggcagttttcgatattgaacgcttttggttggataaaggtgttgatggatttcgaatggatgtaatcaatttaatttctaaacctgaaggcttgcctgatgtcacagaaccagtaactgcaggaacaacaatggattttgtagcagatggtcaccgacttaacgaatttttacgccaaatgaacgacgaagtactgtccaaatacgacacaattactgttggtgaaatgccaagctcaacccctgaagatgcgattaaatatactggattagatagtcatgaattgaacatggtcttccaattcgaacatgtttccctcagcccaaatccggacgtacgactgggtaaatggaatgacgaacctattaacctagtggagttgaaagcttccttaaatcgttggcaaattggattagatggcaagggatggaatagtctctattggaataatcatgaccagccacgtgcagtttctcgatttggaaatgatcaacctgaattcagagtattatctgctaaaatgttagcaactaccttgcatatgatgcaaggaacaccctacgtttatcaaggtgaagagctaggtatgactaacggtcattttgagagtttggaacaatatgaagatattgagtcagtcaacttttatcacgagtttgttgatgagcaaaagattgttgacagcgcaacaatgctaaagtatttagctaatatgtcacgtgataatgcgagaacccctatgcaatggaataaccaacaaaatgccggattttcaaatgtgacaccttggtatgcaccaaacaaaaattacacagcaatcaatgccgaaaatgttttatctgataacgattccgtttactaccattaccagaagctaatacaacttcgtcatgattcagagattgttagatatggaacgtttgaagcgattgattctgaagacaaccaggtatacgcataccttcgtcactataaagaacagtctgttcttgttttgagcaacttcactgacaaagtagtcactcgtgactatggacaaacgaagttctcagaattgttaatcaataactatttagatgatcagggaacaatcttacgcccatatgaaagcaaagtttatcttttgacgaaataa

SEQ ID NO: 1784 - protein, 556 aa, Leuconostoc mesenteroides subsp. mesenteroides ATCC 8293
MTKQWFKDSVVYQIYPMSFQDSNNDGIGDLAGITQRLQYIHNLGADVIWLNPIYVSPNKDNGYDIADYRNINPNYGTMQDFEDLLQQAHRLDLKIMMDLVVNHTSDQHVWFKESRKNQTNEYANYYIWRDPVDGHEPNNWLAAFGGSAWTYVPERKQYYLHMFAEGQPDLNWENLEVREAVFDIERFWLDKGVDGFRMDVINLISKPEGLPDVTEPVTAGTTMDFVADGHRLNEFLRQMNDEVLSKYDTITVGEMPSSTPEDAIKYTGLDSHELNMVFQFEHVSLSPNPDVRLGKWNDEPINLVELKASLNRWQIGLDGKGWNSLYWNNHDQPRAVSRFGNDQPEFRVLSAKMLATTLHMMQGTPYVYQGEELGMTNGHFESLEQYEDIESVNFYHEFVDEQKIVDSATMLKYLANMSRDNARTPMQWNNQQNAGFSNVTPWYAPNKNYTAINAENVLSDNDSVYYHYQKLIQLRHDSEIVRYGTFEAIDSEDNQVYAYLRHYKEQSVLVLSNFTDKVVTRDYGQTKFSELLINNYLDDQGTILRPYESKVYLLTK

SEQ ID NO: 1785 - DNA, 1671 bp, Leuconostoc mesenteroides subsp. mesenteroides ATCC 8293
  CDS (1)..(1671): transl_table=11
atggaaaaagtacagtggtggcagaatactgttgtctaccaaatttatcccaggagctttcaagatagtaacggagatggtgtgggggatatacccggcattattgaacgattaccctatttgaaagctcttggtgtccaagtgatttggctaagtccaatttatcagtcgccaaatgatgataatggctatgacattagtgattatcgtaaagttttaccggaatttggaacaatggcagatgttcaagaaatgctcgaggtagcacatcatttaggtctaaaaattatgatggatttggtcgtcaaccatacttctgatgaacatcaatggtttaaagagagtcgtaaaaacaaggataatccttatcgcaattattacatttggcgtgatcctgtggatggtcacgaacctaataattggttgtcagactttggtggatcagcatgggaatttgacaataatacacaacagtattatttgcatttattctcaaagaagcaaccagatcttaattgggataaccccgatttacgacaagatatttacgacacaatgaaatggtggttagatcaaggtgttgatggttttcgcatggatgttattaacctaatttcaaaaccatcagatttaccaaatgatccaaatgtcaccttagaaaatcatggctcatcgatggattttgttgctaatggtccaaatattcatgattatttacaagaaatgaatcaagaagtattgtcaaagcatgatatcatcactgttggtgaaacgccaggcgtatcaacaaaggatgcaatgaaatatgccggatttgattcgcatgagttgcagatgattttccagtttgaacatactgaggttgataacagtcatgagggattaggcaaatggagtgatgaacgcttcaatctggttgatttaaagcgtattttatccagatggcaaaatgagttgtatggtaaggcttggaacagtctttattggaataatcatgatcgaccaagagtagtctcacgatttggaaatgattcagatgaatatcgcgtattgtctgctaaaatgttggctgcaactttacattttatgcagggaacaccttatatttaccaaggtgaagaaattggtatgaccaatattgacttaccatctattaaagactaccgagatattgataccttgaatgcatatgatgacttagttgtccaacaaagacgagttactgctgataaaatgatgtcttatgttcatcattcttcaagagacaatgcacgaacaccaatgcaatgggataacactaaaaatgccggatttactgaaagtcacccatggttaagtgttaatcctaattaccagaccatcaatgtggcagattcattaactgatcaacagtcagtctttcatttttaccaaaagctcatcgccttaaggcaagagttatccattatcacgactgggaagtatgaagtgttggatttagaagacgaatctgtttacgcttacaagcggattgacaaagacacgcaattactggttattagcaattttactgatcaaaagcaaacacgtcattacgatcgaacccaatctgcacaattagttataagtaattattcagatgatcaaggtgacacactcagaccttacgaatcaaaagtatatttgttttaa

SEQ ID NO: 1786 - protein, 556 aa, Leuconostoc mesenteroides subsp. mesenteroides ATCC 8293
MEKVQWWQNTVVYQIYPRSFQDSNGDGVGDIPGIIERLPYLKALGVQVIWLSPIYQSPNDDNGYDISDYRKVLPEFGTMADVQEMLEVAHHLGLKIMMDLVVNHTSDEHQWFKESRKNKDNPYRNYYIWRDPVDGHEPNNWLSDFGGSAWEFDNNTQQYYLHLFSKKQPDLNWDNPDLRQDIYDTMKWWLDQGVDGFRMDVINLISKPSDLPNDPNVTLENHGSSMDFVANGPNIHDYLQEMNQEVLSKHDIITVGETPGVSTKDAMKYAGFDSHELQMIFQFEHTEVDNSHEGLGKWSDERFNLVDLKRILSRWQNELYGKAWNSLYWNNHDRPRVVSRFGNDSDEYRVLSAKMLAATLHFMQGTPYIYQGEEIGMTNIDLPSIKDYRDIDTLNAYDDLVVQQRRVTADKMMSYVHHSSRDNARTPMQWDNTKNAGFTESHPWLSVNPNYQTINVADSLTDQQSVFHFYQKLIALRQELSIITTGKYEVLDLEDESVYAYKRIDKDTQLLVISNFTDQKQTRHYDRTQSAQLVISNYSDDQGDTLRPYESKVYLF

SEQ ID NO: 1787 - DNA, 1824 bp, Bifidobacterium longum DJO10A
  CDS (1)..(1824): transl_table=11
atgatgactactttcaaccgcgcaataatccccgacgccatccgcaccaacggcgccacccccaatccgtggtggtccaacgcggtggtctatcagatttacccgcgctctttccaagacacgaacggcgatggattcggcgatcttaagggcatcacgtcgcgtcttgattacttagctgatcttggcgtggatgtgctgtggctatccccggtctataagtctccgcaagacgacaacggctatgacatttccgactatcaggacattgatcctctgttcggcacgctcgacgatatggacgagctgctggccgaggcccacaagcgtgggctcaagatcgtgatggatcttgttgtcaatcacacttccgatgaacacgcctggtttgaagcatccaagaacaaagacgacgaacacgccgactggtattggtggcgtccggctcgtcccggcaccacgcccggcgagcccggcgccgagcccaatcagtggggctcctactttggcggctccgcatgggaatactgccccgagcgtggcgaatacttcctgcatcagttctcgaagaagcagccggacctcaactgggagaaccctgccgtgcgccgcgctgtgtacgacatgatgaactggtggcttgaccgaggcgtcgacggcttccgcatggacgtcatcaccctgatctccaagcgcaccgattcgaacggcaagctgccgggcgagtacggctcggagcttgaggatcttcctgtgggcgaggagggctattccaacccgaatccgttctgtgcggacggcccccgtcaggatgaattcctggctgaaatgcgacgtgaggtattcgaggggcgtgaaggcttcctgactgtgggcgaggcgccaggcgtcacggctcagcgtaacgagcacattactgatccgggcaacggtgaattggacatgctcttcctgttcgagcatgttgattttgattgcgaaggtaccaagtggaagccgctgccgcttgacctgccgaaattcaagagcattatggccggttaccagactgccgtgcagaacgcaggatgggccagcttgttcaccggcaatcatgatcagccgcgcgtggtctcccgctggggcgacgactccgcggaggaatcccgcgtccgttcggccaaggcacttggcctgatgctgcacatgcaccgcggcaccccgtacatctatcagggtgaggaactgggcatgaccgacgcccacttcacgcgtctcgaccagtaccgtgaccttgaatccttgaatgcctaccggcagagggtcgaggaggccaaggtgcagtcgtctgagtcaatgatggccggtctggccgcgcgcagccgtgacaacgcgcgtactccgatgcaatgggacggttccggctacgccggtttcaccgctccggacgccgccactgagccatggatttccgtgaatccgaatcatgccgagatcaacgccgccggtgaattcgatgatccggattcggtgtactccttctacaagcaactcgttgcgctgcgtcacaacagcccggtcgtggccgccggcgactggcgactgattgacgccgctgatccgcacgtctatgcctttacccgtgagctcgacgctgagaagttgttggtcgtagtcaatatgtccagtcgaaccgttgacctgccacgtgaggctgccgaactaaccgccgtcggaatcgccgagccgaatgtggtgatcagcacgtatgacgctccgcacaccgtggcctcccttgccaaccgcgagctcgacccgtgggaggcagccgtcatccagttgtag

SEQ ID NO: 1788 - protein, 607 aa, Bifidobacterium longum DJO10A
MMTTFNRAIIPDAIRTNGATPNPWWSNAVVYQIYPRSFQDTNGDGFGDLKGITSRLDYLADLGVDVLWLSPVYKSPQDDNGYDISDYQDIDPLFGTLDDMDELLAEAHKRGLKIVMDLVVNHTSDEHAWFEASKNKDDEHADWYWWRPARPGTTPGEPGAEPNQWGSYFGGSAWEYCPERGEYFLHQFSKKQPDLNWENPAVRRAVYDMMNWWLDRGVDGFRMDVITLISKRTDSNGKLPGEYGSELEDLPVGEEGYSNPNPFCADGPRQDEFLAEMRREVFEGREGFLTVGEAPGVTAQRNEHITDPGNGELDMLFLFEHVDFDCEGTKWKPLPLDLPKFKSIMAGYQTAVQNAGWASLFTGNHDQPRVVSRWGDDSAEESRVRSAKALGLMLHMHRGTPYIYQGEELGMTDAHFTRLDQYRDLESLNAYRQRVEEAKVQSSESMMAGLAARSRDNARTPMQWDGSGYAGFTAPDAATEPWISVNPNHAEINAAGEFDDPDSVYSFYKQLVALRHNSPVVAAGDWRLIDAADPHVYAFTRELDAEKLLVVVNMSSRTVDLPREAAELTAVGIAEPNVVISTYDAPHTVASLANRELDPWEAAVIQL

SEQ ID NO: 1789 - DNA, 1677 bp, Bacillus cereus G9241
  CDS (1)..(1677): transl_table=11
atggaaaaacagtggtggaaagaaagcgtagtatatcaaatttatcctcgtagctttatggatagcaacggtgatggtatcggggatctttgcggtattatttcaaagttagattacttaaaagaattagggattgatgtaatttggttatcaccagtctatgaatctccaaatgacgataatggttatgatataagtgattattgtaaaattatgaatgagttcggaacaatggaagattgggatgagctattacatgaaatgcatgaacgtaatatgaaacttatgatggacttagttgttaatcatacttctgatgaacataattggtttattgaatcacgtaaatcaaaagataataaatatagagattactatatatggcgccctggaaaagaaggaaaagagccgaataactggggagcagcgtttagcggatctgcatggcagtatgatgaaatgacagatgaatattatttacatctgttttctaaaaaacagccagatttaaattgggataatgaaaaggtaagacaagatgtttatgaaatgatgaagttttggttagaaaaaggaattgatggcttccgtatggatgttattaattttatttctaaagaagagggattaccagctgttgaaacagaagaagaggggtatgtttcaggtcataagcattttatgaacggtccaaacattcataaatatttacatgaaatgaatgaagaagtattgtctcattatgatattatgacggttggtgaaatgcctggtgtaacgacagaagaagcaaaattgtataccggggaagaacgaaaagaactgcagatggtattccaatttgaacatatggatttagattcaggggaaggcgggaaatgggatgtaaaaccatgttcactccttactttaaaagagaatttaacgaagtggcaaaaagaattagaacatacaggctggaatagtctgtattggaataaccatgaccagcctcgtgttgtatctcgttttggtaatgatggaatatatcgcattgaatctgcgaaaatgttagcgacggtgcttcatatgatgaaaggaacaccttatatttatcaaggagaagaaatcggaatgacaaatgttcgatttgaatcgattgatgaatatcgagatattgaaacattaaatatgtataaggaaaaagtgatagagcgcggtgaaaatatagataaagtgatgcagtctatttatataaaaggcagagataatgctagaacaccgatgcagtgggatgataaagatcatgctggattcacaacaggtgagccctggattacggtaaatcctaactataaagaaatcaatgtgaaacaagcgatccaaaataaagattcaattttttattactacaaaaaattaattgagttacgcaaaaataatgagatcattgtgtacggatcatatgatttaatattggagaataatccatctatttttgcatatgtaagaacgtatggagaagaaaaacttcttgttattgcaaactttactgcggaagaatgtgtatttgaattgcctgaggacattagttatagtgaagcagagttattcatacacaattacgacgtagagaatggactgatagataacatgacattacgtccgtatgaagcaatggtattcaaattgaaataa

SEQ ID NO: 1790 - protein, 558 aa, Bacillus cereus G9241
MEKQWWKESVVYQIYPRSFMDSNGDGIGDLCGIISKLDYLKELGIDVIWLSPVYESPNDDNGYDISDYCKIMNEFGTMEDWDELLHEMHERNMKLMMDLVVNHTSDEHNWFIESRKSKDNKYRDYYIWRPGKEGKEPNNWGAAFSGSAWQYDEMTDEYYLHLFSKKQPDLNWDNEKVRQDVYEMMKFWLEKGIDGFRMDVINFISKEEGLPAVETEEEGYVSGHKHFMNGPNIHKYLHEMNEEVLSHYDIMTVGEMPGVTTEEAKLYTGEERKELQMVFQFEHMDLDSGEGGKWDVKPCSLLTLKENLTKWQKELEHTGWNSLYWNNHDQPRVVSRFGNDGIYRIESAKMLATVLHMMKGTPYIYQGEEIGMTNVRFESIDEYRDIETLNMYKEKVIERGENIDKVMQSIYIKGRDNARTPMQWDDKDHAGFTTGEPWITVNPNYKEINVKQAIQNKDSIFYYYKKLIELRKNNEIIVYGSYDLILENNPSIFAYVRTYGEEKLLVIANFTAEECVFELPEDISYSEAELFIHNYDVENGLIDNMTLRPYEAMVFKLK

SEQ ID NO: 1791 - DNA, 1761 bp, Bacillus anthracis str. A2012
  CDS (1)..(1761): transl_table=11
atgaaaacagttgcaaactattcatattttgttatgatagtgttgcgaaaacgtttgcataaaatttccgatgggatgcaaaaggagagaatgactatgaataagacatggtggaaagaagcggttgcttatcaaatttatccacgtagctttatggattcaaatggtgatggtattggagatttacaaggtattattgcgaaactggattatttaaaagatttaggaatagatgtaatttggatttgtccaatgtataagtcacctaatgatgataatggttatgacattagtgattatcaagatattatggatgagtttgggacgatggaagactttgatgctttactagatgaagttcataaacgtgatatgaagcttattattgatttagttattaatcatacaagtgatgaacatccatggtttattgagtctcgttcatctaaagacaatccgaagcgtgattggtatatttggcatgatggtaaagatggtgcagaaccaaacaactgggaaagtatttttaatggttcggcatgggagtatgatgaagtaacaggacaatattatttacacttattctcgcgtaaacaaccagatttaaactgggagaataaagaagttcgagaagtgctatacgatacagttaattggtggcttgataaaggaattgatggtttccgagtagatgcaatcagccatattaaaaaagaagatggctttaaagatatgccaaatccaaaaggactaaagtatgttccatcttttgataaacatatgaatgtggatggtattcaacctttattagaagaattaaaagaaaatacgttttctaagtacgatattatgactgttggtgaagcgaatggcgttaagattgaagatgctgagctttgggttggagaagagcaaggtaagttcaatatggtattccaattcgaacatttaagtttatgggatgcagaaaagaagaaagatcttgatgttgtagggctgaaaaaggtattaacgaaatggcaaaaagggttagaaaataaaggatggaatgctttatatattgagaatcacgataagccgcgtatcgtttcaacttggggagatgataaacaatattggcgtgaaagtgcgacagctttaggagcaatgtatttctttatgcacggtacaccgtttatttatcaaggacaagaaattgggatgacaaatgttcaattcccaaacattgaagattacgatgatgtagcaattaaaaatttatatcgcgagaaaattgcagagggcgtatcccatcaagatatgatggaaattatatgggcttcttgccgcgataattcacgtacgcctatgcattgggacgatgagataaatgctggtttcacaacaggtacgccttggtttggtatgaatcaaaactacaaagaaatcaatgttgcaaagcaaaagaatgaagagaactctattttcaatttctataagaaaatgattgccctgaaaaaagagcatgatgtactgaattatggtacgtacgatttacttttagaagatgacccgcaaatttatgcatatactcgtacactaaacgatgaaaaaatagtcgtaattagtaatatctcaaaagaggaagctgtgtataatgaggatttatttgcactagaacgcaaacgtttgcttttaaataactatgaagttgcggaacatgaacaattaactacaatcacgttaaagccttatgaaacaagggtttatcgcatttcataa

SEQ ID NO: 1792 - protein, 586 aa, Bacillus anthracis str. A2012
MKTVANYSYFVMIVLRKRLHKISDGMQKERMTMNKTWWKEAVAYQIYPRSFMDSNGDGIGDLQGIIAKLDYLKDLGIDVIWICPMYKSPNDDNGYDISDYQDIMDEFGTMEDFDALLDEVHKRDMKLIIDLVINHTSDEHPWFIESRSSKDNPKRDWYIWHDGKDGAEPNNWESIFNGSAWEYDEVTGQYYLHLFSRKQPDLNWENKEVREVLYDTVNWWLDKGIDGFRVDAISHIKKEDGFKDMPNPKGLKYVPSFDKHMNVDGIQPLLEELKENTFSKYDIMTVGEANGVKIEDAELWVGEEQGKFNMVFQFEHLSLWDAEKKKDLDVVGLKKVLTKWQKGLENKGWNALYIENHDKPRIVSTWGDDKQYWRESATALGAMYFFMHGTPFIYQGQEIGMTNVQFPNIEDYDDVAIKNLYREKIAEGVSHQDMMEIIWASCRDNSRTPMHWDDEINAGFTTGTPWFGMNQNYKEINVAKQKNEENSIFNFYKKMIALKKEHDVLNYGTYDLLLEDDPQIYAYTRTLNDEKIVVISNISKEEAVYNEDLFALERKRLLLNNYEVAEHEQLTTITLKPYETRVYRIS

SEQ ID NO: 1793 - DNA, 1704 bp, Apis cerana indica
  CDS (1)..(1704)
atgaaggcgataatcgtattttgccttatggcattgtccattgtggacgcagcatggaagccgctccctgaaaacttgaaggaggacttgatcgtgtatcaggtctacccaagaagcttcaaggatagcaatggagatggtattggtgatatcgaaggtattaaacaaaaattggaccattttctcgaaatgggcgtcgatatgttttggttatctcctatttatccaagtcctatggtcgattttggttatgacatttcgaattacaccgatgttcatcccatatttggcaccttatcagacttagataacttagttaatgctgcacatgagaagggactgaagataatcttggatttcgttccgaatcatacatctgatcaacatgaatggttccagctgagtttgaaaaacattgaaccttataacaactattatatttggcatccaggaaaaattgtaaatggtaaacgtgttccaccaactaattgggtaggcgtatttggtggatcagcttggtcatggcgagaagaacgacaggcatattatctgcatcaatttgcaccagaacaaccagatctaaattactataatccagttgtactagatgatatgcaaaacgttctcagattctggctgagaagaggactcgatggtttcagagtagatgctttgccttacatttgcgaggacatgcgattcttagacgaacccctatctggtgaaacaaatgatcccaataaaaccgagtacactctcaagatctacactcacgatatcccagaaacctacaatatagttcgcaaatttagagatgtgttagacgaattcccgcaaccaaaacacatgcttatcgaggcatacacgaatttatcgatgacgatgaaatattacgattacggagcagattttccctttaattttgcattcatcaagaatgtctctaaggattcaaattcatcagacttcaagaaattggtcgataattggatgatatacatgccagcagatggtattcctaactgggtgcccggaaatcacgatcaattgagattggtgtcgagatttggagaggagaaggcccgtatgatcaccgcgatgtcgcttttgctgccaggtgttgccgtgaattactacggtgatgaaattggtatgtcggatacttatatctcgtgggaggacacgcaggatccacagggatgcggtgccggcaaagaaaactatcaaacgatgtcgagagatcccgcgagaacgccattccaatgggacgactcagtttctgctggattttcctcaagctctgatacctggcttcgtgtcaacgaaaattacaagactatcaatttagctgctgaaaagaaggacaagaactcgttcttcaatatgttcaagaaatttgcaatgctgaaaaaatcgccacactttaaagaggccaatttaaatacgaggatgctgaacgacagtgttttcgcattctctagggaaaccgaagaaaatggatctctttacgcaatattgaacttctcgaacgaggaacaaatcgtggacttgaaagcgtttaataacgtgccgaaaaaattgaatatgttttacaccatttttaactctgatataaagtccatctccaacaatgaacaaataaaagtttctgctttaggatttttgatcttaatttctcaagatgctaaatttggaaatttttaa

SEQ ID NO: 1794 - protein, 567 aa, Apis cerana indica
MKAIIVFCLMALSIVDAAWKPLPENLKEDLIVYQVYPRSFKDSNGDGIGDIEGIKQKLDHFLEMGVDMFWLSPIYPSPMVDFGYDISNYTDVHPIFGTLSDLDNLVNAAHEKGLKIILDFVPNHTSDQHEWFQLSLKNIEPYNNYYIWHPGKIVNGKRVPPTNWVGVFGGSAWSWREERQAYYLHQFAPEQPDLNYYNPVVLDDMQNVLRFWLRRGLDGFRVDALPYICEDMRFLDEPLSGETNDPNKTEYTLKIYTHDIPETYNIVRKFRDVLDEFPQPKHMLIEAYTNLSMTMKYYDYGADFPFNFAFIKNVSKDSNSSDFKKLVDNWMIYMPADGIPNWVPGNHDQLRLVSRFGEEKARMITAMSLLLPGVAVNYYGDEIGMSDTYISWEDTQDPQGCGAGKENYQTMSRDPARTPFQWDDSVSAGFSSSSDTWLRVNENYKTINLAAEKKDKNSFFNMFKKFAMLKKSPHFKEANLNTRMLNDSVFAFSRETEENGSLYAILNFSNEEQIVDLKAFNNVPKKLNMFYTIFNSDIKSISNNEQIKVSALGFLILISQDAKFGNF

SEQ ID NO: 1795 - DNA, 1932 bp, Gibberella moniliformis
  CDS (1)..(1932)
atgctggccaccatgcgaaaacctgttcgagggagctctgtgcattggtcgaggtgtctatataatttgcctcagaaacgaacggccagatttgggggactctatcaaagactatcaaagttcaatcttgtcaacattcacactgcaaaaatgagtcaagtttctggaaaagtgcccgacaggaagtggtggaaggaagctattgtctaccagatctatcccgcgtcgtttcttgataccgattctaatggcgtcgggaacatcaatgggatcacagctaagctggactacctcaaggaattgggcgtggacattctctggatttcacccgtttacgaaagcccccagaaggacatgggatacgacatttcgaattaccgcgatatccatcgcccctacggcaccatgcaagacgtgcaccacttgatcaacgagctcaaagcacgcgacatgaaactgatcatggatctggtggtcaatcacacctcgaccgagcatccctggttcatcgactcagcctcgtccgcagtaagcgcgcgacgagactggtacatctggcgcaagccaaagtacgacgagcagggcaatcggcagccaccgaataactggtgcagcctctttgacgagactgaatcagcctggacctacgacgctaagacggatgagtactatctctcgctgtttagtccgttccaggcagatcttaactgggagaccccattcgtcagagaggaagtctgcgacatcctgcgcttctggctcgacaagggcgtctctggtttccggatggacgtcatcaacctcatctccaaggaccagaggttccctgacgcagagatccgccacccgggcaggaagtaccagccgggtgaatgctacttcgccaacggggtccgactcatggactatctccaggagatgaagaccgccgtattctcaaagtatgacgccgtcacggtcggcgagatgccgtaccttgaagatgaagagcagagactcaggatggtcgcggctgaagaaggcgtgctgaacatgatcttcacttttgagatgattggcctcgacatcgtccccgaaaaaggccgcttcagcaataaagcttggaaggtctgtgagctgaaggacatagttgccaaggcctgcaagctcgttaaccaggacgggtggcatacgctcttctgcgagaatcatgaccagccgcgttccgtcacgcgtttctgcgacgactcggatgagcatcgtgtcgcaggcaccaagctcctctccatcatgcagacaagccttcctggtaccctgtatgtctaccagggcgaagagctgggtatgcgaaacgtgcccaagtcctggggatttgaagaatacatagacattgagtctgtctcctacatcaagaatgtctgcgctcaattcccagaagggtctccggaaagaaaagaggctaagaatcttctgcgcctcaaagctcgtgataatgccaggaccccaatgcagtgggactctacatctaacggcggcttctgtcccgagggagtcaagccctggatgcgcgtcaacgacgactacacgatggtcaacgcagctctacagacttccgcaggccaggcaaccgaccgcaccatgcttgtgtcaccctataggttctggcagcgaagcatccagatacgcaagaagttcaaagacctgctcgtgtacggagaccttgagattattgatggcacgcacgccaacgtctttgcgttcaagaggatcagcaacggcagacataccatcacgatccttaactttagtaaggaggaggtgagtttcaagtttccggaaggtgagggggtcaggggctgggctctcgggagttatgatgttttgtctttggcgaggccgtggacgggggagatacagcttttaccttgggagggcttgcttggtattgcttga

SEQ ID NO: 1796 - protein, 643 aa, Gibberella moniliformis
MLATMRKPVRGSSVHWSRCLYNLPQKRTARFGGLYQRLSKFNLVNIHTAKMSQVSGKVPDRKWWKEAIVYQIYPASFLDTDSNGVGNINGITAKLDYLKELGVDILWISPVYESPQKDMGYDISNYRDIHRPYGTMQDVHHLINELKARDMKLIMDLVVNHTSTEHPWFIDSASSAVSARRDWYIWRKPKYDEQGNRQPPNNWCSLFDETESAWTYDAKTDEYYLSLFSPFQADLNWETPFVREEVCDILRFWLDKGVSGFRMDVINLISKDQRFPDAEIRHPGRKYQPGECYFANGVRLMDYLQEMKTAVFSKYDAVTVGEMPYLEDEEQRLRMVAAEEGVLNMIFTFEMIGLDIVPEKGRFSNKAWKVCELKDIVAKACKLVNQDGWHTLFCENHDQPRSVTRFCDDSDEHRVAGTKLLSIMQTSLPGTLYVYQGEELGMRNVPKSWGFEEYIDIESVSYIKNVCAQFPEGSPERKEAKNLLRLKARDNARTPMQWDSTSNGGFCPEGVKPWMRVNDDYTMVNAALQTSAGQATDRTMLVSPYRFWQRSIQIRKKFKDLLVYGDLEIIDGTHANVFAFKRISNGRHTITILNFSKEEVSFKFPEGEGVRGWALGSYDVLSLARPWTGEIQLLPWEGLLGIA

SEQ ID NO: 1797 - DNA, 1716 bp, Gibberella moniliformis
  CDS (1)..(1716)
atgggtagcacggatcaaagtctgcgagcctggtggaaagagagctcggtgtatcaagtctaccctgcttcttaccaagattccactggctctggtgttggagacctgaagggcatcatctctcgagttgattacctcaaagacttgggggttgatatcgtatggctttcaccaatcttcaagagccctcaggttgatatggggtacgatattagtgactattacacaatcgaccctccatatggtgatgtctcagatgttgatgtcctcaaggacaagctccatgagcgaggcatgaagctcgttctcgacctggtcatgaatcataccagtgatcagcatgagtggttcagggagtctcgaaagtccaaggacaacccctatcgtgattggtacatctggaagcctgcaaagtatgattccgaaggaaacaggcaccctcccaataactgggacgctcatttccaaggaagtgcctgggagtacgacgaaaccacagatgaatactatctctgcctcttctgcaagcagcagccagatcttaactgggagaacccagcagtcagaaaacaagttcacgatgtcatgcgcttctggctcgacagaggcaccgatggtttccgcatggatgtcatcaactttgtcagtaaggaccaggcgttccccgactccgataagactgtacttcgtggtcatgaattctatgcttgtggcccccgatgccacgagtttctcaaagagattggtgctattctgcaagagtacgatgctttcagcgtgggtgagatgccctgtgtgcacgatgagcgtgagttgattaaggctgtccgtggtgaccgtggagagttgagcatgattttccactttgagttgatggatcttgatcatggtgttggcggcaagttcacacctagatcctgggacctttctgagctcaaatctaccactctcaaatggcagaagttcatgtacgacaatggaggctggaacgccctttacttggagaaccatgaccaaccacgggctgtaagccgctttgttcacgatggcaacaagcatcgggtggatagtgcgaagcttatcgccatcttcctgggtttccagtcaggcaccccttttatttaccaaggacaggagattgggatgaccaatgtcccctcagactggggcttggaagaatataaggaccttgactgccttcgacattgggatcttcacaaaaacgatgatgaggcggctcgaaactcctacaaggtggagtatcagaagaagtctcgtgacaatgcccgaactcccatgcaatgggacgcaggccgcaacgctggctttactactgctgatgctaagccttggatgagagtcaacgacaactacaaggaaatcaacgctgcatcgcagacttcagaccctaactctgtgtatagctgctatcgcaaagttctgcagagacgaaaggagttcctagatctatttgtatatggaaacttccaactcgttgacgaaaccaacgagaaggtctttgcatactcacgaagggccgacaacggagagactgctctcgtcgtatgtaacttcacgactgatacagttgcgtggtctttgcctggcaagattcgagcggtgctggtcagctctgctggaagaacacttgatgagttaaacggtggtgagaccaaactggcaccttgcgaagccttcgcggtcctgctcgagtag

SEQ ID NO: 1798 - protein, 571 aa, Gibberella moniliformis
MGSTDQSLRAWWKESSVYQVYPASYQDSTGSGVGDLKGIISRVDYLKDLGVDIVWLSPIFKSPQVDMGYDISDYYTIDPPYGDVSDVDVLKDKLHERGMKLVLDLVMNHTSDQHEWFRESRKSKDNPYRDWYIWKPAKYDSEGNRHPPNNWDAHFQGSAWEYDETTDEYYLCLFCKQQPDLNWENPAVRKQVHDVMRFWLDRGTDGFRMDVINFVSKDQAFPDSDKTVLRGHEFYACGPRCHEFLKEIGAILQEYDAFSVGEMPCVHDERELIKAVRGDRGELSMIFHFELMDLDHGVGGKFTPRSWDLSELKSTTLKWQKFMYDNGGWNALYLENHDQPRAVSRFVHDGNKHRVDSAKLIAIFLGFQSGTPFIYQGQEIGMTNVPSDWGLEEYKDLDCLRHWDLHKNDDEAARNSYKVEYQKKSRDNARTPMQWDAGRNAGFTTADAKPWMRVNDNYKEINAASQTSDPNSVYSCYRKVLQRRKEFLDLFVYGNFQLVDETNEKVFAYSRRADNGETALVVCNFTTDTVAWSLPGKIRAVLVSSAGRTLDELNGGETKLAPCEAFAVLLE

SEQ ID NO: 1799 - DNA, 1800 bp, Anopheles gambiae
  CDS (1)..(1800)
atggccctctactactggctagctttactactgttgggctggtctactgtgaccgcccagaaggattggtgggaaagtgcgagcttctatcaaatctatccgcgatcgtttcaagatagtaacggcgatggaataggcgatcttaatggcatcaaaagtcggttgccgtatctgaagtcactcggtatgactgcattttggctttccccgatctacccttcgccgatggccgactttgggtatgatatctccaactttatggacattcatccgagctttggaacgttggctgactttaagcagctggtggaagaagcgaaaaaactgcaattacgcatcatcctcgacttcgtgcctaaccattcgagcgacgagcatgagtggttcaagaaaagcgttcagcgagtaagtgggtacgaagactattacgtgtggcaggatcccaaaccgggcacggaacgcgaccctccaaacaactgggttgcagcatggtacggttcggcgtgggaatggaatgacgagagaaagcaattttatctgcaccagtttcacaagaagcagcccgatctgaactaccgcaacccggccgtggtgcaggctatgaaggatgtgttgcgcttctggttggaccagggcgtcgacggcttccgtattgatgcggtcccgtggctgttcgagacggtgggtttcccggacgaacctgttagcggtcattccaccgatccgttaagtcagaactaccttacccacatttatacgctcgatcaaccggaaaccgttgacatgatgtatcaatggcgggaattgatggatcagtacaaacaagagcacaataccaccaccaaagtgctcatgaccgaggcatggtcctcgttggatgttgtaaaaacgtacttcaacgacagtaacaaccggcaaggatcgcaaatgccgttcaacttccagttaatcatgcggctggatcaaaattctaaagcatccgattttcagacggttattaactcgtggctggatatcattcctcctggccacacgcccaactgggtgcttggtaatcacgacaaacgtcgtgtttcgtcacggatgggtggagatcatatggtagacataatggcaatgatcgagctcaccttacccggcataacggtcacttaccagggagaagaaattggaatgcatgacgttgatatctcgtgggcggacactcaagatcctgctgcatgccagctgaccgaagagacgtatcaggaaggtacacgcgacccagccagaacaccgttccagtgggattctactgcaaacgcaggttttacgaacgcttctgtaaaaccgtggcttccgctagctaccgattatccgctggtgaacgtaaaaacacaacaagaatcagcccaaaacagtcatataaaggtgttcaaggagctgatgaacttacgcggcacaaacacgcttatctggggctcgtttaagtcactggtacttggcgaaaatgtgtacgctatactgcgttctttccccaacgacaaacgaacatatgtcgtgctggcaaacattggctccaagagcgaaataattgacgctacaaaactggacaacagtttaccgaacgagcttgtgtttcgcgtggtaagcgtatcgtcaaatcatatcaccggagaatcggtcgcaacaaacaacattcttttacagccttacgaagccgtagttttggctaaccatgcaattcgactggcgcagcagctttatgtattgatcggtgcttttggtatgttggtgggtgtgcaattgtttaaggcgtaa

SEQ ID NO: 1800 - protein, 599 aa, Anopheles gambiae
MALYYWLALLLLGWSTVTAQKDWWESASFYQIYPRSFQDSNGDGIGDLNGIKSRLPYLKSLGMTAFWLSPIYPSPMADFGYDISNFMDIHPSFGTLADFKQLVEEAKKLQLRIILDFVPNHSSDEHEWFKKSVQRVSGYEDYYVWQDPKPGTERDPPNNWVAAWYGSAWEWNDERKQFYLHQFHKKQPDLNYRNPAVVQAMKDVLRFWLDQGVDGFRIDAVPWLFETVGFPDEPVSGHSTDPLSQNYLTHIYTLDQPETVDMMYQWRELMDQYKQEHNTTTKVLMTEAWSSLDVVKTYFNDSNNRQGSQMPFNFQLIMRLDQNSKASDFQTVINSWLDIIPPGHTPNWVLGNHDKRRVSSRMGGDHMVDIMAMIELTLPGITVTYQGEEIGMHDVDISWADTQDPAACQLTEETYQEGTRDPARTPFQWDSTANAGFTNASVKPWLPLATDYPLVNVKTQQESAQNSHIKVFKELMNLRGTNTLIWGSFKSLVLGENVYAILRSFPNDKRTYVVLANIGSKSEIIDATKLDNSLPNELVFRVVSVSSNHITGESVATNNILLQPYEAVVLANHAIRLAQQLYVLIGAFGMLVGVQLFKA

SEQ ID NO: 1801 - DNA, 1704 bp, Apis mellifera
  CDS (1)..(1704)
atgaaggcagtaatcgtattttgccttatggcattgtccattgtggacgcagcatggaagccgctccctgaaaacttgaaggaggacttgatcgtgtatcaggtctacccgagaagcttcaaggatagcaatggagatggtattggtgatatcgaaggtattaaagaaaaattggatcattttctcgaaatgggggtcgacatgttttggttatcccctatttatccaagccctatggtcgattttggttacgacatttcgaattacaccgacgttcatcccatatttggcaccatatcagacttagataatctagtcagtgctgcacatgagaaaggattgaagataatcttggatttcgtcccgaatcatacatctgatcaacacgaatggttccagttgagtttgaaaaacattgaaccttataacaactattacatttggcatccaggaaaaattgtaaatggcaaacgtgttccaccaactaattgggtaggcgtgtttggtggatcagcttggtcgtggcgggaagaacgacaggcatattatctgcatcaatttgcaccagaacaaccagatctaaattactataatccagttgtactggatgatatgcaaaacgttctcagattctggctgagaaggggatttgatggtttcagagtagatgctctgccttacatttgcgaagacatgcgattcttagacgaacctctatcaggtgaaacaaatgatcccaataaaactgagtacactctcaagatctacactcacgatatcccagaaacttacaatgtagttcgcaaatttagagatgtgttagacgaattcccgcaaccaaaacacatgcttatcgaggcatacacgaatttatcgatgacgatgaagtattacgattacggagcagattttcccttcaattttgcattcatcaagaatgtctctagggattcaaattcatcagacttcaaaaaattgatcgataattggatgacgtacatgccaccaagtggtattcctaactgggtgcccggaaatcacgatcaattgagattggtgtcgagatttggagaggagaaggcccgtatgatcaccacgatgtcgcttttgctgccaggtgttgccgtgaattactacggtgatgaaattggtatgtcggatacttatatctcgtgggaggatacgcaggatccgcagggatgcggcgccggtaaagaaaactatcaaacgatgtcgagagatcccgcgagaacgccattccaatgggacgactcagtttctgctggattttcctcaagctctaatacctggcttcgtgtcaacgaaaattacaagactgtcaatctagctgctgaaaagaaggacaagaactcgttcttcaatatgttcaagaaatttgcgtcgctgaaaaaatcgccatactttaaagaggccaatttaaatacgaggatgctgaacgacaatgttttcgcattctctagggaaaccgaagataatggatctctttacgcaatattgaacttctcgaacgaggaacaaatcgtggatttgaaagcgttcaataacgtgccgaaaaaattgaatatgttttacaacaattttaactctgatataaagtccatctccaacaatgaacaagtaaaagtttctgctttaggatttttcatcttaatttctcaagatgctaaatttggaaacttttaa

SEQ ID NO: 1802 - protein, 567 aa, Apis mellifera
MKAVIVFCLMALSIVDAAWKPLPENLKEDLIVYQVYPRSFKDSNGDGIGDIEGIKEKLDHFLEMGVDMFWLSPIYPSPMVDFGYDISNYTDVHPIFGTISDLDNLVSAAHEKGLKIILDFVPNHTSDQHEWFQLSLKNIEPYNNYYIWHPGKIVNGKRVPPTNWVGVFGGSAWSWREERQAYYLHQFAPEQPDLNYYNPVVLDDMQNVLRFWLRRGFDGFRVDALPYICEDMRFLDEPLSGETNDPNKTEYTLKIYTHDIPETYNVVRKFRDVLDEFPQPKHMLIEAYTNLSMTMKYYDYGADFPFNFAFIKNVSRDSNSSDFKKLIDNWMTYMPPSGIPNWVPGNHDQLRLVSRFGEEKARMITTMSLLLPGVAVNYYGDEIGMSDTYISWEDTQDPQGCGAGKENYQTMSRDPARTPFQWDDSVSAGFSSSSNTWLRVNENYKTVNLAAEKKDKNSFFNMFKKFASLKKSPYFKEANLNTRMLNDNVFAFSRETEDNGSLYAILNFSNEEQIVDLKAFNNVPKKLNMFYNNFNSDIKSISNNEQVKVSALGFFILISQDAKFGNF

SEQ ID NO: 1803 - DNA, 1764 bp, Bacillus sp
  CDS (1)..(1764): transl_table=11
ttgtccaccgccttgacgcagacctcaacgaactcgcagcaatcgcccattcgccgggcgtggtggaaggaagcggtcgtataccagatttatccgagatccttcatggactcgaatggcgacggtatcggcgatttgcgcggcatcctctcgaagctggactacctcaaactgctcggcgtggatgtgttgtggctgaatcccatctacgactcgccgaatgacgacatgggctatgacatccgcgactactacaagattatggaagagttcgggacgatggaggactttgaggagctgctgcgcgaggtgcacgcccgcggcatgaagctggtcatggacctggtggccaaccatacctcagacgagcacccgtggttcatcgagtcacgctcctcgcgcgacaacccgtaccgcgactggtacatttggcgcgatccgaaagacggccgcgagccgaacaactggttgtcgtatttcagcggatcggcctgggaatacgacgagcgcacggggcagtactacctgcacttgttcagccgcaggcagccggacttgaactgggaaaacccaaaggttcgcgaggccatcttcgagatgatgcggttctggctcgacaaagggatagatggcttccgcatggatgtcatcaacgccatcgccaaggccgagggtctgccggacgcgccggcgcgtcccggagagcgttacgcttggggcggccagtactttctcaatcagccgaaggtccacgagtacctgcgcgagatgtatgataaggtgctctctcattacgacatcatgaccgtcggcgagaccggcggtgtgacgacaaaggatgcactcttgtttgccggtgaagaccggcgcgagctgaacatggtcttccagtttgaacacatggacatcgatgcgaccgacggcgacaagtggcggccgcggccgtggcgattgaccgagttgaaaaccatcatgacgcggtggcaaaatgatttgtacggcaaggcctggaacagcctgtactggaccaaccatgaccagccccgcgcggtgtcgcggtttggcaacgacggtccctaccgcgtggagtcagccaagatgcttgccaccgtcctgcacatgatgcaggggaccccctacatctaccagggcgaggaaatcggcatgacgaactgtccgtttgactctattgacgagtaccgggacgtcgagatccacaacctgtggcggcaccgtgtgatggaaggcggccaggaccctgccgaggtgctgcgcgtcatccagctcaaagggcgggacaacgcgcgcacgcccatgcagtgggacgattcaccgaacgccgggttcaccaccggtacgccgtggatcaaggtgaacccaaactatcgcgagattaacgtcaagcaggccctggcggacccgaactcgattttccattactaccgccgcctgattcagttgcgcaaacagcatcccatcgtggtgtacggcaagtatgacctgattctgccggatcacgaggagatttgggcttacacgcgcacgctgggagacgagcgctggctgattgtggccaacttctttggcggcactccggagttcgagctgccgccggaagtccggtgcgagggcgcagagctggtgattgccaactacccggtggacgattcggaagcgggcggtccagcggccgctggggcacctcaccgcttccgtctgcgcccgtacgaatgccgcgtctaccggctgctcggctggcactga

SEQ ID NO: 1804 - protein, 587 aa, Bacillus sp
MSTALTQTSTNSQQSPIRRAWWKEAVVYQIYPRSFMDSNGDGIGDLRGILSKLDYLKLLGVDVLWLNPIYDSPNDDMGYDIRDYYKIMEEFGTMEDFEELLREVHARGMKLVMDLVANHTSDEHPWFIESRSSRDNPYRDWYIWRDPKDGREPNNWLSYFSGSAWEYDERTGQYYLHLFSRRQPDLNWENPKVREAIFEMMRFWLDKGIDGFRMDVINAIAKAEGLPDAPARPGERYAWGGQYFLNQPKVHEYLREMYDKVLSHYDIMTVGETGGVTTKDALLFAGEDRRELNMVFQFEHMDIDATDGDKWRPRPWRLTELKTIMTRWQNDLYGKAWNSLYWTNHDQPRAVSRFGNDGPYRVESAKMLATVLHMMQGTPYIYQGEEIGMTNCPFDSIDEYRDVEIHNLWRHRVMEGGQDPAEVLRVIQLKGRDNARTPMQWDDSPNAGFTTGTPWIKVNPNYREINVKQALADPNSIFHYYRRLIQLRKQHPIVVYGKYDLILPDHEEIWAYTRTLGDERWLIVANFFGGTPEFELPPEVRCEGAELVIANYPVDDSEAGGPAAAGAPHRFRLRPYECRVYRLLGWH

SEQ ID NO: 1805 - DNA, 1707 bp, Aspergillus parasiticus
  CDS (1)..(1707)
atggccacccagcacaagacacagtcatcgcctgttaatgcggcctggtggaaaaaagcctcggtctatcaaatttatccagcttcgttcaaagactccaatggcgatggaatcggcgatatccccgggattatctcggaacttgactacctgaaagcccttgggatagatctcgtttggctctctccgatccttcagtccccgcaggtggacatgggctacgatgtctctgactattatcaaattcaccccccatacggtacagtcgaagacgtggatgcgctcattcagggtttacatcagcgagggatgagatatgtcatggaccttgttgtaaatcatacttcagaccagcacgagtggttcaaacagtctagatcctcttcagacaatgaataccgagactggtacatatggaaaaagcccaagtacgatgcaaatggtgtccgccagccgccgaataactggagcgcctattttggaggttcggcatggcagtacgacgaaacaactgatgaatattacctgcacctattcgcaccggagcagccagacctcaactgggaaaaccccaaagtccgctctgccgtgcaccagatcatgaggtattggctcgataaaggcgtcagtggattccgcatggatgtgatcaacatgatcagcaaggaccaaagcttcccagatgcgcccatcaccgacccaaaggcccaatggcagcatggggccgatgtactactgctgcggaccacgtcttcacgaatacctgcaagagctggggagggttctgaaggaatacgatgccttttcctgggctttgaccgcggcgaattggccatggcatttcagttcgagatcatggatatcgaccatggccctgggggcaaattctctccgcacaaatatcgaatgtcggacctgaagcatatcgtctccaaatggcaggacttcatgtacgagaatgaaggctggaacgccctctacctcgaaaaccatgaccagggaaggacgatatcacgatttacctcggccggtccggaataccgcgcgacggcggggaagatgctcgccaccttcctgggtcttcaagggggcactcctttcgtataccagggccaggaaataggtctggggaatgttccagagacctggggcattgagcaattcagagacatcgagactttgaattattggaacgagatagaacgagaaatggctgcatatcccaacgacacagagcttcacaaggtgacattagagcaattccgcgtaaagtctcgcgacaatggacgcaccccgatgcaatggaccagtggcaaatttgcagggtttacagctgcgcacaacggtccgtggattgatgttcatgacgactatgaagactggaatgccgcctcccaggtgggaaacccaaatagtgttttccaacactgggcaaaggtgctctcgctgcgcaaagcacataagaggctctttgtatatggctcgtacaaattgattgatgaagcgaataacgatttattcacttatctgcgagtttacggaggccaatcagctttggtgttggccaacttcacaggcaaagaagtgagctgggttgttcctgcggaaaccatttccattctcaaaaatggcgctgttcttttggaaagttatcagcgccacccgtccagtgcgaccggatggtacaatcgctgtaatgccatttga

SEQ ID NO: 1806 - protein, 568 aa, Aspergillus parasiticus
MATQHKTQSSPVNAAWWKKASVYQIYPASFKDSNGDGIGDIPGIISELDYLKALGIDLVWLSPILQSPQVDMGYDVSDYYQIHPPYGTVEDVDALIQGLHQRGMRYVMDLVVNHTSDQHEWFKQSRSSSDNEYRDWYIWKKPKYDANGVRQPPNNWSAYFGGSAWQYDETTDEYYLHLFAPEQPDLNWENPKVRSAVHQIMRYWLDKGVSGFRMDVINMISKDQSFPDAPITDPKAQWQHGADVLLLRTTSSRIPARAGEGSEGIRCLFLGFDRGELAMAFQFEIMDIDHGPGGKFSPHKYRMSDLKHIVSKWQDFMYENEGWNALYLENHDQGRTISRFTSAGPEYRATAGKMLATFLGLQGGTPFVYQGQEIGLGNVPETWGIEQFRDIETLNYWNEIEREMAAYPNDTELHKVTLEQFRVKSRDNGRTPMQWTSGKFAGFTAAHNGPWIDVHDDYEDWNAASQVGNPNSVFQHWAKVLSLRKAHKRLFVYGSYKLIDEANNDLFTYLRVYGGQSALVLANFTGKEVSWVVPAETISILKNGAVLLESYQRHPSSATGWYNRCNAI

SEQ ID NO: 1807 - DNA, 1770 bp, Saccharomyces cerevisiae
  CDS (1)..(1770)
atgactatttcttctgcacatccagagacagaaccaaagtggtggaaagaggccacgttctatcaaatttacccagcaagtttcaaagattctaatgacgatggctggggtgacatgaaagggattgcctccaagctggagtacatcaaagagcttggtgccgatgccatttggatctcaccattctacgactcgccacaagatgatatgggttacgatattgccaactacgaaaaggtctggccaacatatggtacgaatgaagactgctttgccttgatcgaaaagacacataagcttggtatgaaatttatcaccgacttggtcatcaatcactgttccagcgaacatgaatggttcaaagagagcagatcctcgaagactaatccaaagcgtgactggttcttctggagacctcctaaaggttatgacgccgaaggcaagccaattcctccaaacaattggaaatcctattttggtggttccgcatggaccttcgatgaaaagacacaagaattctacttgcgtttgttttgctccactcaacctgatttgaattgggagaatgaagactgtagaaaggcaatctacgaaagtgccgttggatactggttagaccatggtgtagacggctttagaattgatgtcggaagtttgtactccaaagttgtaggtttaccagatgctcctgttgttgacaaaaactcgacttggcaatccagtgatccatacacattgaatggaccacgtattcacgagttccatcaagaaatgaatcaattcatcagaaacagagtgaaggatggcagggagattatgacagttggtgaaatgcaacatgcctccgacgaaactaagagactttatacgagtgcttcaagacacgaacttagtgagttatttaacttttcccacactgatgtggggacttcacctttgttccgttacaacttggtcccatttgaactgaaggattggaagattgcccttgctgagctgttcaggtacattaatggtacagattgttggtcaacaatctatctggaaaatcacgaccaacctcgttcaattacgagatttggtgacgattctcccaagaaccgtgttatttctggtaagttactctctgtgttgctaagtgccttgaccggtactctatatgtgtatcagggacaagagcttggccaaatcaatttcaagaactggcctgttgaaaagtacgaggatgtcgaaatcagaaacaactacaatgccattaaagaagagcatggggaaaactcagatgagatgaaaaagtttttagaagccattgcccttatctccagggaccatgctagaacacctatgcaatggtctcgtgaggagccaaatgctggtttttctggtcctagtgctaaaccatggttttacttgaacgactctttcagagaaggcattaacgtcgaagatgaaatcaaggatcccaactcggttttgaacttctggaaggaggccttgaagtttagaaaggcgcataaagacattactgtgtacggatacgatttcgagtttattgatttagacaataagaagttgtttagcttcacaaagaagtacaacaataaaacattgtttgcggctttgaactttagctctgatgcgacagatttcaagattccaaatgatgattcatcgttcaagttagagtttggaaactatccaaagaaggaggtagatgcctcttccagaacattgaagccatgggaaggaagaatatatatcagcgaatga

SEQ ID NO: 1808 - protein, 589 aa, Saccharomyces cerevisiae
MTISSAHPETEPKWWKEATFYQIYPASFKDSNDDGWGDMKGIASKLEYIKELGADAIWISPFYDSPQDDMGYDIANYEKVWPTYGTNEDCFALIEKTHKLGMKFITDLVINHCSSEHEWFKESRSSKTNPKRDWFFWRPPKGYDAEGKPIPPNNWKSYFGGSAWTFDEKTQEFYLRLFCSTQPDLNWENEDCRKAIYESAVGYWLDHGVDGFRIDVGSLYSKVVGLPDAPVVDKNSTWQSSDPYTLNGPRIHEFHQEMNQFIRNRVKDGREIMTVGEMQHASDETKRLYTSASRHELSELFNFSHTDVGTSPLFRYNLVPFELKDWKIALAELFRYINGTDCWSTIYLENHDQPRSITRFGDDSPKNRVISGKLLSVLLSALTGTLYVYQGQELGQINFKNWPVEKYEDVEIRNNYNAIKEEHGENSDEMKKFLEAIALISRDHARTPMQWSREEPNAGFSGPSAKPWFYLNDSFREGINVEDEIKDPNSVLNFWKEALKFRKAHKDITVYGYDFEFIDLDNKKLFSFTKKYNNKTLFAALNFSSDATDFKIPNDDSSFKLEFGNYPKKEVDASSRTLKPWEGRIYISE

SEQ ID NO: 1809 - DNA, 1731 bp, Arthrobacter globiformis
  CDS (1)..(1731): transl_table=11
atgaccatcgaggaaaccgaggaagaagcaacctaccgggccggcagggaatggttcaagagtgccgtcgtgtaccagatctacccccgcagcttcgccgattccgacggtgacggcgtgggcgacctccgcgggatcatcggcaagctggactaccttcagaagctgggcgtcgacgtcgtctggctttccccggtgtaccgctcgccgcaggatgacaacggctacgacatcagcgactaccgggagatcgaccccgtcttcggcgggctggagaccctggacgagctgcttgacggcctgcacgcccgcggcatgaagctggtcatggacctggtggtcaaccacacctccgacgagcacccctggttcgtggagtcccgttccagcaaggacagcccgaagcgggactggtactggtggcggcccgcacgggaaggggcggagcccggcacggctggggcagagcccaacaactgggggtccgcgttctcgggcccggcctgggagtacgacgccgcgaccggggagtactacctccacctcttttcgaggaaacagccggacctcaactgggaaaacccggaggtccgggccgccgtctacgacatgatgaactggtggctggaccgcggcgtggacggcttccggatggacgtcatcaacttcatctccaaggaccagaccctgccggacggcccccgggccgacggcatgctgttcggcgacggaggaccccactacatctgcggcccccgcatccatgaattcctgcaggagatgcaccaggaagtgtttgccgggcgggacaaggacctgctcaccgtgggcgagatgcccggggtgacggtggatgaagccgtcctgtttaccgaccccggacgccgggaggtggacatggtgttccagttcgagcacgtggccctggaccaggagggcggcaacaagtggcgccccaagaagctgctgctgaccgacctgaagaaatccctcggccgatggcaggaagccctgggggagcgcggctggaacagcctctattggggcaaccacgaccaggcccgggccgtctcccgcttcggggacgacggcgaataccgcgagcagtccgccaagatgctggccgccgtccttcacctgcaccgcggcaccccctacgtgtaccaaggcgaagagctgggcatgacgaacatggcgttcggcgccatcagcgactaccgcgacatcgaggttctcaaccaccaccgggaggcgaccacccacctcggccacaccgatgccgaggtcctcgcggccctggctccgctgaaccgggacaacgcccggacgcccgtgcagtgggatgccagccgtcacggcggcttcaccacgggcgcgccgtggatcgcggtcaacccgaacgccaacaccatcaacgccgcagcgcaggtcgacgaccccgactcggtcttcagtttctaccgccgcgtgatcgcgctgcgccacgccgatccggtggtggcctacggtgatttcaccatgctgctgcccgacgacgaacacgtctacgcgttccggcgctccctgcctgacgccgaactgctggtcctgggcaacttttcgggaaccgggcagtcggccggcgttgacggttcctggggcgacgccgagctggtgcttggcaactacccggcggcgcccggcctcgggctgcggccctgggaagtgaaggtgttccgccggaacctgtag

SEQ ID NO: 1810 - protein, 576 aa, Arthrobacter globiformis
MTIEETEEEATYRAGREWFKSAVVYQIYPRSFADSDGDGVGDLRGIIGKLDYLQKLGVDVVWLSPVYRSPQDDNGYDISDYREIDPVFGGLETLDELLDGLHARGMKLVMDLVVNHTSDEHPWFVESRSSKDSPKRDWYWWRPAREGAEPGTAGAEPNNWGSAFSGPAWEYDAATGEYYLHLFSRKQPDLNWENPEVRAAVYDMMNWWLDRGVDGFRMDVINFISKDQTLPDGPRADGMLFGDGGPHYICGPRIHEFLQEMHQEVFAGRDKDLLTVGEMPGVTVDEAVLFTDPGRREVDMVFQFEHVALDQEGGNKWRPKKLLLTDLKKSLGRWQEALGERGWNSLYWGNHDQARAVSRFGDDGEYREQSAKMLAAVLHLHRGTPYVYQGEELGMTNMAFGAISDYRDIEVLNHHREATTHLGHTDAEVLAALAPLNRDNARTPVQWDASRHGGFTTGAPWIAVNPNANTINAAAQVDDPDSVFSFYRRVIALRHADPVVAYGDFTMLLPDDEHVYAFRRSLPDAELLVLGNFSGTGQSAGVDGSWGDAELVLGNYPAAPGLGLRPWEVKVFRRNL

SEQ ID NO: 1811 - DNA, 1809 bp, Aspergillus oryzae
  CDS (1)..(1809)
atggccacccagcacaagacacagtcatcgcctgttaatgcggcctggtggaaagaggcctcggtctatcagatttatccagcttctttcaaagactccaatggcgatggaatcggcgatatccccgggattatctcggaacttgactacctgaaagcccttgggatagatctaaattggctctctccgatccttcagtccccgcaggtggacatgggctacgatgtctctgactattatcgaattcaccccccgtacggtacagtcgaagacgtagatgcgctcattcagggtttacatcagcgagggatgagatatgtcatggaccttgttgtaaatcatacttcagaccagcacgagtggttcaaacagtctagatcctcttcagacaatgaataccgagactggtacatatggaaaaagcccaagtacgatgcaaatggcgtccgccagccgccgaataactggggcgcctattttggaggttctgcatggcagtacgacgaaacaactgatgaatattatctgcacctattcgcaccggagcagccagacctcaactgggaaaaccccaaagtccgctctgccgtgcaccagatcatgaggtattggctcgataaaggcgtcagtggattccggatggatgtgatcaacatgatcagcaaggaccaaagcttcccagatgcgcccatcaccgacccaaaggcccaatggcagcatggggcgatgcactattgctgcggaccacgtcttcacgaatacctgcaagagctggggagggttctgaaggaatacgatgccttttccgtgggtgagatgccgaatgtctatgatccggtggaaattgggaaggcagtgggctttgaccgcggtgaattggccatggcatttcagttcgagatcatggatatcgaccatggccctgcgggcaaattctctccacacaaatatcgaatgtcggacctgaagcatatcgtctccaaatggcaggacttcatgtacgagaacgaaggctggaacgccctctacctcgaaaaccatgaccagggaaggacaatatcacgatttacctcggccggcccagaataccgcgcgacggcggggaagatgctcgctacgttcctgggtcttcaaggtggcactcctttcgtataccagggtcaggaaataggtctggtgaatgttccagagacctggggcattgagcaattcagagacatcgagactttgaattattggaacgagataacggctgcatatcccaacgacacagagcttcacaaggtgacatcacagcaattccgcgtaaagtctcgcgacaatggacgcaccccgatgcaatggaccagtggcaaatttgcagggtttacagctgcgcacaacggtccgtggattgatgttcatgacgactatgaagactggaatgccgcctcccaggtggggaacccaaatagtgttttccaacactgggcaaaggtgctcgcgctgcgcaaagcacataagaggctctttgtatatggctcgtacaaattgattgatgaagcgaataacgatctattcacgtatctgcgagtgtacggaagccaatcggctttggtgttggccaacttcacaggcaaagaagtgagctgggttgttcctgcggaaaccatttccattctcaaaaatggcgctgttcttttggaaagttatcagcgccaccgtccagtgcgaccggatggtacaattgctgtaatgccatttgaatcgtttgtgatgtttctagatagtccaaatgccagggttggagctggtgggggaaaactctaa

SEQ ID NO: 1812 - protein, 602 aa, Aspergillus oryzae
MATQHKTQSSPVNAAWWKEASVYQIYPASFKDSNGDGIGDIPGIISELDYLKALGIDLNWLSPILQSPQVDMGYDVSDYYRIHPPYGTVEDVDALIQGLHQRGMRYVMDLVVNHTSDQHEWFKQSRSSSDNEYRDWYIWKKPKYDANGVRQPPNNWGAYFGGSAWQYDETTDEYYLHLFAPEQPDLNWENPKVRSAVHQIMRYWLDKGVSGFRMDVINMISKDQSFPDAPITDPKAQWQHGAMHYCCGPRLHEYLQELGRVLKEYDAFSVGEMPNVYDPVEIGKAVGFDRGELAMAFQFEIMDIDHGPAGKFSPHKYRMSDLKHIVSKWQDFMYENEGWNALYLENHDQGRTISRFTSAGPEYRATAGKMLATFLGLQGGTPFVYQGQEIGLVNVPETWGIEQFRDIETLNYWNEITAAYPNDTELHKVTSQQFRVKSRDNGRTPMQWTSGKFAGFTAAHNGPWIDVHDDYEDWNAASQVGNPNSVFQHWAKVLALRKAHKRLFVYGSYKLIDEANNDLFTYLRVYGSQSALVLANFTGKEVSWVVPAETISILKNGAVLLESYQRHRPVRPDGTIAVMPFESFVMFLDSPNARVGAGGGKL

SEQ ID NO: 1813 - DNA, 1728 bp, Brevibacterium fuscum var
  CDS (1)..(1728): transl_table=11
atgaccacgctgcaaccggcaacccgccacgcaagcctcaaagcgactgatgaatggtggaaagcctccgtcgtttaccaggtctacccccggagtttcgctgactccaacggcgacgggatcggcgacatccagggcatcatcagccggcttgatcacctccaggaactgggcgtggacgtcctctggctttcacccgtctatgcttcgccgcaggacgataacggctatgacatcagcgactactactccatcgatccgaccttcggaacactggaagacctggacgaactgatcggcgagttgcatacccgaggcatgaaattggtgatggatctggtcgtgaaccacacctcagatgaacacgagtggttccaggaatcacgatcggaccgtacccatcccaaacgggattggtacatctggcgggacccgcaccacggtgccgaacccaacaattgggggtcattcttctcgggatccgcctgggaatgggatgaacaaaccggacagtacttcctccacctcttctccaaaaagcaaccggatctcaactgggagaaccccgaagtacgcgccgcaatctaccggatgatgaactggtggctggatcggggcattgacggcttccgcatggacgtcatcagtttcatctcaaagcaccctgaccttccagacggtgccgtgggcaagggcgggatatggggtgacggcatcccattcttcggttctgggccgcgcgtccacgaatacctgcaggaaatgcaccgtgaggtatttgctcaccgcgacgccgatctactgaccgtgggtgaaatggtcgacgtcacacctgaactggcgcggctctacaccgaccagcggcgcaaagaactcgacatggtgttccacttcgagcacgtaggactcgaccacggcgcggacggcaagttcagccgcaaagccctcgacctggtcgcggtgaagcgctccttcgcccgatggcaggacgcattgtccgacgtcggctggaacagcctctactggaacaaccacgatcaaccacgagttgtgtcacgcttcggcgatgacagtgatcattggtatgaatcggcgacagcctttgccaccatcctccacctgatgcgtggaacgccctacatctaccagggcgaggagctgggcatgacaaatatgcccttcacgagcatcgatgagttccgcgacctcgagagcctcaactattaccggcaggcactggaacgagatggggctgacgcagcaaccgttctcgccggcatcaccgtcggcggacgcgataacgcgcgcaccccggtccagtgggacgcctcagtccacgccggattcaccaccggtgaaccttggataccagtaaaccccaaccacggatggctgaatgccgccactcaacgccaggaccccgagtccgtttacgggtggtacaaacggctcatccaactccgccacgaggaaccggtgattgtggacggaaggttcaacctcatacttgccgacgatccccaaatcttcgcctatacccgcacggatagtgacaccgaactcttcatcgccgccaactgctcagcggacccagctgcgctacctggcgacgttaccgaggaatgggacgacgcagacgtcctgctcgctaaccatccaggcgtccgtgagctcggaagaacgctcctgccctgggaggtgatcgttctacgacgcggcctcgcgtaa

SEQ ID NO: 1814 - protein, 575 aa, Brevibacterium fuscum var
MTTLQPATRHASLKATDEWWKASVVYQVYPRSFADSNGDGIGDIQGIISRLDHLQELGVDVLWLSPVYASPQDDNGYDISDYYSIDPTFGTLEDLDELIGELHTRGMKLVMDLVVNHTSDEHEWFQESRSDRTHPKRDWYIWRDPHHGAEPNNWGSFFSGSAWEWDEQTGQYFLHLFSKKQPDLNWENPEVRAAIYRMMNWWLDRGIDGFRMDVISFISKHPDLPDGAVGKGGIWGDGIPFFGSGPRVHEYLQEMHREVFAHRDADLLTVGEMVDVTPELARLYTDQRRKELDMVFHFEHVGLDHGADGKFSRKALDLVAVKRSFARWQDALSDVGWNSLYWNNHDQPRVVSRFGDDSDHWYESATAFATILHLMRGTPYIYQGEELGMTNMPFTSIDEFRDLESLNYYRQALERDGADAATVLAGITVGGRDNARTPVQWDASVHAGFTTGEPWIPVNPNHGWLNAATQRQDPESVYGWYKRLIQLRHEEPVIVDGRFNLILADDPQIFAYTRTDSDTELFIAANCSADPAALPGDVTEEWDDADVLLANHPGVRELGRTLLPWEVIVLRRGLA

SEQ ID NO: 1815 - DNA, 1686 bp, Bacillus subtilis
  CDS (1)..(1686): transl_table=11
atgagtgaatggtggaaagaagctgtcgtttatcaaatttacccgcgcagtttttatgatgccaatggagatggattcggggatttgcaaggtgtgattcaaaagctggattacatcaaaaatctcggggcggatgtcatctggctctccccggtatttgattccccgcaggatgacaacggatatgatatcagcgattacaaaaacatgtacgaaaagtttgggacaaatgaagatatgtttcagctgattgatgaagcccataaacgcggaatgaaaatcgtcatgcatttggtcgtgaaccacacatcagatgagcatgcttggtttgctgaaagccgcaagtcgaaggacaatccttaccgggattattatttttggaaagatcctaaatcggacggctcagagccgaataattggggatcgatcttttcaggctcagcgtggacatacgatgaaggaacagggcagtattatttgcactacttttcgaaaaaacagcctgatttaaattgggaaaacgaagccgttcgccgggaagtttatgatgtaatgagattctggatggatagaggcgttgacggctggcggatggatgtaatcggctctatttctaaatacaccgattttccggactacgaaacggatcacagccgcagctatattgttggccgttatcactctaacggcccacgtcttcatgattttattcaagagatgaacagggaagtgctttctcattacgactgcatgacagtcggagaggcaaacggctctgatattgaagaggcgaaaaagtacacagatgcaagcaggcaagagctgaatatgatctttacatttgaacatatggatattgatacagaacaaaactcgccaaatgggaaatggcagatcaagccgtttgatttgattgctttaaaaaagacgatgacaaggtggcagaccgggttaatgaatgtcggctggaataccctgtattttgagaaccatgaccagccgagggttatttcccgctggggcaatgatgggaagctgcgtaaagaatgtgcgaaggcatttgcaacggatctggacggcatgaaaggaacgccgtttatttaccagggagaagaaatcggcatggtcaaccgcgatatgccgctggagatgtatgatgatcttgaaataaagaatgcatatcgtgaactagtcgtcgaaaacaaaacgatgtcagaaaaagagtttgtcaaagccgtgatgataaaaggaagggatcatgcgagaacaccgatgcagtgggatgccggaaaacatgcgggattgacagccggagacccgtggataccggtaaattcccgctatcaagatatcaatgtgaaagagtctttggaagatcaagattcgattttcttttactatcagaagctcattcaattacgaaagcaatataagattatgatatatggcgattatcagctgttgcaggagaatgatccgcaggtcttttcttaccttcgagaatatcgaggggaaaagcttcttgtcgttgtgaatttatcggaagaaaaggctctgttcgaagcgcctccagaactgattcatgagcgttggaaagtgctgatttcaaactatccgcaggagcgggctgacttaaagagtattagcctcaaaccttatgaagcagtgatgggcattagtatatga

SEQ ID NO: 1816 - protein, 561 aa, Bacillus subtilis
MSEWWKEAVVYQIYPRSFYDANGDGFGDLQGVIQKLDYIKNLGADVIWLSPVFDSPQDDNGYDISDYKNMYEKFGTNEDMFQLIDEAHKRGMKIVMHLVVNHTSDEHAWFAESRKSKDNPYRDYYFWKDPKSDGSEPNNWGSIFSGSAWTYDEGTGQYYLHYFSKKQPDLNWENEAVRREVYDVMRFWMDRGVDGWRMDVIGSISKYTDFPDYETDHSRSYIVGRYHSNGPRLHDFIQEMNREVLSHYDCMTVGEANGSDIEEAKKYTDASRQELNMIFTFEHMDIDTEQNSPNGKWQIKPFDLIALKKTMTRWQTGLMNVGWNTLYFENHDQPRVISRWGNDGKLRKECAKAFATDLDGMKGTPFIYQGEEIGMVNRDMPLEMYDDLEIKNAYRELVVENKTMSEKEFVKAVMIKGRDHARTPMQWDAGKHAGLTAGDPWIPVNSRYQDINVKESLEDQDSIFFYYQKLIQLRKQYKIMIYGDYQLLQENDPQVFSYLREYRGEKLLVVVNLSEEKALFEAPPELIHERWKVLISNYPQERADLKSISLKPYEAVMGISI

SEQ ID NO: 1817 - DNA, 1794 bp, Penicillium minioluteum
  CDS (1)..(1794)
atgggttctattagtgagatcagccaatctactgcagcaccaaagcagagcaggatggcagcgtggtggaaagaaagcaccgtctaccagatctatcctgcatctttcaaagactctgatggagatggcgtcggcgatctcaagggaattatttccaaacttgactacatccagaccctcggcgtggacatcgtttggttaaatccgatttttagctctcctcaagtcgacatgggatatgacatctccgactactacgacatccatccaccgtatggaacgatggaggatgtgaatgtgttggccgatgggcttcagaagcgagggatgaaattgttgatggatttggtcgttaatcatacttcagatcagcatccttggtttcaagatgccatctcttcagtctccaatccgcgtcgtgactggtatatttggaagaagccgataatagataaggatggcaagccccagccacccaacaactggaggtcatattttggaggaagtgcatgggaatacgacgaccgatctggcgaatattacctccacctgtttgcgaaagaacagccggacctcaactgggagaacgtcgaagtgcggaaggcggttcatcgtatcatccgattctggctggacaagggagttcatggcttccgtatggatgtgattaattttatcagcaaggaccagagttttccggatggcgcaattgttagcgactccaagtggcagaatgggtcagcgcactacgcatgcgggccaaggctccatgaatatctgcaggagatcggtgcgatcctcaaggaatacaatgctttctcggtaggagaaatgcccgaagtgaatgactgcgacgaaatcatcaaggctgttggtttcgaacgtggtgagctgaacatgatcttccattttgagatagtaaacctcgatcatggtgaaaacgacaagatcactcctaaaaattggaacatgcaagagttaaagtccgtggtgtcgaagtggcagaaattcatgcttgagaacgacggatggaatgcgctatatctcgaaaaccatgaccagcctcgtattgtttcgcgattcggctcagaccagccggagtatcgtgaattgtcagctaagatgctggcggccttcctgggcttccagagcggcactttgttcatatatcagggtcaggaactgggaatgccgaatgtgccccggcattgggggattgaccaatatcgggatatcgagacgttgaatcattggaaagaggtcgtctcggaaggactggcagatccaatagtctctcttggggagtacaggttgaagtctagggacaatgcgcgcactccaatgcaatgggatgggtcagcaaatgcgggattctccacctcaacgccgtggatttctgttcatgatgactacacgaccctcaatgcggccgcgcaactagccgataaacacagcgtgtatcacttttggagcacaattctaggcctacgaaaagcatttcctgatgttctcgtatacggatcttcgacctcatttccagtgagcatccggatatgttcggctacatgcgagtgtcagatagcggccgagtggcgattgttgtcctcaactttcgcccgtgggctgtcacatggaccccccctgcaattcagcaagatcaaatctgggggaattgtcttgtccaattatcctggccgccgaagtctcaagtgcatttctgaagagccgctcaatctcgagccattggagacatttttgtggcttgaagacatggaagagtcgtcacgcttgtaa

SEQ ID NO: 1818 - protein, 597 aa, Penicillium minioluteum
MGSISEISQSTAAPKQSRMAAWWKESTVYQIYPASFKDSDGDGVGDLKGIISKLDYIQTLGVDIVWLNPIFSSPQVDMGYDISDYYDIHPPYGTMEDVNVLADGLQKRGMKLLMDLVVNHTSDQHPWFQDAISSVSNPRRDWYIWKKPIIDKDGKPQPPNNWRSYFGGSAWEYDDRSGEYYLHLFAKEQPDLNWENVEVRKAVHRIIRFWLDKGVHGFRMDVINFISKDQSFPDGAIVSDSKWQNGSAHYACGPRLHEYLQEIGAILKEYNAFSVGEMPEVNDCDEIIKAVGFERGELNMIFHFEIVNLDHGENDKITPKNWNMQELKSVVSKWQKFMLENDGWNALYLENHDQPRIVSRFGSDQPEYRELSAKMLAAFLGFQSGTLFIYQGQELGMPNVPRHWGIDQYRDIETLNHWKEVVSEGLADPIVSLGEYRLKSRDNARTPMQWDGSANAGFSTSTPWISVHDDYTTLNAAAQLADKHSVYHFWSTILGLRKAFPDVLVYGSSTSFPVSIRICSATCECQIAAEWRLLSSTFARGLSHGPPLQFSKIKSGGIVLSNYPGRRSLKCISEEPLNLEPLETFLWLEDMEESSRL

SEQ ID NO: 1819 - DNA, 1689 bp, Bacillus sp
  CDS (1)..(1689): transl_table=11
gtgcagcatccatggtggaaaaaagcagtcgtatatcaaatttatccaaaaagctttaatgacacaaacggtgacggaatcggtgatttagcgggaattatcgaaaagctcgattatttgaaacaactcggcgtggatgtgattaagctgaagccgatttacaaatcgccgcagcgtgacaatggctatgatattagcgactattttcaaattcacgatgagtatgggacgatggaagattttgaccgcttgttggaagaagtgcatcggcgcggcatgaaattaatcatggatatggtcgtcaaccatacgtcgacagaacatgaatggtttaagcaggcgcggacatcgaaagataatccgtatcgccatttttacatttggcgggatccaaagccggatggaagcgctccgacgaactggcagtcgaagtttggcggctcggcgtgggagtacgatgagaaaacaggtcaatattatttgcacttgtttgacgtgacacaagcggatttaaactgggaaaacgaagagttgcgccgccgcatttatgatatgatgcatttttggtttcaaaaaggcgtggacggcttccgtttagatgttgtcaacttgttgtctaaagatcaacgttttctcgatgacgacggttcgatgccgccgggcgacggccgcaagttttacacggacgggccgcgcatccatgaatttttgcatgagatgaaccgggaagtattttcgaaatacgatgtgatgacggttggcgaaatgtcatcgacaacgattgatcattgcattaaatacaccaatccagaacgccgtgaattgaatatggtgtttaatttccatcatttaaaggtggattatccgaacggggaaaaatgggcggtcgctgatttcgattttcttgctttgaagcgaattttatcggaatggcaagtagagatgcataaaggcggcggctggaacgcgctgttttggtgcaaccatgaccagccgcggatcgtgtcacgttacggcgatgatggaaaatatcataaagagtcagcgaaaatgcttgcgaccgtcattcatatgatgcaagggacgccgtatatttatcaaggggaagaaatcggcatgaccgatccgaaatttgagcggattgacgattaccgggacgtggaatcgctcaatatgtatcacattttgcgagaacaaggaaaaagcgagcaagaagtgcttgaaattttaaaacggaagtcacgcgataactcacggacgccgatgcaatgggacgacagcgagaatgccgggttcacgacaggcaagccttggattcgcgtcgcaccgaactatcaacaaattaatgtgaaaaaagcgctggaagatccgacatcggttttctatcattatcagcggctcattcaattacgcaaacaatatgatattatcacgacgggagattatcagctattgcttgaagatcatccggatatttttgcctatttgcgaaacggggagaatgaaaagctgcttgttgtgaataatttttacggaagggaaacgacgttcatcttgccggatgatgttgatgtaaacggctatgcgagcgaaatattaatttctaactatgatgactcaccgagcgattttcgaaaaataacgcttcgcccgtatgaatcgattgtttattacttgacaaaatcatga

SEQ ID NO: 1820 - protein, 562 aa, Bacillus sp
MQHPWWKKAVVYQIYPKSFNDTNGDGIGDLAGIIEKLDYLKQLGVDVIKLKPIYKSPQRDNGYDISDYFQIHDEYGTMEDFDRLLEEVHRRGMKLIMDMVVNHTSTEHEWFKQARTSKDNPYRHFYIWRDPKPDGSAPTNWQSKFGGSAWEYDEKTGQYYLHLFDVTQADLNWENEELRRRIYDMMHFWFQKGVDGFRLDVVNLLSKDQRFLDDDGSMPPGDGRKFYTDGPRIHEFLHEMNREVFSKYDVMTVGEMSSTTIDHCIKYTNPERRELNMVFNFHHLKVDYPNGEKWAVADFDFLALKRILSEWQVEMHKGGGWNALFWCNHDQPRIVSRYGDDGKYHKESAKMLATVIHMMQGTPYIYQGEEIGMTDPKFERIDDYRDVESLNMYHILREQGKSEQEVLEILKRKSRDNSRTPMQWDDSENAGFTTGKPWIRVAPNYQQINVKKALEDPTSVFYHYQRLIQLRKQYDIITTGDYQLLLEDHPDIFAYLRNGENEKLLVVNNFYGRETTFILPDDVDVNGYASEILISNYDDSPSDFRKITLRPYESIVYYLTKS

SEQ ID NO: 1821 - DNA, 1695 bp, Pichia angusta
  CDS (1)..(1695)
atgactatcgagtctcaagaaccttggtggaaatccgccgttgtttaccaggtttggcctgcttctttcaaagactccaatggagacggtattggagacctgaacggaattacttccgagctagaccatatcaaatcccttggtactgatgtgatctggctgtctccgcactatgcgtcgccactggacgacatgggatacgatatctctgactacaatgccatcaatcctcaatttggcactatggaggacatggacagactgcttgcagagatcaagaagagagatatgagattgattctagacctcgttatcaaccacacctcgtctgagcacgcttggttcaaggagtctagatccagcagagacaacccaaaaagagactggtacatttggaaagacaacgccaacaactggctttcctttttctctggttctgcatggtcttatgacgaaaagactaagcaatactaccttagaaggtttgctgagactcagcctgacttgaactgggagaacccaaagactcgtgaagccatttacaaatctgctcttgagttttggtacgagaagggtgtttctggtttcagaatcgacactgccggcctctattcgaaagtccagacttttgaggacgcgccagtcaccttcccaggtgagaaataccaacctgctggtccactcatcaactccggccctcgtattcacgagttccacaaagaaatgtacgagaaagtgacttccaggtatgatgctatgactgtcggagaagtgggtcactgctccaaggcagatgctctcaagtacgtttctgcaaaagaaaaggagatgaacatgatgttcctgttcgacactgttgacgttggatccgacaagagcgacagatttagatacaagggcttcacgttgacggacttcaaagatgccatcatcaaccagtcaaacttcatctttgatgacgagaccggcgagctgaatgacgcatggtccactgtatttatcgagaaccacgaccaaccacgctgtgtcacaaggttcggaaatacctccaacaaactgttttggagcagatctgcaaagatgctggcactgttgcagacaaccttgaccggcactctgtttgtgtaccaaggtcaagagattggtatgactaatgtctcgccgaaatgggatatttcagagtatttggatatcaacaccattaactactggaacgcattcaacgagactgagcactctgatgaggagaaggccgagctgctgaagatcatcaatttgctagctagagacaatgcaaggactccagttcagtgggactcctctgaaaacggtggtttcggtggtaagccttggatgagaatcaacgacaactacaaagacatcaacgttgcttcgcaaaaagaagaccctgactctgtgctgaacttctacagaaatgccatcaagaccagaaagcattattctgagacgttgatttttggccgtttcgaggtgcaagactacgataaccaggagattttctactacaccaagaccagcaacaaaggccaaaagaagatggctgttgttttgaattttactgatagagaagtcgagtacccaatccctcaaggaaagctgctcctgtctaatattgcaaacaacatcacaggcaagctgcaaccatatgaaggtagactgatcgaggtcaattag

SEQ ID NO: 1822 - protein, 564 aa, Pichia angusta
MTIESQEPWWKSAVVYQVWPASFKDSNGDGIGDLNGITSELDHIKSLGTDVIWLSPHYASPLDDMGYDISDYNAINPQFGTMEDMDRLLAEIKKRDMRLILDLVINHTSSEHAWFKESRSSRDNPKRDWYIWKDNANNWLSFFSGSAWSYDEKTKQYYLRRFAETQPDLNWENPKTREAIYKSALEFWYEKGVSGFRIDTAGLYSKVQTFEDAPVTFPGEKYQPAGPLINSGPRIHEFHKEMYEKVTSRYDAMTVGEVGHCSKADALKYVSAKEKEMNMMFLFDTVDVGSDKSDRFRYKGFTLTDFKDAIINQSNFIFDDETGELNDAWSTVFIENHDQPRCVTRFGNTSNKLFWSRSAKMLALLQTTLTGTLFVYQGQEIGMTNVSPKWDISEYLDINTINYWNAFNETEHSDEEKAELLKIINLLARDNARTPVQWDSSENGGFGGKPWMRINDNYKDINVASQKEDPDSVLNFYRNAIKTRKHYSETLIFGRFEVQDYDNQEIFYYTKTSNKGQKKMAVVLNFTDREVEYPIPQGKLLLSNIANNITGKLQPYEGRLIEVN

SEQ ID NO: 1823 - DNA, 1755 bp, Saccharomyces cerevisiae
  CDS (1)..(1755)
atgactatttctgatcatccagaaacagaaccaaagtggtggaaagaggccacaatctatcaaatttacccagcaagttttaaagactccaataacgatggctggggtgatttaaaaggtatcacttccaagttgcagtatattaaagatcttggcgttgatgctatttgggtttgtccgttttatgactctcctcaacaagatatggggtatgatatatccaactacgaaaaggtctggcccacatatggtaccaatgaggactgttttgagctaattgacaagactcataagctgggtatgaaattcatcaccgatttggttatcaaccactgttctacagaacacgaatggttcaaagagagcagatcctcgaagaccaatccgaagcgtgactggttcttctggagacctcctaagggttatgacgccgaaggcaagccaattcctccaaacaattggaaatctttctttggtggttcagcttggacttttgatgaaactacaaatgaattttacctccgtttgtttgcgagtcgtcaagttgacttgaattgggagaatgaagactgcagaagggcaatctttgaaagtgctgttggattttggctggaccatggtgtagatggttttagaatcgataccgctggtttgtattcgaaacgtcctggtttaccagattccccaatttttgacaaaacctcgaaattacaacatccaaattgggggtctcacaatggtcctaggattcatgaatatcatcaagaactacacagatttatgaaaaacagggtgaaagatggtagagaaataatgacagtcggtgaagttgcccatggaagtgataatgctttatacaccagtgcagctagatacgaagtcagcgaagttttctccttcacgcacgttgaagttggtacctcgccatttttccgttataacatagtgcccttcaccttgaaacaatggaaagaagccattgcatcgaactttttgttcattaacggtactgatagttgggctaccacctacatcgagaatcacgatcaagcccggtcaattacgagatttgctgacgattcgccaaagtaccgtaaaatatctggtaagctgttaacattgctagaatgttcattgacaggtacgttgtatgtctatcaaggtcaggagataggccagatcaatttcaaggaatggcctattgaaaagtatgaggacgttgatgtgaaaaacaactacgagattatcaaaaaaagttttggtaaaaactcgaaggaaatgaaggatttttttaaaggaatcgccctactttctagagatcattcgagaactcccatgccatggacgaaagataagcccaatgctggatttactggcccagatgttaaaccttggtttctcttgaatgaatctttcgagcaaggaatcaatgttgagcaggaatccagagatgatgactcagttctcaatttttggaaaagggccttgcaagccagaaagaaatataaggaacttatgatttatggttacgatttccaattcattgatttagacagtgaccagatctttagcttcactaaagagtacgaagacaagacgctgtttgctgctttaaatttcagtggcgaagaaattgaattcagcctcccaagagaaggtgcttctttatcttttattcttggaaattatgatgatactgacgtttcctccagagttttgaaaccatgggaaggtagaatctacctcgtcaaataa

SEQ ID NO: 1824 - protein, 584 aa, Saccharomyces cerevisiae
MTISDHPETEPKWWKEATIYQIYPASFKDSNNDGWGDLKGITSKLQYIKDLGVDAIWVCPFYDSPQQDMGYDISNYEKVWPTYGTNEDCFELIDKTHKLGMKFITDLVINHCSTEHEWFKESRSSKTNPKRDWFFWRPPKGYDAEGKPIPPNNWKSFFGGSAWTFDETTNEFYLRLFASRQVDLNWENEDCRRAIFESAVGFWLDHGVDGFRIDTAGLYSKRPGLPDSPIFDKTSKLQHPNWGSHNGPRIHEYHQELHRFMKNRVKDGREIMTVGEVAHGSDNALYTSAARYEVSEVFSFTHVEVGTSPFFRYNIVPFTLKQWKEAIASNFLFINGTDSWATTYIENHDQARSITRFADDSPKYRKISGKLLTLLECSLTGTLYVYQGQEIGQINFKEWPIEKYEDVDVKNNYEIIKKSFGKNSKEMKDFFKGIALLSRDHSRTPMPWTKDKPNAGFTGPDVKPWFLLNESFEQGINVEQESRDDDSVLNFWKRALQARKKYKELMIYGYDFQFIDLDSDQIFSFTKEYEDKTLFAALNFSGEEIEFSLPREGASLSFILGNYDDTDVSSRVLKPWEGRIYLVK

SEQ ID NO: 1825 - DNA, 1704 bp, Apis mellifera
  CDS (1)..(1704)
atgaaggcagtaatcgtattttgccttatggcattgtccattgtggacgcagcatggaagccgctccctgaaaacttgaaggaggacttgatcgtgtatcaggtctacccgagaagcttcaaggatagcaatggagatggtattggtgatatcgaaggtattaaagaaaaattggatcattttctcgaaatgggggtcgacatgttttggttatcccctatttatccaagccctatggtcgattttggttacgacatttcgaattacaccgacgttcatcccatatttggcaccatatcagacttagataatctagtcagtgctgcacatgagaaaggattgaagataatcttggatttcgtcccgaatcatacatctgatcaacacgaatggttccagttgagtttgaaaaacattgaaccttataacaactattacatttggcatccaggaaaaattgtaaatggcaaacgtgttccaccaactaattgggtaggcgtgtttggtggatcagcttggtcgtggcgggaagaacgacaggcatattatctgcatcaatttgcaccagaacaaccagatctaaattactataatccagttgtactggatgatatgcaaaatgttctcagattctggctgagaaggggatttgatggtttcagagtagatgctctgccttacatttgcgaagacatgcgattcttagacgaacctctatcaggtgaaacaaatgatcccaataaaaccgagtacactctcaagatctacactcacgatatcccagaaacctacaatgtagttcgcaaatttagagatgtgttagacgaattcccgcaaccaaaacacatgcttatcgaggcatacacgaatttatcgatgacgatgaaatattacgattacggagcagattttcccttcaattttgcattcatcaagaatgtttctagggattcaaattcatcagacttcaaaaaattggtcgataattggatgacgtacatgccaccaagtggtattcctaactgggtgcccggaaatcacgatcaattgagattggtgtcgagatttggagaggagaaggcccgtatgatcaccacgatgtcgcttttgctgccaggtgttgccgtgaattactacggtgatgaaattggtatgtcggatacttatatctcgtgggaggatacgcaggatccgcagggatgcggcgccggtaaagaaaactatcaaacgatgtcgagagatcccgcgagaacgccattccaatgggacgactcagtttctgctggattttcctcaagctctaatacctggcttcgtgtcaacgaaaattacaagactgtcaatctagctgctgaaaagaaggacaagaactcgttcttcaatatgttcaagaaatttgcgtcgctgaaaaaatcgccatactttaaagaggccaatttaaatacgaggatgctgaacgacaatgttttcgcattctctagggaaaccgaagataatggatctctttacgcaatattgaacttctcgaacgaggaacaaatcgtggatttgaaagcgttcaataacgtgccgaaaaaattgaatatgttttacaacaattttaactctgatataaagtccatctccaacaatgaacaagtaaaagtttctgctttaggatttttcatcttaatttctcaagatgctaaatttggaaacttttaa

SEQ ID NO: 1826 - protein, 567 aa, Apis mellifera
MKAVIVFCLMALSIVDAAWKPLPENLKEDLIVYQVYPRSFKDSNGDGIGDIEGIKEKLDHFLEMGVDMFWLSPIYPSPMVDFGYDISNYTDVHPIFGTISDLDNLVSAAHEKGLKIILDFVPNHTSDQHEWFQLSLKNIEPYNNYYIWHPGKIVNGKRVPPTNWVGVFGGSAWSWREERQAYYLHQFAPEQPDLNYYNPVVLDDMQNVLRFWLRRGFDGFRVDALPYICEDMRFLDEPLSGETNDPNKTEYTLKIYTHDIPETYNVVRKFRDVLDEFPQPKHMLIEAYTNLSMTMKYYDYGADFPFNFAFIKNVSRDSNSSDFKKLVDNWMTYMPPSGIPNWVPGNHDQLRLVSRFGEEKARMITTMSLLLPGVAVNYYGDEIGMSDTYISWEDTQDPQGCGAGKENYQTMSRDPARTPFQWDDSVSAGFSSSSNTWLRVNENYKTVNLAAEKKDKNSFFNMFKKFASLKKSPYFKEANLNTRMLNDNVFAFSRETEDNGSLYAILNFSNEEQIVDLKAFNNVPKKLNMFYNNFNSDIKSISNNEQVKVSALGFFILISQDAKFGNF

SEQ ID NO: 1827 - DNA, 1755 bp, Saccharomyces cerevisiae
  CDS (1)..(1755)
atgactatttctgatcatccagaaacagaaccaaagtggtggaaagaggccacaatctatcaaatttacccagcaagttttaaagactccaataacgatggctggggtgatttaaaaggtatcacttccaagttgcagtatattaaagatcttggcgttgatgctatttgggtttgtccgttttatgactctcctcaacaagatatggggtatgatatatctaactacgaaaaggtctggcccacatacggtaccaacgaggactgttttgagctaattgacaagactcataagctgggtatgaaattcatcaccgatttggttatcaaccactgttctacagaacacgaatggttcaaagagagcagatcctcgaagaccaatccgaagcgtgactggttcttctggagacctcctaaaggttatgacgccgaaggcaagccaattcctccaaacaattggaaatctttctttggtggttcagcttggacttttgatgaaactacaaatgaattttacctccgtttgtttgcgagtcgtcaagttgacttgaattgggagaatgaagactgcagaagggcaatctttgaaagtgctgttggattttggctggaccatggtgtagatggttttagaatcgataccgctggtttgtattcgaaacgtcctggtttaccagattccccaatttttgacaaaacctcgaaattacaacatccaaattgggggtctcacaatggtcctaggattcatgaatatcatcaagaactacacagatttatgaaaaacagggtgaaagatggtagagaaataatgacagtcggtgaagttgcccatggaagtgataatgctttatacaccagtgcagctagatacgaagtcagcgaagttttctccttcacgcacgttgaacttggtacctcgccatttttccgttataacatagtgcccttcaccttgaaacaatggaaagaagccattgcatcgaactttttgttcattaacggtactgatagttgggctaccacctacatcgagaatcacgatcaagcccggtcaattacgagatttgctgacgattcgccaaagtaccgtaaaatatctggtaagctgttaacattgctagaatgttcattgacaggtacgttgtatgtctatcaaggtcaggagataggccagatcaatttcaaggaatggcctattgaaaagtatgaggacgttgatgtgaaaaacaactacgagattatcaaaaaaagttttggtaaaaactcgaaggaaatgaaggatttttttaaaggaatcgccctactttctagagatcattcgagaactcccatgccatggacgaaagataagcccaatgctggatttactggcccagatgttaaaccttggtttttcttgaatgaatcttttgagcaaggaatcaatgttgagcaggaatccagagatgatgactcagttctcaatttttggaaaagggccttgcaagccagaaagaaatataaggaacttatgatttatggttacgatttccaattcattgatttagacagtgaccagatctttagcttcactaaagagtacgaagacaagacgctgtttgctgctttgaatttcagtggcgaagaaattgaattcagcctcccaagagaaggtgcttctttatcttttattcttggaaattatgatgatactgacgtttcctccagagttttgaaaccatgggaaggtagaatctacctcgtcaaataa

SEQ ID NO: 1828 - protein, 584 aa, Saccharomyces cerevisiae
MTISDHPETEPKWWKEATIYQIYPASFKDSNNDGWGDLKGITSKLQYIKDLGVDAIWVCPFYDSPQQDMGYDISNYEKVWPTYGTNEDCFELIDKTHKLGMKFITDLVINHCSTEHEWFKESRSSKTNPKRDWFFWRPPKGYDAEGKPIPPNNWKSFFGGSAWTFDETTNEFYLRLFASRQVDLNWENEDCRRAIFESAVGFWLDHGVDGFRIDTAGLYSKRPGLPDSPIFDKTSKLQHPNWGSHNGPRIHEYHQELHRFMKNRVKDGREIMTVGEVAHGSDNALYTSAARYEVSEVFSFTHVELGTSPFFRYNIVPFTLKQWKEAIASNFLFINGTDSWATTYIENHDQARSITRFADDSPKYRKISGKLLTLLECSLTGTLYVYQGQEIGQINFKEWPIEKYEDVDVKNNYEIIKKSFGKNSKEMKDFFKGIALLSRDHSRTPMPWTKDKPNAGFTGPDVKPWFFLNESFEQGINVEQESRDDDSVLNFWKRALQARKKYKELMIYGYDFQFIDLDSDQIFSFTKEYEDKTLFAALNFSGEEIEFSLPREGASLSFILGNYDDTDVSSRVLKPWEGRIYLVK

SEQ ID NO: 1829 - DNA, 1755 bp, Saccharomyces cerevisiae
  CDS (1)..(1755)
atgactatttctgatcatccagaaacagaaccaaagtggtggaaagaggccacaatctatcaaatttacccagcaagttttaaagactccaataacgatggctggggtgatttaaaaggtatcacttccaagttgcagtatattaaagatcttggcgttgatgctatttgggtttgtccgttttatgactctcctcaacaagatatggggtatgatatatccaactacgaaaaggtctggcccacatacggtaccaatgaggactgttttgagctaattgacaagactcataagctgggtatgaaattcatcaccgatttggttatcaaccactgttctacagaacacgaatggttcaaagagagcagatcctcgaagaccaatccgaagcgtgactggttcttctggagacctcctaagggttatgacgccgaaggcaagccaattcctccaaacaattggaaatctttctttggtggttcagcttggacttttgatgaaactacaaatgaattttacctccgtttgtttgcgagtcgtcaagttgacttgaattgggagaatgaagactgcagaagggcaatctttgaaagtgctgttggattttggctggaccatggtgtagatggttttagaatcgataccgctggtttgtattcgaaacgtcctggtttaccagattccccaatttttgacaaaacctcgaaattacaacatccaaattgggggtctcacaatggtcctaggattcatgaatatcatcaagaactacacagatttatgaaaaacagggtgaaagatggtagagaaataatgagagtcggtgaagttgcccatggaagtgataatgctttatacaccagtgcagctagatacgaagtcagcgaagttttctccttcacgcacgttgaagttggtacctcgccatttttccgttataacatagtgcccttcaccttgaaacaatggaaagaagccattgcatcgaactttttgttcattaacggtactgatagttgggctaccacctacatcgagaatcacgatcaagcccggtcaattacgagatttgctgacgattcgccaaagtaccgtaaaatatctggtaagctgttaacattgctagaatgttcattgacaggtacgttgtatgtctatcaaggtcaggagataggccagatcaatttcaaggaatggcctattgaaaagtatgaggacgttgatgtgaaaaacaactacgagattatcaaaaaaagttttggtaaaaactcgaaggaaatgaaggatttttttaaaggaatcgccctactttctagagatcattcgagaactcccatgccatggacgaaagataagcccaatgctggatttactggcccagatgttaaaccttggtttttcttgaatgaatctttcgagcaaggaatcaatgttgagcaggaatccagagatgatgactcagttctcaatttttggaaaagggccttgcaagccagaaagaaatataaggaacttatgatttatggttacgatttccaattcattgatttagacagtgaccagatctttagcttcactaaagagtacgaagacaagacgctgtttgctgctttaaatttcagtggcgaagaaattgaattcagcctcccaagagaaggtgcttctttatcttttattcttggaaattatgatgatactgacgtttcctccagagttttgaaaccatgggaaggtagaatctacctcgtcaaataa

SEQ ID NO: 1830 - protein, 584 aa, Saccharomyces cerevisiae
MTISDHPETEPKWWKEATIYQIYPASFKDSNNDGWGDLKGITSKLQYIKDLGVDAIWVCPFYDSPQQDMGYDISNYEKVWPTYGTNEDCFELIDKTHKLGMKFITDLVINHCSTEHEWFKESRSSKTNPKRDWFFWRPPKGYDAEGKPIPPNNWKSFFGGSAWTFDETTNEFYLRLFASRQVDLNWENEDCRRAIFESAVGFWLDHGVDGFRIDTAGLYSKRPGLPDSPIFDKTSKLQHPNWGSHNGPRIHEYHQELHRFMKNRVKDGREIMRVGEVAHGSDNALYTSAARYEVSEVFSFTHVEVGTSPFFRYNIVPFTLKQWKEAIASNFLFINGTDSWATTYIENHDQARSITRFADDSPKYRKISGKLLTLLECSLTGTLYVYQGQEIGQINFKEWPIEKYEDVDVKNNYEIIKKSFGKNSKEMKDFFKGIALLSRDHSRTPMPWTKDKPNAGFTGPDVKPWFFLNESFEQGINVEQESRDDDSVLNFWKRALQARKKYKELMIYGYDFQFIDLDSDQIFSFTKEYEDKTLFAALNFSGEEIEFSLPREGASLSFILGNYDDTDVSSRVLKPWEGRIYLVK

SEQ ID NO: 1831 - DNA, 1713 bp, Candida albicans
  CDS (1)..(1713): transl_table=12
atgagtgaacacaagtggtggaaagaagctgttgtttatcaaatttggccggcatcatacaaggattccaatggtgatggtgttggtgatattccaggaattatttcgacgttagactatattgcgagtttgggagtgacaaccgtatggttgagtcctatgtatgactcgccccaagatgacatggggtacgatgtttctgattacgaaaatgtctacagcaaatacgggaccttgcaggatatggacagattaattgctggatgtcatgacagagggttgaagttgatacttgacttggttatcaaccacacttcggttgagcacaagtggtttaaagagtcgagactgtcgaaggacaacccgaaaagagactggtacatttggaaaccacctagaatcgatagcaatggtaacaaacacccgccaaataattgggggtcatatttttctgggtcggcatggaagtatgatgagttgactggtgagtactacttgcacttgtttgctgaatcacaacctgatttgaattgggaaaacaaggagtgcagagaagctatttataactcggccatcaagttctggttggacaagggtgttgatgggtttagaattgacactgcaggaatgtactccaagtaccagcatttcaaagatgcgcctgttgcttttcctgatactgaattccagccttgtgaaatctaccacaagaatggtccaagaattcatgagttccacaaggagatggccaaggtaatggagccatacgatacgatgactgttggagaggttggccattcgactagagagcaggcgttaaagtatgttagtgctgctgaaaaagaaatgaatatgatgtttttatttgacgttgttgagttgggctcggacccacgtgacagattccgttacaatgggtttgacttggttgatttaaagaaggctatcaaatcacaaggtgagtttgctgagggaaccgatgcttggtctactgtatttattgaaaaccatgatcaggcaagagccattagcagatttggtaatgactcgccagagtttagggtgttgtcaggtaaggctattgccatgttgcagtgttgtctcactgggactttgtttatttatcagggtcaggagattggtatgaccaatgtgccaagatcatggccaattgaggagtacaaggatatcaacaccatcaattattaccgtgcctttaaggaaaagtatggcaaagatgctgattataaacagaaggaagaaaagttggttgatgttattaaccgtttggctagagataatgctagaacgccggtccagtggagccaccaacaatatgctgggttttcagaggttgagccgtggatgagagtgaatgacaactataaggagattaatgttgaggaccaggacggtgacgaccattcattgcttaacttttatagaaagttgttgaagttgaggggagagtacaaggatctttttgtttatggggagatgaagtttttagattttgatgacaagaagcttttcacgtttgccaaggaagcgcctggctctcctgttgcatacattgtgatcaactttagtggtgaggatgtcaagtttgagccgttgattaagggtaactacaagttggtacttacaaatgtcgacaaagacagtaaagacgctttgtctccatacgaggctagaatgtatgtagttgattaa

SEQ ID NO: 1832 - protein, 570 aa, Candida albicans
MSEHKWWKEAVVYQIWPASYKDSNGDGVGDIPGIISTLDYIASLGVTTVWLSPMYDSPQDDMGYDVSDYENVYSKYGTLQDMDRLIAGCHDRGLKLILDLVINHTSVEHKWFKESRSSKDNPKRDWYIWKPPRIDSNGNKHPPNNWGSYFSGSAWKYDELTGEYYLHLFAESQPDLNWENKECREAIYNSAIKFWLDKGVDGFRIDTAGMYSKYQHFKDAPVAFPDTEFQPCEIYHKNGPRIHEFHKEMAKVMEPYDTMTVGEVGHSTREQALKYVSAAEKEMNMMFLFDVVELGSDPRDRFRYNGFDLVDLKKAIKSQGEFAEGTDAWSTVFIENHDQARAISRFGNDSPEFRVLSGKAIAMLQCCLTGTLFIYQGQEIGMTNVPRSWPIEEYKDINTINYYRAFKEKYGKDADYKQKEEKLVDVINRLARDNARTPVQWSHQQYAGFSEVEPWMRVNDNYKEINVEDQDGDDHSLLNFYRKLLKLRGEYKDLFVYGEMKFLDFDDKKLFTFAKEAPGSPVAYIVINFSGEDVKFEPLIKGNYKLVLTNVDKDSKDALSPYEARMYVVD

SEQ ID NO: 1833 - DNA, 1740 bp, Schizosaccharomyces pombe
  CDS (1)..(1740)
atgaaagttgtgccaagcgaaaaaatcaaaccgaattggtggagagagacttcagtatatcaaatatatcctgcctctttcaaagattcaaacggtgatggctttggtgatttagaaggaatcatttccaaagtggattatctgaaagctctaaatgtagagtctatttggctttgtcctatttacccatctcctctaaaagacatgggttatgatgtttctgattacaaacaaattgactctcgatatggaactttagaggatttggacaggctaatgaaagctctacacgaaagggacatgaagttagttatggacttggtgttaaaccacacttctgatcaacatgagtggtttaaggagtccagatcttctaaaacaaatccgaagcgagattggtacttttggaaaccagctaggtacaatgaaaaaggcgaacgcttacccccaaataattggagaagctatttcgatacttcggcgtgggaatgggacgaagctacgcaagaatactacctacatctttggtccgtagggcaacccgatcttaattgggaaaccccaaaagttagggaagcggtacacgatattctacgtttctggcttgatagaggagtagatgggtttcgacttgatgctattaacatgatcagcaaagaccaaaggtttctagatgctccaattactgatgacaggtacgaatatcaactagcctatcaatattacgccaatggtcccagaattcacgagtatcttaatgggataggcaatattcttacagagtatgacgctttttctgtaggggaaatgccttacgttttggatacgaacgaaatcctgcatgtcgttggtgctgatcgtagagaactgacgatgatatttcagtttgattttgtggaccttgatctcgatcctaatcagcataagtatattgaaggaagttgggagctttctgatttgaaaaagtcattaaaaaaatggcagtctgcactactttccggtggtggttggaatgcttcctttattgaaaatcacgaccaaacgagaactgtttcacgatatctttctgattctcccaagtatagagcatatagctccaaattgatggctctttttatcatattccaaagtggtaccccatttgtattccagggtcaggaacttgctcttgccaatatcccacgagattggccgattgatgaataccttgatgttgaaacgcagaacttctggaaactttttatgagtggcaatcctagtcaggaagaaattgagaagactatggacattgttaacaaacgtgctcgtgacaacggtcgcacaccaatgcattgggatagctcacccaacggtggtttcacaaaggctggagtaaaaccgtggatgagagtgactaatgactacaaagaatggaatgctgccaatcaagttaatgaccctgaaagtccttacacattttggtcaaaggcattggagcttcgtaaagaattgaaggatgctgttgtgtatggatcgtttgaattgatatctgaagaggatccatcgattgttgcatttgttcgtgaatcatcgacttataaactcatcattcttttgaatttcacgggtaataaagtttcttatgactgtcctttgaacctgacttcctatgaaattctacttgacaactataaggactttatttgtatgacttctcctgtcacattgaatccttatcaagcagtcttgttaaagctctaa

SEQ ID NO: 1834 - protein, 579 aa, Schizosaccharomyces pombe
MKVVPSEKIKPNWWRETSVYQIYPASFKDSNGDGFGDLEGIISKVDYLKALNVESIWLCPIYPSPLKDMGYDVSDYKQIDSRYGTLEDLDRLMKALHERDMKLVMDLVLNHTSDQHEWFKESRSSKTNPKRDWYFWKPARYNEKGERLPPNNWRSYFDTSAWEWDEATQEYYLHLWSVGQPDLNWETPKVREAVHDILRFWLDRGVDGFRLDAINMISKDQRFLDAPITDDRYEYQLAYQYYANGPRIHEYLNGIGNILTEYDAFSVGEMPYVLDTNEILHVVGADRRELTMIFQFDFVDLDLDPNQHKYIEGSWELSDLKKSLKKWQSALLSGGGWNASFIENHDQTRTVSRYLSDSPKYRAYSSKLMALFIIFQSGTPFVFQGQELALANIPRDWPIDEYLDVETQNFWKLFMSGNPSQEEIEKTMDIVNKRARDNGRTPMHWDSSPNGGFTKAGVKPWMRVTNDYKEWNAANQVNDPESPYTFWSKALELRKELKDAVVYGSFELISEEDPSIVAFVRESSTYKLIILLNFTGNKVSYDCPLNLTSYEILLDNYKDFICMTSPVTLNPYQAVLLKL

SEQ ID NO: 1835 - DNA, 1746 bp, Saccharomyces cerevisiae
  CDS (1)..(1746)
atgacgatcatccataatcctaaatggtggaaagaagccaccgtctaccaaatttatcctgctagtttcaaggactccaacaatgacggatggggtgatttagctgggattacctccaaacttgactatgtcaaagaattaggtgtcgatgcgatatgggtgtgcccattttatgactctcctcaagaagatatgggttacgatattgccaactatgagaaggtttggccacgttacggtaccaatgaggattgtttccaaatgatagaagaagctcataagagaggtatcaaggttattgttgacctggttatcaaccactgttctgaagagcatgaatggttcaaggagagtagatcttctaaggctaatccaaagcgtgactggtttttctggagacctccaaagggttacgatgagaaaggtaatccaattcctcccaacaattggagatctttctttggtggatctgcttggagatatgacgaaaaaactggtgagttctttctgcatgtgtttgctcttggccaacctgatttcaattgggaaaatgaagagtgccgtaaagccatttatgactcctcagtgggctattggctacgtcacaacgttgatggctttcgtattgacgtaggcagcatgtattctaaggttgagggcctacccgatgctcctatcactgatcctacagttccttaccaaaaaggaactgaatttttcataaatgggccacgtatccatgagtatcataaagaaatgcataactacatgctctcgcaagttccagagggtaaagaaatcatgactgttggagaagttggtatcgggaatgaagacgacttcagagtttataccagtgccaaagaaggagaactaaatatgatgttcaacttcaagcacacctcagtaggtgaaaacccaaaatgcaagtacgaacttattccctttactttaaaagactttaagctggctcttgctgaaagctttctgtttatcgaaaacacagattgctggtcgaccatctatttggagaatcatgatcaacctcgtagcgtttcgcgttttggctcagattctcctaaatggcgtgagatttcgtccaagatgttggctactctcatcatttcattgactggtactgtttttatctaccaaggacaagaattgggtatgcccaacttcaaaaacagaaaaattgagcaaatcaaatgcgttgaaggtactggtacatatgccgccattaaacgtgattatggtgaagattctgaaaagatgaaaaagttttttgaagcattagctttgatctctagagatcatgggagaacaccattcccatggagtgctgatgagccttctgcaggtttctcgaaggatgccaaaccatggattgacatgaatgaatcatttagagacggaatcaacgcagaagctgagttaaaagataaaaactcagtcttctttttctggaaaaaggccttacaagttagaaaggagcacaaagatatccttgtttatggacataactttcagttcattgatcttgataatgacaagctattcatgtttacaaaggacacagataacaaaaaaatgtttgctgttttcaatttcagtagcgataatacggacttttcagttcctgataatgaggcctcctacaccatgttttttggcaactatgcaaactcaaatggtgattcccgcaccttgcagccatgggaaggaagactttacttgttgaagtaa

SEQ ID NO: 1836 - protein, 581 aa, Saccharomyces cerevisiae
MTIIHNPKWWKEATVYQIYPASFKDSNNDGWGDLAGITSKLDYVKELGVDAIWVCPFYDSPQEDMGYDIANYEKVWPRYGTNEDCFQMIEEAHKRGIKVIVDLVINHCSEEHEWFKESRSSKANPKRDWFFWRPPKGYDEKGNPIPPNNWRSFFGGSAWRYDEKTGEFFLHVFALGQPDFNWENEECRKAIYDSSVGYWLRHNVDGFRIDVGSMYSKVEGLPDAPITDPTVPYQKGTEFFINGPRIHEYHKEMHNYMLSQVPEGKEIMTVGEVGIGNEDDFRVYTSAKEGELNMMFNFKHTSVGENPKCKYELIPFTLKDFKLALAESFLFIENTDCWSTIYLENHDQPRSVSRFGSDSPKWREISSKMLATLIISLTGTVFIYQGQELGMPNFKNRKIEQIKCVEGTGTYAAIKRDYGEDSEKMKKFFEALALISRDHGRTPFPWSADEPSAGFSKDAKPWIDMNESFRDGINAEAELKDKNSVFFFWKKALQVRKEHKDILVYGHNFQFIDLDNDKLFMFTKDTDNKKMFAVFNFSSDNTDFSVPDNEASYTMFFGNYANSNGDSRTLQPWEGRLYLLK

SEQ ID NO: 1837 - DNA, 1770 bp, Saccharomyces cerevisiae
  CDS (1)..(1770)
atgactatttcttctgcacatccagagacagaaccaaagtggtggaaagaggccacgttctatcaaatttacccagcaagtttcaaagactctaatgacgatggctggggtgacatgaaagggattgcctccaagctggagtacatcaaagagcttggtgccgatgccatttggatctcaccattctacgactcgccacaagatgatatgggttacgatattgccaactacgaaaaggtctggccaacatatggtacgaatgaagactgctttgccttgatcgaaaagacacataagcttggtatgaaatttatcaccgacttggtcatcaatcactgttccagcgaacatgaatggttcaaagagagcagatcctcgaagactaatccaaagcgtgactggttcttctggagacctcctaaaggttatgacgccgaaggcaagccaattcctccaaacaattggaaatcctattttggtggttccgcatggaccttcgatgaaaagacacaagaattctacttgcgtttgttttgctccactcaacctgatttgaattgggagaatgaagactgtagaaaggcaatctacgaaagtgccgttggatactggttagaccatggtgtagacggctttagaattgatgtcggaagtttgtactccaaagttgtaggtttaccagatgctcctgttgttgacaaaaactcgacttggcaatccagtgatccatacacattgaatggaccacgtattcacgagttccatcaagaaatgaatcaattcatcagaaacagagtgaaggatggcagggagattatgacagttggtgaaatgcaacatgcctccgacgaaactaagagactttatacgagtgcttcaagacacgaacttagtgagttatttaacttttcccacactgatgtggggacttcacctttgttccgttacaacttggtcccatttgaactgaaggattggaagattgcccttgctgagctgttcaggtacattaatggtacagattgttggtcaacaatctatctggaaaatcacgaccaacctcgttcaattacgagatttggtgacgattctcccaagaaccgtgttatttctggtaagttactctctgtgttgctaagtgccttgaccggtactctatatgtgtatcagggacaagagcttggccaaatcaatttcaagaactggcctgttgaaaagtacgaggatgtcgaaatcagaaacaactacaatgccattaaagaagagcatggggaaaactcagaggagatgaaaaagtttttagaagccattgcccttatctccagggaccatgctagaacacctatgcaatggtctcgtgaggagccaaatgctggtttttctggtcctagtgctaaaccatggttttacttgaacgactctttcagagaaggcattaacgtcgaagatgaaatcaaggatcccaactcggttttgaacttctggaaggaggccttgaagtttagaaaggcgcataaagacattactgtgtacggatacgatttcgagtttattgatttagacaataagaagttgtttagcttcacaaagaagtacaacaataaaacattgtttgcggctttgaactttagctctgatgcgacagatttcaagattccaaatgatgattcatcgttcaagttagagtttggaaactatccaaagaaggaggtagatgcctcttccagaacattgaagccatgggaaggaagaatatatatcagcgaatga

SEQ ID NO: 1838 - protein, 589 aa, Saccharomyces cerevisiae
MTISSAHPETEPKWWKEATFYQIYPASFKDSNDDGWGDMKGIASKLEYIKELGADAIWISPFYDSPQDDMGYDIANYEKVWPTYGTNEDCFALIEKTHKLGMKFITDLVINHCSSEHEWFKESRSSKTNPKRDWFFWRPPKGYDAEGKPIPPNNWKSYFGGSAWTFDEKTQEFYLRLFCSTQPDLNWENEDCRKAIYESAVGYWLDHGVDGFRIDVGSLYSKVVGLPDAPVVDKNSTWQSSDPYTLNGPRIHEFHQEMNQFIRNRVKDGREIMTVGEMQHASDETKRLYTSASRHELSELFNFSHTDVGTSPLFRYNLVPFELKDWKIALAELFRYINGTDCWSTIYLENHDQPRSITRFGDDSPKNRVISGKLLSVLLSALTGTLYVYQGQELGQINFKNWPVEKYEDVEIRNNYNAIKEEHGENSEEMKKFLEAIALISRDHARTPMQWSREEPNAGFSGPSAKPWFYLNDSFREGINVEDEIKDPNSVLNFWKEALKFRKAHKDITVYGYDFEFIDLDNKKLFSFTKKYNNKTLFAALNFSSDATDFKIPNDDSSFKLEFGNYPKKEVDASSRTLKPWEGRIYISE

SEQ ID NO: 1839 - DNA, 1770 bp, Saccharomyces cerevisiae
  CDS (1)..(1770)
atgactatttcttctgcacatccagaaacagaacccaagtggtggaaagaggccacaatctatcaaatttatcccgcaagtttcaaagactccaacaacgatgggtggggtgatatgaagggtattgcctccaagttggagtatatcaaagagcttggtgccgatgccatttggatctcaccattctacgactcgccacaagatgatatgggttacgatattgccaactacgaaaaggtctggccaacctacggtacgaacgaggactgctttgccttgatcgaaaagacacataagcttggtatgaaatttatcaccgacttagtcatcaaccattgctcgagcgaacatgaatggttcaaagagagcagatcctcaaaaaccaatccaaaacgtgactggttcttctggagacctcctaagggttatgacgccgaaggcaagccaattcctccaaacaattggaggtcttacttcggtggttctgcatggacgttcgatgaaaagacacaagagttttacttgcgtttgttttgctccacccaacctgatttgaattgggagaatgaggactgtagaaaggcaatctacgaaagtgccgttggatactggttagaccatggtgtagacggctttagaattgatgtgggaagcttgtactccaaggttgctggtctaccagacgctcctgtgattgacgaaaactcaaagtggcaacccagtgatcctttcacaatgaacggaccacgtatccatgagtttcatcaagaaatgaacaagttcatcagaaacagagtgaaggatggcagagaaattatgacagttggtgaaatgcaacatgctactgatgaaaccaagaggttgtatacaagtgcatcaagacacgaacttagtgagttattcaacttttcccacactgatgtcgggacttcgcccaagttccgtcaaaatttgatcccatatgaactaaaggattggaaggttgcccttgctgaacttttcagatacgttaacggaactgattgttggtcaacaatttatctggaaaatcacgaccaacctcgttcaattaccagatttggtgacgattctcctaagaaccgtgttatttctggtaagttgttgtctgtgttgttggtgtcactgagcggtactctatatgtgtaccaaggacaggaactgggtgaaatcaatttcaagaactggcctatcgaaaaatacgaggatgtcgaagttagaaataactatgatgcgatcaaggaagagcatggagaaaactcgaaggagatgaagaggtttttggaagcaattgcccttatttccagagaccatgctagaacacctatgcaatggtctcgtgaggagccaaatgctggtttttctggtcctaatgctaaaccatggttttacttgaacgagtctttcagggaaggaattaacgctgaagacgaatccaaggatcccaactcggttttgaacttctggaaggaggccttgagatttagaaaggcacacaaggatattactgtatatggatatgattttgagtttattgatttggacaataagaaactgttcagcttcacaaagaaatacgacaacaaaacattgtttgctgctttgaacttcagctctgattcgattgacttcacgattccaaacaatagctcgtcgtttaagttggaattcggaaactacccaagaagcgaagttgatgcgtcttccagaacattgaagccatgggagggcagaatttacatatctgaatga

SEQ ID NO: 1840 - protein, 589 aa, Saccharomyces cerevisiae
MTISSAHPETEPKWWKEATIYQIYPASFKDSNNDGWGDMKGIASKLEYIKELGADAIWISPFYDSPQDDMGYDIANYEKVWPTYGTNEDCFALIEKTHKLGMKFITDLVINHCSSEHEWFKESRSSKTNPKRDWFFWRPPKGYDAEGKPIPPNNWRSYFGGSAWTFDEKTQEFYLRLFCSTQPDLNWENEDCRKAIYESAVGYWLDHGVDGFRIDVGSLYSKVAGLPDAPVIDENSKWQPSDPFTMNGPRIHEFHQEMNKFIRNRVKDGREIMTVGEMQHATDETKRLYTSASRHELSELFNFSHTDVGTSPKFRQNLIPYELKDWKVALAELFRYVNGTDCWSTIYLENHDQPRSITRFGDDSPKNRVISGKLLSVLLVSLSGTLYVYQGQELGEINFKNWPIEKYEDVEVRNNYDAIKEEHGENSKEMKRFLEAIALISRDHARTPMQWSREEPNAGFSGPNAKPWFYLNESFREGINAEDESKDPNSVLNFWKEALRFRKAHKDITVYGYDFEFIDLDNKKLFSFTKKYDNKTLFAALNFSSDSIDFTIPNNSSSFKLEFGNYPRSEVDASSRTLKPWEGRIYISE

SEQ ID NO: 1841 - DNA, 1677 bp, Bacillus cereus
  CDS (1)..(1677): transl_table=11
atggaaaaacagtggtggaaagaaagtgtagtatatcaaatttatcctcgtagctttatggatagcaatggtgatggtatcggggatcttcgcggtattatttcaaagttagattacttaaaagaattagggattgatgtgatttggttatcgccagtttatgaatctccaaatgatgataatggttatgatataagtgattattgtaaaattatgaatgagttcggaacaatggaagattgggatgagctattacatgaaatgcatgaacgtaatatgaaactgatgatggacttagttgttaatcatacttctgatgaacataattggtttattgaatcacgtaaatcaaaagataataaatatagagattactatatatggcgtcctggaaaagaaggaaaagagccgaataactggggagcagcttttagtggatcagcatggcagtatgatgaaatgacagatgaatattatttacatttgttttctaaaaaacagccagatttaaattgggataatgaaaaggtaagacaagatgtttatgaaatgatgaagttttggttagaaaaaggaattgatggcttccgtatggatgttattaattttatttctaaagaagagggattaccaactgttgaaacagaagaagaggggtatgtttcaggtcataagcattttatgaacggtccaaacattcataaatatttacatgaaatgaatgaagaagtattgtctcattatgatattatgacggttggtgaaatgcctggtgtaacgacagaagaagcgaaattgtatactggggaagaacgaaaagaactgcagatggtattccaatttgaacatatggatttagattcaggagaaggtggaaaatgggatgtaaaaccatgttcactccttactttaaaagagaatttaacgaagtggcaaaaagcgttagaacatacaggttggaatagtctgtattggaataaccatgatcagcctcgcgttgtatctcgttttggtaatgatggcatgtatcgcattgaatctgcgaaaatgttagcgacggtacttcatatgatgaaaggaacaccgtatatttatcaaggagaagaaattggaatgacgaacgtccgatttgagtcgattgatgaatatcgagatattgaaacgttaaatatgtataaggaaaaagttatggagcgcggtgaagatatagagaaggtgatgcagtctatctatataaaaggccgagataatgctagaacaccgatgcagtgggatgatcaaaatcacgctggatttacaacaggtgaaccttggattacggtaaatcctaactataaagagattaatgtgaaacaagcgatccaaaataaagattcaattttttattactataaaaaattaattgagttacgcaaaaataatgaaatagttgtgtatggatcatatgatttaatattggagaataatccatctatctttgcatacgtaaggacatatggagttgaaaaacttcttgttattgcaaactttactgcggaagaatgtatatttgaattgcctgaggacattagttatagtgaagtagagttactcatacacaattacgacgtagagaatggaccgatagaaaacataacattacgtccgtatgaagcaatggtatttaaattgaaataa

SEQ ID NO: 1842 - protein, 558 aa, Bacillus cereus
MEKQWWKESVVYQIYPRSFMDSNGDGIGDLRGIISKLDYLKELGIDVIWLSPVYESPNDDNGYDISDYCKIMNEFGTMEDWDELLHEMHERNMKLMMDLVVNHTSDEHNWFIESRKSKDNKYRDYYIWRPGKEGKEPNNWGAAFSGSAWQYDEMTDEYYLHLFSKKQPDLNWDNEKVRQDVYEMMKFWLEKGIDGFRMDVINFISKEEGLPTVETEEEGYVSGHKHFMNGPNIHKYLHEMNEEVLSHYDIMTVGEMPGVTTEEAKLYTGEERKELQMVFQFEHMDLDSGEGGKWDVKPCSLLTLKENLTKWQKALEHTGWNSLYWNNHDQPRVVSRFGNDGMYRIESAKMLATVLHMMKGTPYIYQGEEIGMTNVRFESIDEYRDIETLNMYKEKVMERGEDIEKVMQSIYIKGRDNARTPMQWDDQNHAGFTTGEPWITVNPNYKEINVKQAIQNKDSIFYYYKKLIELRKNNEIVVYGSYDLILENNPSIFAYVRTYGVEKLLVIANFTAEECIFELPEDISYSEVELLIHNYDVENGPIENITLRPYEAMVFKLK

SEQ ID NO: 1843 - DNA, 1668 bp, Bacillus coagulans
  CDS (1)..(1668): transl_table=11
atgacagaatggtggaaaaaagccgttgtttaccagatttacccgcgcagtttttatgatacaaatggtgacgggatcggcgatttgcggggaattatggataagctcgactatttgaaaacactcgggatcgactgcatctggatcagcccggtgtacgactcgccgcaggatgacaatggctacgatatccgtgactaccgcaagatcgacaagatgttcgggacaaatgaagatatggaccgcctgcttgacgaagcccatgcacgcgggatcaaaatcgtaatggatcttgtcgtgaaccatacctccgatgaacatgcctggtttgtcgaaagccggaaatcgaaggataatccgtaccgcgacttttatttttggaaagacccgaaaccggacggcacccctccgaacaactggggttcgatgttttccggttccgcctgggagtacgacgaaacaaccgggcaatactatttgcactatttttcaaagaaacagcctgacttaaactgggaaaacgaaaaagtgcggaaagagatttacgatatgatgaagttctggatggataaaggggtggacggctggcgcatggatgtgatcggctcgatttccaagtttcttgattttcctgattatgaacttccggaagggcaaaaatacggcattggcaagtatcatgcaaacgggccgcgcctccatgcgttcatccaggaaatgaaccgcgaagtgctgtcaaaatacgactgcatgactgtcggggaagccatcggatccgatgtcgaaatcgccaggaaatatacagggccggaccgccatgaactcaatatgatttttaattttgaacatatggatgtcgatacgaaaccgggcagccctgccggcaaatgggctttgaagccttttgacctggtcgaattgaaacaaatcctttcccgctggcaatatgagctcgcggataccggctggaatgcgctctattttgaaaaccatgaccaggcgagggtggtatcgcgctggggcaatgatacaacgtaccgggcagaatgtgccaaagcgtttgccaccattttgcacgggctgaaagggaccccttttatttatcaaggggaagaaatcgggatggtgaacgccgatctcgaactcgaagaatatgatgacattgaaatccggaatgcttatcaagagcttgtgatggaaaaccaaatcatgtcgaaagatgaatttttaacagctgtccgaaaaaaaggacgcgacaatgcacggacgccgatgcagtgggacggcagttttaatgccggctttacaaccggaacaccgtggcttaaagtcaattcccgctattcggagatcaacgtggcaaaagcgcttcaagagcctgattcgattttttattactatcaatctttgattaagctgcggcattcatacgatgtgtttacagacggccggtatgagctgctgatgccggaccatccgcatttgtacgtgtacacgagggaaaatgaatcggaaaaactgctcgttgccgccaacttaagcgaaaacacagtaagctttgatcaaccggatgacaactggaaactgctgcttggaaactatgaagatactggcacaagcacgctgttccgcccgtatgaagcggccatttactatctggaaaaatag

SEQ ID NO: 1844 - protein, 555 aa, Bacillus coagulans
MTEWWKKAVVYQIYPRSFYDTNGDGIGDLRGIMDKLDYLKTLGIDCIWISPVYDSPQDDNGYDIRDYRKIDKMFGTNEDMDRLLDEAHARGIKIVMDLVVNHTSDEHAWFVESRKSKDNPYRDFYFWKDPKPDGTPPNNWGSMFSGSAWEYDETTGQYYLHYFSKKQPDLNWENEKVRKEIYDMMKFWMDKGVDGWRMDVIGSISKFLDFPDYELPEGQKYGIGKYHANGPRLHAFIQEMNREVLSKYDCMTVGEAIGSDVEIARKYTGPDRHELNMIFNFEHMDVDTKPGSPAGKWALKPFDLVELKQILSRWQYELADTGWNALYFENHDQARVVSRWGNDTTYRAECAKAFATILHGLKGTPFIYQGEEIGMVNADLELEEYDDIEIRNAYQELVMENQIMSKDEFLTAVRKKGRDNARTPMQWDGSFNAGFTTGTPWLKVNSRYSEINVAKALQEPDSIFYYYQSLIKLRHSYDVFTDGRYELLMPDHPHLYVYTRENESEKLLVAANLSENTVSFDQPDDNWKLLLGNYEDTGTSTLFRPYEAAIYYLEK

SEQ ID NO: 1845 - DNA, 1686 bp, Bacillus halodurans
  CDS (1)..(1686): transl_table=11
atgagtacgcaatggtggaaagaaagtgtcgtttatcaaatttacccgcgaagctttcaagattacaatggggatggaattggcgatattcctggtatcatttcacgacttgattatttaaaaacgctcggagtggatgtcatttggctctcaccagtttacgattctccaaatgatgacaatggctatgacattcgtgattataaggcgatcatggatgagttcggtacaatggccgattgggaaacacttttagctgagattcacacccgaggaatgaagctgatcatggatcttgtcgttaaccatagttcagatgagcacgcatggtttgtagaatcacgaaagtcaaaagacaatccgtatcgggatttttacatttggcgaccagggaaagatggtaaggaaccgaacaattgggcttctaattttagcgggtctgcatggacgtacgatgagacaactggtgaatattatttgcatttgttttcaaaaaagcaacctgatttaaattgggagaatccgaagttacgggaaaagatttatgagatgatgacgtggtggcttgacaaaggaatcgatggctttcgcatggatgtgatcaactttatatcaaaagtggacgggctacctgatgcagaacctcaaccggggcaaccgtacgtatctggttcgaactattttatgaatggacctaacatccatacgtatttacaggaaatgcatgaaaacgtcctgcagcattatgatctcatgacggttggtgaaatgccaggcgtaacactagagcttgcccagctttatacgggagaagagcgtaacgagctgaatatggtattccaatttgaacacgttggtctcgatcaagggccaaacgggaaatgggatcttaagcctctcgagcttaaagacttgaaagcaagtctttcccgctggcaaaaaggattgcaagacatcgggtggaattcactctattggaacaaccacgatcaaccgcgaatcgtttcacggttcggtgatgatcaatcctaccgtgtagaatcagcaaaaatgcttgccactcttctccattgtatgaagggaaccccttttatttatcaaggggaagaaatcgggatgacgaatgttcgcttcgattcgattgagcaatatcaagatattgaaacactgaacatgtacaaagaaaaacgagcacaaggggttcctcatgaaacacttatggcgtctattcatgcaaaagggcgagataatgcacgaacgccgatgcagtgggatgagacaaaacatggaggttttacagacggaacgccgtggcttgaagtcaatccaaattataaggaaattaacgtaaagcaagcattgaaagacccgaactcgattttttatcactatcaaaaactgattcaattaagaaaagagcatgcgatcctcgttcatggctcgtacgatctcattcttgaggacgatccagagatttttgcctacaaacggacgtacaatgggcaaacacttctcgtcgtatgtaacttttacgggcgaataaccgactttgaatgcccagccgaggtagtgttaagcgaaccgaccttgctgcttagcaactatgatgaagaagaaaacggatcatatacatccttccgattacgtccatatgaagcaagagtctatttgggaaagaatgaatag

SEQ ID NO: 1846 - protein, 561 aa, Bacillus halodurans
MSTQWWKESVVYQIYPRSFQDYNGDGIGDIPGIISRLDYLKTLGVDVIWLSPVYDSPNDDNGYDIRDYKAIMDEFGTMADWETLLAEIHTRGMKLIMDLVVNHSSDEHAWFVESRKSKDNPYRDFYIWRPGKDGKEPNNWASNFSGSAWTYDETTGEYYLHLFSKKQPDLNWENPKLREKIYEMMTWWLDKGIDGFRMDVINFISKVDGLPDAEPQPGQPYVSGSNYFMNGPNIHTYLQEMHENVLQHYDLMTVGEMPGVTLELAQLYTGEERNELNMVFQFEHVGLDQGPNGKWDLKPLELKDLKASLSRWQKGLQDIGWNSLYWNNHDQPRIVSRFGDDQSYRVESAKMLATLLHCMKGTPFIYQGEEIGMTNVRFDSIEQYQDIETLNMYKEKRAQGVPHETLMASIHAKGRDNARTPMQWDETKHGGFTDGTPWLEVNPNYKEINVKQALKDPNSIFYHYQKLIQLRKEHAILVHGSYDLILEDDPEIFAYKRTYNGQTLLVVCNFYGRITDFECPAEVVLSEPTLLLSNYDEEENGSYTSFRLRPYEARVYLGKNE

SEQ ID NO: 1847 - DNA, 1686 bp, Bacillus subtilis
  CDS (1)..(1686): transl_table=11
atgagtgaatggtggaaagaagctgtcgtttatcaaatttacccgcgcagtttttatgatgccaatggagatggattcggagatttgcaaggtgtgattcaaaagctggattacatcaaaaacctcggggcggatgtcatctggctctccccggtatttgattccccgcaggatgacaacggatatgatatcagcgattacaaaaacatgtacgaaaagtttgggacaaatgaagatatgtttcagctgattgatgaagtccataaacgcggaatgaaaatcgtcatggatttggtcgtgaaccacacatcagatgagcatgcttggtttgctgaaagccgcaagtcgaaggacaatccttaccgggattattatctttggaaagatcctaaaccggacggctcagagccgaataattggggatcgatcttttcaggctcagcgtggacatacgatgaaggaacagggcagtattatttgcactacttttcgaaaaaacagcctgatttaaattgggaaaacgaagccgttcgccgggaagtttatgatgtaatgagattctggatggatagaggcgttgacggctggcggatggatgtgattggctctatttctaaatacaccgattttccggactacgaaacggatcacagccgcagctatattgtcggccgttatcactctaacggcccacgtcttcatgagtttattcaagagatgaacagggaagtgctttctcattacgactgcatgacagtcggagaggcaaacggctctgatattgaagaggcgaaaaagtacacagatgcaagcaggcaagagctgaatatgatctttacatttgaacatatggatattgataaagaacaaaactcgccaaatgggaaatggcagatcaagccgtttgatttgattgctttaaaaaagacgatgacaaggtggcagaccgggttaatgaatgtcggctggaataccctttattttgagaaccatgaccagccgagggttatttcccgctggggcaatgacaggaaactgcgtaaggaatgtgcgaaggcatttgcaacggttctgcacggcatgaaaggaacgccgtttatttaccagggagaagaaatcggcatggtcaacagcgatatgccgctggagatgtatgatgatcttgaaataaagaatgcatatcgtgaactagtcgtcgaaaacaaaacgatgtcagaaaaagagtttgtcaaagccgtgatgataaaaggaagggatcatgcgagaacaccgatgcagtgggatgccggaaaacatgcgggattcacagccggagacccgtggataccggtaaattcccgctatcaagatatcaatgtgaaagagtctttggaagatcaagattcgattttcttttactatcagaagctcattcaattacgaaagcaatataagattatgatatatggcgattatcagctgttgcaggagaatgatccgcaggtcttttcttaccttcgagaatatcgaggggaaaagcttcttgtcgttgtgaatttatcggaagaaaaggctctgttcgaagcgcctccagaactgattcatgagcgttggaaagtgctaatttcaaactatccgcaggagcgggctgacttaaagagtattagcctcaaaccttatgaagctgtgatgggcattagtatatga

SEQ ID NO: 1848 - protein, 561 aa, Bacillus subtilis
MSEWWKEAVVYQIYPRSFYDANGDGFGDLQGVIQKLDYIKNLGADVIWLSPVFDSPQDDNGYDISDYKNMYEKFGTNEDMFQLIDEVHKRGMKIVMDLVVNHTSDEHAWFAESRKSKDNPYRDYYLWKDPKPDGSEPNNWGSIFSGSAWTYDEGTGQYYLHYFSKKQPDLNWENEAVRREVYDVMRFWMDRGVDGWRMDVIGSISKYTDFPDYETDHSRSYIVGRYHSNGPRLHEFIQEMNREVLSHYDCMTVGEANGSDIEEAKKYTDASRQELNMIFTFEHMDIDKEQNSPNGKWQIKPFDLIALKKTMTRWQTGLMNVGWNTLYFENHDQPRVISRWGNDRKLRKECAKAFATVLHGMKGTPFIYQGEEIGMVNSDMPLEMYDDLEIKNAYRELVVENKTMSEKEFVKAVMIKGRDHARTPMQWDAGKHAGFTAGDPWIPVNSRYQDINVKESLEDQDSIFFYYQKLIQLRKQYKIMIYGDYQLLQENDPQVFSYLREYRGEKLLVVVNLSEEKALFEAPPELIHERWKVLISNYPQERADLKSISLKPYEAVMGISI

SEQ ID NO: 1849 - DNA, 1689 bp, Bacillus thermoglucosidasius
  CDS (1)..(1689): transl_table=11
ttggaaagagtatggtggaaagaagcggtggtataccaaatttatccgcgcagtttttacgattccaatggagacggcattggcgatatccgcggcattatcgctaaattggactatttaaaagaacttggcgtcgatgttgtttggctgtcgccggtatataagtcgccaaatgacgataacggatatgatataagcgattatcgcgatattatggatgagtttggcacgatggcagattggaaaacaatgcttgaagaaatgcacaagcggggaataaaactagtgatggatttagtcgtcaaccatacatcggatgaacatccgtggtttatcgaatcgagaaaatcaaaagacaacccatatcgtgattattatatttggcggcctgggaaaaatggaaaagaaccgaataactgggagtctgtttttagcggttctgcatgggaatacgatgaaatgacaggagaatattatttgcatcttttttcaaaaaagcaacctgatttaaactgggaaaatccgaaagtgcgccgcgaagtgtatgagatgatgaagttttggctcgacaaaggcgtcgatggtttccgcatggatgtcattaatatgatttccaaagtgccggaattgccggatggtgagccgcaaagcgggaaaaaatacgcgtcgggaagccggtattatatgaacggcccgcgtgtccatgaatttttgcaagagatgaaccgggaagtgttgtcgaaatatgacattatgacggttggagaaacgccgggtgtcacaccaaaagagggaattttatatactgatccgtcgcgccgtgagttaaacatggtgtttcaattcgaacatatggatttggattcagggcctggcggaaaatgggatattcgtccatggtcgttggcagatttgaaaaaaacgatgacaaaatggcaaaaagaactggaaggaaagggctggaacagtctttacttaaataaccatgaccagccgcgcgctgtttctcgttttggcgatgacggcaaatatcgggtcgaatcggcgaaaatgctggcaacatttctccatatgatgcaaggaacaccgtatatttaccaaggggaagagatcggaatgaccaatgtgcgcttcccgtcgattgaagattaccgcgatattgaaacgttaaacatgtataaagaacgtgtcgaagaatatggagaagatccgcaagaagtgatggaaaaaatttattataaaggacgcgacaacgcgcgcacgccgatgcagtgggatgacagcgaaaacgcaggatttaccgcagggacgccgtggattccagtcaatccaaattataaagaaatcaatgtgaaagcggcgttagaggatccaaattcggtgtttcattattataaaaaattaattcaactccgcaagcagcatgacattatcgtttatggaacatatgacttaattttggaagacgacccgtatatttaccgatatacacgcacgctgggaaatgaacaactgatcgttattaccaatttttcagaaaaaactcctgttttccggcttccggaccatatcatttataaaacaaaagaactgcttattagcaattacgatgtggatgaagcggaggaattgaaagaaattcgcttgcgtccatgggaagcgcgcgtatataaaatccgtttgccataa

SEQ ID NO: 1850 - protein, 562 aa, Bacillus thermoglucosidasius
MERVWWKEAVVYQIYPRSFYDSNGDGIGDIRGIIAKLDYLKELGVDVVWLSPVYKSPNDDNGYDISDYRDIMDEFGTMADWKTMLEEMHKRGIKLVMDLVVNHTSDEHPWFIESRKSKDNPYRDYYIWRPGKNGKEPNNWESVFSGSAWEYDEMTGEYYLHLFSKKQPDLNWENPKVRREVYEMMKFWLDKGVDGFRMDVINMISKVPELPDGEPQSGKKYASGSRYYMNGPRVHEFLQEMNREVLSKYDIMTVGETPGVTPKEGILYTDPSRRELNMVFQFEHMDLDSGPGGKWDIRPWSLADLKKTMTKWQKELEGKGWNSLYLNNHDQPRAVSRFGDDGKYRVESAKMLATFLHMMQGTPYIYQGEEIGMTNVRFPSIEDYRDIETLNMYKERVEEYGEDPQEVMEKIYYKGRDNARTPMQWDDSENAGFTAGTPWIPVNPNYKEINVKAALEDPNSVFHYYKKLIQLRKQHDIIVYGTYDLILEDDPYIYRYTRTLGNEQLIVITNFSEKTPVFRLPDHIIYKTKELLISNYDVDEAEELKEIRLRPWEARVYKIRLP

SEQ ID NO: 1851 - DNA, 25 bp, Artificial sequence
  primer
atgactatttcttctgcacatccag

SEQ ID NO: 1852 - DNA, 25 bp, Artificial sequence
  primer
tcattcagatatgtaaattctgccc

SEQ ID NO: 1853 - protein, 636 aa, Artificial sequence
  consensus sequence
  Variant (3)..(7): Xaa in position 3 to 7 is any amino acid
  Variant (13)..(13): Xaa in position 13 is any amino acid
  Variant (16)..(16): Xaa in position 16 is any amino acid
  Variant (20)..(20): Xaa in position 20 is any amino acid
  Variant (23)..(23): Xaa in position 23 is any amino acid
  Variant (26)..(27): Xaa in position 26 to 27 is any amino acid
  Variant (30)..(32): Xaa in position 30 to 32 is any amino acid
  Variant (34)..(34): Xaa in position 34 is any amino acid
  Variant (36)..(38): Xaa in position 36 to 38 is any amino acid
  Variant (41)..(41): Xaa in position 41 is any amino acid
  Variant (43)..(44): Xaa in position 43 to 44 is any amino acid
  Variant (46)..(47): Xaa in position 46 to 47 is any amino acid
  Variant (49)..(49): Xaa in position 49 is any amino acid
  Variant (51)..(51): Xaa in position 51 is any amino acid
  Variant (54)..(55): Xaa in position 54 to 55 is any amino acid
  Variant (57)..(57): Xaa in position 57 is any amino acid
  Variant (62)..(63): Xaa in position 62 to 63 is any amino acid
  Variant (65)..(71): Xaa in position 65 to 71 is any amino acid
  Variant (74)..(75): Xaa in position 74 to 75 is any amino acid
  Variant (77)..(79): Xaa in position 77 to 79 is any amino acid
  Variant (81)..(84): Xaa in position 81 to 84 is any amino acid
  Variant (86)..(89): Xaa in position 86 to 89 is any amino acid
  Variant (91)..(93): Xaa in position 91 to 93 is any amino acid
  Variant (97)..(97): Xaa in position 97 is any amino acid
  Variant (100)..(100): Xaa in position 100 is any amino acid
  Variant (102)..(103): Xaa in position 102 to 103 is any amino acid
  Variant (105)..(105): Xaa in position 105 is any amino acid
  Variant (108)..(109): Xaa in position 108 to 109 is any amino acid
  Variant (111)..(117): Xaa in position 111 to 117 is any amino acid
  Variant (118)..(118): Xaa in position 118 is any or no amino acid
  Variant (121)..(121): Xaa in position 121 is any amino acid
  Variant (123)..(123): Xaa in position 123 is any amino acid
  Variant (125)..(127): Xaa in position 125 to 127 is any amino acid
  Variant (128)..(139): Xaa in position 128 to 139 is any or no amino acid
  Variant (144)..(146): Xaa in position 144 to 146 is any amino acid
  Variant (148)..(149): Xaa in position 148 to 149 is any amino acid
  Variant (150)..(151): Xaa in position 150 to 151 is any or no amino acid
  Variant (155)..(162): Xaa in position 155 to 162 is any amino acid
  Variant (167)..(167): Xaa in position 167 is any amino acid
  Variant (169)..(171): Xaa in position 169 to 171 is any amino acid
  Variant (178)..(178): Xaa in position 178 is any amino acid
  Variant (180)..(182): Xaa in position 180 to 182 is any amino acid
  Variant (184)..(192): Xaa in position 184 to 192 is any amino acid
  Variant (193)..(193): Xaa in position 193 is any or no amino acid
  Variant (196)..(197): Xaa in position 196 to 197 is any amino acid
  Variant (199)..(199): Xaa in position 199 is any amino acid
  Variant (204)..(204): Xaa in position 204 is any amino acid
  Variant (206)..(211): Xaa in position 206 to 211 is any amino acid
  Variant (213)..(216): Xaa in position 213 to 216 is any amino acid
  Variant (217)..(217): Xaa in position 217 is any or no amino acid
  Variant (219)..(251): Xaa in position 219 to 251 is any amino acid
  Variant (252)..(270): Xaa in position 252 to 270 is any or no amino acid
  Variant (275)..(289): Xaa in position 275 to 289 is any amino acid
  Variant (290)..(299): Xaa in position 290 to 299 is any or no amino acid
  Variant (301)..(301): Xaa in position 301 is any amino acid
  Variant (303)..(319): Xaa in position 303 to 319 is any amino acid
  Variant (320)..(328): Xaa in position 320 to 328 is any or no amino acid
  Variant (330)..(343): Xaa in position 330 to 343 is any amino acid
  Variant (344)..(350): Xaa in position 344 to 350 is any or no amino acid
  Variant (352)..(357): Xaa in position 352 to 357 is any amino acid
  Variant (361)..(362): Xaa in position 361 to 362 is any amino acid
  Variant (364)..(365): Xaa in position 364 to 365 is any amino acid
  Variant (368)..(368): Xaa in position 368 is any amino acid
  Variant (370)..(384): Xaa in position 370 to 384 is any amino acid
  Variant (385)..(392): Xaa in position 385 to 392 is any or no amino acid
  Variant (395)..(397): Xaa in position 395 to 397 is any amino acid
  Variant (401)..(401): Xaa in position 401 is any amino acid
  Variant (403)..(403): Xaa in position 403 is any amino acid
  Variant (406)..(416): Xaa in position 406 to 416 is any amino acid
  Variant (417)..(419): Xaa in position 417 to 419 is any or no amino acid
  Variant (421)..(424): Xaa in position 421 to 424 is any amino acid
  Variant (426)..(435): Xaa in position 426 to 435 is any amino acid
  Variant (436)..(455): Xaa in position 436 to 455 is any or no amino acid
  Variant (458)..(459): Xaa in position 458 to 459 is any amino acid
  Variant (463)..(463): Xaa in position 463 is any amino acid
  Variant (466)..(470): Xaa in position 466 to 470 is any amino acid
  Variant (471)..(471): Xaa in position 471 is any or no amino acid
  Variant (475)..(478): Xaa in position 475 to 478 is any amino acid
  Variant (479)..(487): Xaa in position 479 to 487 is any or no amino acid
  Variant (490)..(492): Xaa in position 490 to 492 is any amino acid
  Variant (494)..(507): Xaa in position 494 to 507 is any amino acid
  Variant (508)..(517): Xaa in position 508 to 517 is any or no amino acid
  Variant (519)..(529): Xaa in position 519 to 529 is any amino acid
  Variant (531)..(537): Xaa in position 531 to 537 is any amino acid
  Variant (538)..(539): Xaa in position 538 to 539 is any or no amino acid
  Variant (541)..(567): Xaa in position 541 to 567 is any amino acid
  Variant (568)..(579): Xaa in position 568 to 579 is any or no amino acid
  Variant (581)..(607): Xaa in position 581 to 607 is any amino acid
  Variant (608)..(631): Xaa in position 608 to 631 is any or no amino acid
  Variant (633)..(633): Xaa in position 633 is any amino acid
  Variant (635)..(635): Xaa in position 635 is any amino acid
WWXXXXXYQIYPXSFXDSNXDGXGDXXGIXXXLXYXXXLGXDXXWXXPXYXSPXXDXGYDIXXYXXXXXXXGTXXDXXXLXXXXHXXXXKXXXDLVXNHXSXXHXWFXXSXXXXXXXXRDXYXWXXXXXXXXXXXXXXXPNNWXXXFXXXXSAWXXXXXXXXYYLHXFXXXQPDLNWXNXXXRXXXXXXXXXXWLXXGXDGFRXDXXXXXXKXXXXXDXXXXXXXXXXXXXXXXXXXXXXXXXXXXXXXXXXXXXXXXXXXXXXXXXXXXTVGEXXXXXXXXXXXXXXXXXXXXXXXXXFXFXXXXXXXXXXXXXXXXXXXXXXXXXXKXXXXXXXXXXXXXXXXXXXXXWXXXXXXNHDXXRXXSRXGXXXXXXXXXXXXXXXXXXXXXXXGTXXXYQGXEXGMXXXXXXXXXXXXXXDXXXXNXXXXXXXXXXXXXXXXXXXXXXXXXXXXXXRDXXRTPXQWXXXXXXAGFXXXXXXXXXXXXXPWXXXNXXXXXXXXXXXXXXXXXXXXXXXXSXXXXXXXXXXXRXXXXXXXXXGXXXXXXXXXXXXXXXXXXXXXXXXXXXXXXXXXXXXXXXNXXXXXXXXXXXXXXXXXXXXXXXXXXXXXXXXXXXXXXXXXXXXXXXXXXXLXPXE

SEQ ID NO: 1854 - protein, 57 aa, Artificial sequence
  protein pattern
  Variant (4)..(4): Xaa in position 4 is Trp or Tyr
  Variant (6)..(6): Xaa in position 6 is any amino acid
  Variant (8)..(8): Xaa in position 8 is Phe or Tyr
  Variant (9)..(9): Xaa in position 9 is any amino acid
  Variant (11)..(11): Xaa in position 11 is any amino acid
  Variant (12)..(12): Xaa in position 12 is Asp, Asn or Thr
  Variant (13)..(13): Xaa in position 13 is Ala, Asp, Gly, Asn or Ser
  Variant (14)..(14): Xaa in position 14 is Asp, Asn or Ser
  Variant (16)..(16): Xaa in position 16 is any amino acid
  Variant (18)..(18): Xaa in position 18 is Asp or Asn
  Variant (19)..(19): Xaa in position 19 is Ile, Leu or Met
  Variant (20)..(20): Xaa in position 20 is any amino acid
  Variant (22)..(22): Xaa in position 22 is Ile or Val
  Variant (23)..(23): Xaa in position 23 is any amino acid
  Variant (24)..(24): Xaa in position 24 is Ala, Asp, Glu, Gly, Gln, Ser or Thr
  Variant (25)..(25): Xaa in position 25 is any amino acid
  Variant (26)..(26): Xaa in position 26 is Leu or Val
  Variant (27)..(27): Xaa in position 27 is Asp, Glu, Asn, Pro, Gln or Ser
  Variant (28)..(28): Xaa in position 28 is His or Tyr
  Variant (29)..(29): Xaa in position 29 is Phe, Ile, Leu or Val
  Variant (30)..(32): Xaa in position 30 to 32 is any amino acid
  Variant (33)..(33): Xaa in position 33 is Gly or Asn
  Variant (34)..(38): Xaa in position 34 to 38 is any amino acid
  Variant (39)..(39): Xaa in position 39 is Phe, Ile, Leu or Val
  Variant (40)..(40): Xaa in position 40 is any amino acid
  Variant (42)..(44): Xaa in position 42 to 44 is any amino acid
  Variant (47)..(48): Xaa in position 47 to 48 is any amino acid
  Variant (50)..(50): Xaa in position 50 is any amino acid
  Variant (54)..(54): Xaa in position 54 is Ile or Val
  Variant (55)..(55): Xaa in position 55 is any amino acid
  Variant (56)..(56): Xaa in position 56 is Asp, Asn or Ser
  Variant (57)..(57): Xaa in position 57 is Phe or Tyr
YQIXPXSXXDXXXXGXGXXXGXXXXXXXXXXXXXXXXXXXPXXXSPXXDXGYDXXXX

SEQ ID NO: 1855 - protein, 29 aa, Artificial sequence
  protein pattern
  Variant (2)..(2): Xaa in position 2 is Pro or Ser
  Variant (3)..(3): Xaa in position 3 is Ala or Val
  Variant (5)..(11): Xaa in position 5 to 11 is any amino acid
  Variant (12)..(12): Xaa in position 12 is Ala, Glu or Gln
  Variant (13)..(14): Xaa in position 13 to 14 is Phe or Tyr
  Variant (16)..(17): Xaa in position 16 to 17 is any amino acid
  Variant (19)..(21): Xaa in position 19 to 21 is any amino acid
  Variant (23)..(23): Xaa in position 23 is Ala, Pro or Val
  Variant (27)..(27): Xaa in position 27 is Trp or Tyr
  Variant (28)..(28): Xaa in position 28 is any amino acid
GXXWXXXXXXXXXXLXXFXXXQXDLNXXN

SEQ ID NO: 1856 - protein, 15 aa, Artificial sequence
  protein pattern
  Variant (3)..(3): Xaa in position 3 is any amino acid
  Variant (4)..(4): Xaa in position 4 is Phe or Tyr
  Variant (5)..(5): Xaa in position 5 is Ile, Leu or Val
  Variant (9)..(9): Xaa in position 9 is Asp, Glu or Gln
  Variant (11)..(11): Xaa in position 11 is Ile or Leu
  Variant (13)..(14): Xaa in position 13 to 14 is any amino acid
  Variant (15)..(15): Xaa in position 15 is Asp or Asn
GTXXXYQGXEXGXXX

SEQ ID NO: 1857 - protein, 12 aa, Artificial sequence
  protein pattern
  Variant (2)..(4): Xaa in position 2 to 4 is any amino acid
  Variant (6)..(6): Xaa in position 6 is any amino acid
  Variant (11)..(11): Xaa in position 11 is Ile, Leu, Met or Val
WXXXGXDGFRXD

SEQ ID NO: 1858 - protein, 11 aa, Artificial sequence
  protein pattern
  Variant (3)..(4): Xaa in position 3 to 4 is any amino acid
  Variant (8)..(8): Xaa in position 8 is any amino acid
  Variant (11)..(11): Xaa in position 11 is Asp, Asn, Ser or Thr
RDXXRTPXQWX

SEQ ID NO: 1859 - DNA, 693 bp, Saccharomyces cerevisiae
  CDS (1)..(693)
atgaaattgtttcaaaacagttacgatttcaactatccatgggaccaggtaaccgccgctaactggaaaaaatacccaaatgaaatatctacacatgtcatcgcagtggacgttttaagaagagaattgaaggatcaaggtaaggtcttagttactgaacggttgattactgtaaaacaaggtgttcccaaatggatcatgatgatgctaggagggaccaatatgagtcatgtcagagaagtttctgtggtagacttaaataaaaagagcttgaccatgagaagctgtaatttaacgatgtgcaatctattaaaagtctacgaaactgtaacatatagcccgcatcccgatgactcggctaataaaacacttttccagcaggaagcccaaattacagcatatggatccattagaaagctgtgtaataagatggaagattggtcagttcaaaggttttgcgagaacgctaaaaagggtaaaatgggattcgatgctgttttgcaagtatttagtgaaaattgggaaaaacatgttgatgacttgagcaatcaacttgtcagtaaagtcaatgaaaccatggaggatgttaaaatatctgcaggtacgcttcttaaaggaactgaaaggagcggcagaaccatcttacagcaaaatattgacttgtttagagacgcatacaaccacgaaaattag

SEQ ID NO: 1860 - protein, 230 aa, Saccharomyces cerevisiae
MKLFQNSYDFNYPWDQVTAANWKKYPNEISTHVIAVDVLRRELKDQGKVLVTERLITVKQGVPKWIMMMLGGTNMSHVREVSVVDLNKKSLTMRSCNLTMCNLLKVYETVTYSPHPDDSANKTLFQQEAQITAYGSIRKLCNKMEDWSVQRFCENAKKGKMGFDAVLQVFSENWEKHVDDLSNQLVSKVNETMEDVKISAGTLLKGTERSGRTILQQNIDLFRDAYNHEN

SEQ ID NO: 1861 - DNA, 687 bp, Bombyx mori
  CDS (1)..(687)
atgaagatttggacatcagaacacacattcaaccatccatgggaaacagttgctcaagcagcatggcgaaaatatcctaatcctatgaatccagccgtcatagggacagatgttgtggaaagaaaagttgtagatggtgtacttcatactcatagattagtcagttccaaatggttttttccacgatgggcccaggcgctaattggtactgcaaaaatatgttatgctagtgagatatcagaagtaaacccaatacagcgacagatgactttaaaaacaacaaacctaacattctgtcattacattgctgttgatgaaactgtacggtatactccacatccttcagattcctcaaaaacattactaaaacaagaagctgtagtcactgtacaaggtgtgcctctcagtagttacatggaagaccttttaaccaacaaaatttctctaaatgctggcaaaggaaggcaagctatagaatgggttatagggaagtttgacactgaaattaaggagcttgcaagttcagcctgtaaaagtacagatgaattattatcacaaacaaagaagtcaattgatgacatcacaacatcagcaagaagatcaatggatgatatctcgtctaaagcaaaaagcacacttgatgatatagaaaaattaactaaagctaatgccaaccagaggagctga

SEQ ID NO: 1862 - protein, 228 aa, Bombyx mori
MKIWTSEHTFNHPWETVAQAAWRKYPNPMNPAVIGTDVVERKVVDGVLHTHRLVSSKWFFPRWAQALIGTAKICYASEISEVNPIQRQMTLKTTNLTFCHYIAVDETVRYTPHPSDSSKTLLKQEAVVTVQGVPLSSYMEDLLTNKISLNAGKGRQAIEWVIGKFDTEIKELASSACKSTDELLSQTKKSIDDITTSARRSMDDISSKAKSTLDDIEKLTKANANQRS

SEQ ID NO: 1863 - DNA, 555 bp, Schizosaccharomyces pombe
  CDS (1)..(555)
atgaagatttttgaaagttgccacttatttcaatatccttttgaacaagtttcagcggctcactggcagaagtatcccaatgagcatgctactcatgtgatagccgtggatactcttgatcgcaaggttttggataatggtgtattgtatacggaacgcttgatcacgtgtcaccaggcccttcctagatggattttaaaattgattgacggtgcgcaagattgttatattcgagaaactagctatgttgacttgaaagcgcgcactttaacacttttaacctcaaacttgacgtttagtgatcgtttgagagtagatgagacggtgacttactcaccccatcctgaactggaagctactgtttttcaacaggaggctcgaattgaagccttagcgtgtatgaagcggttgtcaaacctgatcgaacaatggtcggttgatggttttggaaagaaagcttcccgtggaaaagaaggcttcgaaagtgttttagaaaaaataaacatgtctgtattccaaacgcgaccgtttggttcttctgaagcgaccgcatag

SEQ ID NO: 1864 - protein, 184 aa, Schizosaccharomyces pombe
MKIFESCHLFQYPFEQVSAAHWQKYPNEHATHVIAVDTLDRKVLDNGVLYTERLITCHQALPRWILKLIDGAQDCYIRETSYVDLKARTLTLLTSNLTFSDRLRVDETVTYSPHPELEATVFQQEARIEALACMKRLSNLIEQWSVDGFGKKASRGKEGFESVLEKINMSVFQTRPFGSSEATA

SEQ ID NO: 1865 - DNA, 696 bp, Nasonia vitripennis
  CDS (1)..(696)
atgaaggtctggatgtccgagcacactttcaatcatccatgggagactgtagcatccgctgcgtggaggaagtacccaaatcccataactccatcagtgctgggtactgatgtcattgacaggagggtcgttaatggagtcttgcatacgcatagactcgtttctagtcagtggggatttccacgatggacaaaaccactgatcggcgacgccaacatctgttacgccagcgaaaacagcgaagtcgatccgggcaacaggctaatggtattgaggaccagaaacctgactttctacaattacatcacggtcgacgaaactgtcacgtacacgccccatccccaggataccagcaagacgcttctgacgcaggaggccgtcgttaaagtacacggcgtcccgctcactcattacatggaggatctcctcacgtccaagatctccttcaatgccggcaagggccgtcaagcgatcgagtgggtgatcgacaaaatcgacgcggaagttaaggacctggccaacagcgccgccaagacgaccgacgagctgctgaacacaacgcgccggcagatcgacgaccttaccaacattaccaagcgcagcatggacgagatccagagcgcggccaagaagtcattcgaggaggtgcacaatctcacgacgcccccgtcccactcctcgatgccgaaattatag

SEQ ID NO: 1866 - protein, 231 aa, Nasonia vitripennis
MKVWMSEHTFNHPWETVASAAWRKYPNPITPSVLGTDVIDRRVVNGVLHTHRLVSSQWGFPRWTKPLIGDANICYASENSEVDPGNRLMVLRTRNLTFYNYITVDETVTYTPHPQDTSKTLLTQEAVVKVHGVPLTHYMEDLLTSKISFNAGKGRQAIEWVIDKIDAEVKDLANSAAKTTDELLNTTRRQIDDLTNITKRSMDEIQSAAKKSFEEVHNLTTPPSHSSMPKL

SEQ ID NO: 1867 - DNA, 678 bp, Aedes aegypti
  CDS (1)..(678)
atggttccgaaggcgtttttcaccgaatccaaaatgaaaatctggacttcagagcatgtattcaaccacccatgggaaaccgtggcccaggcagcctggcgaaagtacccaaatccaatcaatacggcagtgatcggcaccgatgtggtcgagaggcgggtcgtcgacggtgtcctccatacgcatcggctagtcagctccaaatggtattttccacagtgggcccagaaggtgatcggctcgcctaatgtgtgctacgccagcgaacagtccaccgtggatccggccaagaagctgatgaccctcaagacgatcaatctcaccttcggcagcttcctgtcggtgtacgaaacgctcagctacgtgccacatccgagcgatccgggcaaaacgctgctgaagcaggaggccaccgtccaggtcgagggggtgccactgaaccgctacatggaggacgtactgaccaagaacattagcaccaacgccggcaagggtcgccagggtctcgaatgggtgatagggaagctaaactcggaggtgaaagaactggccagttccgcagctaccagcaccaacgaaatcctaaatcacaccaagaaatccctggatgacatcacggaccaggcgcgaaagagcatggacgagctcagtgcgaaggcccagaagatccacgtatag

SEQ ID NO: 1868 - protein, 225 aa, Aedes aegypti
MVPKAFFTESKMKIWTSEHVFNHPWETVAQAAWRKYPNPINTAVIGTDVVERRVVDGVLHTHRLVSSKWYFPQWAQKVIGSPNVCYASEQSTVDPAKKLMTLKTINLTFGSFLSVYETLSYVPHPSDPGKTLLKQEATVQVEGVPLNRYMEDVLTKNISTNAGKGRQGLEWVIGKLNSEVKELASSAATSTNEILNHTKKSLDDITDQARKSMDELSAKAQKIHV

SEQ ID NO: 1869 - DNA, 543 bp, Coprinopsis cinerea okayama7#130
  CDS (1)..(543)
atgcacttcttctcccagcacttcgaatacgaccatccttggtctcatgtcgtgattggaatgtggaggaaatatcctaatcccaagtgcacacatgttatcagcgtggatgtcgttgaccgccaggtcaacccccagacgggcgtcgtgcggacagagcgactgttccgatgcaagcagaaggcccccggttggataataaagctgttcggtggctcagaagatgcctatgttagagagatttcgttcgtcgacccagcaacccaaaataccaccatcacctccgtgaatctgtcactgtcccaattcgccacatgctacgaggtcgtccgatacactccctcaacaccacataccacgaacttccaccaaacagcggagattcaggccaggctctccctgtggagatcggcggccgacaatctagagaaatggctggtacagcggttcgagcacaatgctcaactgggtaaaacagcgttcaccgatgtgctgcgaaccctctgggaggaacgacaggcacaagcggccgcagcttcatag

SEQ ID NO: 1870 - protein, 180 aa, Coprinopsis cinerea okayama7#130
MHFFSQHFEYDHPWSHVVIGMWRKYPNPKCTHVISVDVVDRQVNPQTGVVRTERLFRCKQKAPGWIIKLFGGSEDAYVREISFVDPATQNTTITSVNLSLSQFATCYEVVRYTPSTPHTTNFHQTAEIQARLSLWRSAADNLEKWLVQRFEHNAQLGKTAFTDVLRTLWEERQAQAAAAS

SEQ ID NO: 1871 - DNA, 732 bp, Culex quinquefasciatus
  CDS (1)..(732)
atgaaccacccgtgggaaaccgtggcccaggcggcctggcgcaagtaccccaacccgataaacacggctgtcatcggcaccgacgtcgtcgagcggcgcgtcgtggacggtgtcctgcacacgcaccgcctcgtcagctccaagtggtacttcccccagtgggcccagaagctgatcggatcgccgaacgtgtgctacgccagcgagcagtccacggtggatccgggcaagcggctgatgacgctcaagacgatcaacctgacctttggcagcttcctgtcggtgtacgaaacgctcagctacgttccgcatccgacggacccgtgcaagacgctgctcaagcaggaggccaccgtccaggtggagggcgttccgctgaaccggtacatggaggatgtgctcacgaagaacatcagcacgaacgcgggcaagggccggcagggcctcgagtgggtgataggaaagctcaactcggaggtgaaagaactggccacgtcggccgcgaccagcacgaacgagatcctcacccagacgaaaaagtccctcgacgacatcacggaccaggcccggaaaagcatggacgagctgagcgcgaccgcccagaagattcacatataccggcagcaaaaacagtgcaggatccaagacttcttcttcttctgctactacttcttctgctgcaacacccgcaacgacgactacaccgtcatcgagttcatcaacttcagctag

SEQ ID NO: 1872 - protein, 243 aa, Culex quinquefasciatus
MNHPWETVAQAAWRKYPNPINTAVIGTDVVERRVVDGVLHTHRLVSSKWYFPQWAQKLIGSPNVCYASEQSTVDPGKRLMTLKTINLTFGSFLSVYETLSYVPHPTDPCKTLLKQEATVQVEGVPLNRYMEDVLTKNISTNAGKGRQGLEWVIGKLNSEVKELATSAATSTNEILTQTKKSLDDITDQARKSMDELSATAQKIHIYRQQKQCRIQDFFFFCYYFFCCNTRNDDYTVIEFINFS

SEQ ID NO: 1873 - DNA, 564 bp, Magnaporthe grisea 70-15
  CDS (1)..(564)
atgaaggtctttacaaacaaggacactttcaactactcatgggaggaggtgtcgacggccaactggaggaaatactgcccatggaacgacaagtcgacgcatgtcatcgccgtcgacaccatctcgcgttccgtcgactcccagaccggtatcctgcgcaccgagaggctcatcacctgccggcaaaacgccccggactgggtgtgcaaagtactcggcgccagcaatggcgagtcgctcatgtacgaggtgtcgtacgtcgacgcggcgaacaaaaaggtcactatggtctcgcagaacatgacgtggtcaaacctgataaacgtccaggagaccgttgtctacagcccgctcaacgacaagcagacccagttcgttcaggacgccaagatcaccgctctgtgcggcggctggcagaagatcaggaactcgatcgaggacgccatagtcacccgtttccgtgagaacgccgccaagggccgcgagggcttcgagtccgtcctggccatgagcaggcgtgtctttgccgaggagagggctcgtcaggttgtcatggctcaatga

SEQ ID NO: 1874 - protein, 187 aa, Magnaporthe grisea 70-15
MKVFTNKDTFNYSWEEVSTANWRKYCPWNDKSTHVIAVDTISRSVDSQTGILRTERLITCRQNAPDWVCKVLGASNGESLMYEVSYVDAANKKVTMVSQNMTWSNLINVQETVVYSPLNDKQTQFVQDAKITALCGGWQKIRNSIEDAIVTRFRENAAKGREGFESVLAMSRRVFAEERARQVVMAQ

SEQ ID NO: 1875 - DNA, 555 bp, Gibberella zeae PH-1
  CDS (1)..(555)
atgaaggtctttagcaacagcgtcaccttcaactactcctgggacgaggtgtccacggccaactggacaaagtacggcccctggaacaacaagtctgagcatgtcatcgctgtcgacacactctcccgcgaagtcgaccccgcgacaggtatcctccgaaccgagcgtctcatcacatgcaagcagagcgtccccgactggatcaagaccatcatcggcggcaccggagacgagagcttcatgtacgaagccagctacgttgaccccgtcaacaagaccgttaccatggtcagccagaacttgacatggagcaacctcgtcaacgtccaggaggaggttgtttacaagcctctcggcaaccaccagacccagttcatccaaaatgccaacatcactgccctgtgcggtggctggcagcgaatcaagaacagcatcgaggacacaatggtttctcacttccgtgagaacgccgtcaagggccgtgagggctttgagcgcgtcttgatgatgagccgcaaggctttcgccgaggagagggctcgccaggttctataa

SEQ ID NO: 1876 - protein, 184 aa, Gibberella zeae PH-1
MKVFSNSVTFNYSWDEVSTANWTKYGPWNNKSEHVIAVDTLSREVDPATGILRTERLITCKQSVPDWIKTIIGGTGDESFMYEASYVDPVNKTVTMVSQNLTWSNLVNVQEEVVYKPLGNHQTQFIQNANITALCGGWQRIKNSIEDTMVSHFRENAVKGREGFERVLMMSRKAFAEERARQVL

SEQ ID NO: 1877 - DNA, 675 bp, Candida glabrata CBS 138
  CDS (1)..(675)
atgagactatttcagaatacatgcgagtttgcgtatccgtgggatcaggttactgctgcgaactggaacaagtatccgaacgaggtgtctacgcatgtggttgctgtggatgtgctgaggcgggagctgtctgcgagcgggaggcagctggtgacggagcggttgatcactgtcaagcagagtgtgccgcggtgggtgctgctggtggtgggtgcctctaagcagagctatgtgcgggaggtgtctaccgtggacctggacacgcggacgctgacgatgcggagttgcaacctgaccttctggaacatcatgaaggtgtacgagaccgtgaagtacatgccggacgctgtgaacccggacaagaccgtgttcaagcaggaggcgcagatcagcgtgtgtggcacgctgggcaggttctgcaacaaagtcgaggagtggagcgtgcagaggttcggcgagaacgcaaagaaaggtaagatggggtttgacctggtgctaaaagtgttcaacgagcactggaaccagatcaacagcgacatagaaaacgtcttcaacgagaccgtcgaggacgtcaggtctaccgccgggaacttgatcaaagaaacggagagaacgtactctaacatcctcggcaccaaccaagagatattctctgaagcattcaacaagaaatga

SEQ ID NO: 1878 - protein, 224 aa, Candida glabrata CBS 138
MRLFQNTCEFAYPWDQVTAANWNKYPNEVSTHVVAVDVLRRELSASGRQLVTERLITVKQSVPRWVLLVVGASKQSYVREVSTVDLDTRTLTMRSCNLTFWNIMKVYETVKYMPDAVNPDKTVFKQEAQISVCGTLGRFCNKVEEWSVQRFGENAKKGKMGFDLVLKVFNEHWNQINSDIENVFNETVEDVRSTAGNLIKETERTYSNILGTNQEIFSEAFNKK

SEQ ID NO: 1879 - DNA, 708 bp, Kluyveromyces lactis NRRL Y-1140
  CDS (1)..(708)
atgagactattccataaccaacacgtatttgattactcttgggattacatcaccgcggccaattggaagaagtatcctaacgaggtcagcactcatgtagtagctgttgatgttttgagaagagaattggacattagtggtaaggttctcacaagtgaacgtttgataacgtgcaaacagtctgttccgcaatgggtaatgatgctagttggtggttctaacataagttatgtgcgcgaagtatcagtggttgacctaaatgaaaagagtcttattctcagaagctgtaatttgaccggttcaagtttattaaaagtttatgagactgtcaagtatatgcctcatccagacgatccacaaaatagaaccttattcaaacaggaagcccaaattactgcatatgccacttttactaaagtgtgtaataagatcgaggagtggtccgtgaatagatttcacgaaaacgcagaaaagggtaaaagaggtttcgattctgtattaaaggtcctcgatgaaagttggaaacagactgacaaaatcatggacggtctagctgagaaagttgacgaaacagtagttgatattaagaagactactgatattctaatcaaggagactgaaaaaaaatcgtctaaattggcttcgtattaccagtatttttccaatgccttcagaaggtcgaatgatatgaccagagacggtagctaa

SEQ ID NO: 1880 - protein, 235 aa, Kluyveromyces lactis NRRL Y-1140
MRLFHNQHVFDYSWDYITAANWKKYPNEVSTHVVAVDVLRRELDISGKVLTSERLITCKQSVPQWVMMLVGGSNISYVREVSVVDLNEKSLILRSCNLTGSSLLKVYETVKYMPHPDDPQNRTLFKQEAQITAYATFTKVCNKIEEWSVNRFHENAEKGKRGFDSVLKVLDESWKQTDKIMDGLAEKVDETVVDIKKTTDILIKETEKKSSKLASYYQYFSNAFRRSNDMTRDGS

SEQ ID NO: 1881 - DNA, 648 bp, Debaryomyces hansenii CBS767
  CDS (1)..(648): transl_table=12
atgaagctttttacaacagatcattatttcaactatccgtgggaacaagttacagctgccaattggcaaaaataccctaatgaattatctactcatgtcgaatcggttgatattatcaatagagagatcgatgttgaacgtaaagtattgcgtacagaaagattgattggttgtaagcaatcaattccaaggtggttggtatatcttgttggtgcactggaccaatcatatgtgagagaagtgagtgaggttgatttggtaaataagacccttgtgatgaaatcgcataatttgacaatgaaccatttattattggttaatgaaactgttgtttacaagcctgatgcagatatgccacaatcacgtacgagtttcaaccaagaagctgaaattacagcctatgcatccataaagaaaatatgtgaaaaagttgaggaatggtccgtagaaagatttgggcaaaacgccaaagttggtaaattagggttcgaatcagttttagaaacgttgaacaagaaatgggaagaatcgggcgtatttgtttccgatgttagcttctcgattatcaaagatataaatcaagtcagcgacagaacccatagtgttttgagtgaggttacaaagttaggtaatgttttcagcaaataa

SEQ ID NO: 1882 - protein, 215 aa, Debaryomyces hansenii CBS767
MKLFTTDHYFNYPWEQVTAANWQKYPNELSTHVESVDIINREIDVERKVLRTERLIGCKQSIPRWLVYLVGALDQSYVREVSEVDLVNKTLVMKSHNLTMNHLLLVNETVVYKPDADMPQSRTSFNQEAEITAYASIKKICEKVEEWSVERFGQNAKVGKLGFESVLETLNKKWEESGVFVSDVSFSIIKDINQVSDRTHSVLSEVTKLGNVFSK

SEQ ID NO: 1883 - DNA, 555 bp, Yarrowia lipolytica CLIB122
  CDS (1)..(555)
atgaaattcttcgactcacgacactacttcaactattcgtgggaacaggtgtccatcgccaactggaaaaagtaccccaacgaggtgtccacccatgtgattgcggtggatgttctgcgtcgagaagtggaccccaagtccggcgtgcttcgaaccgagcgactcatcacctgcaaacagtccatccccaagtggcttcttgcgctggtaggaggccaggaggtgtcgtacgtccgagaggtctccgaggtcgaccccaaggcacgaaccgttgtcatgcgatccaccaacatgaccatgaataacctgctgctggtgttcgagacctgcacctactcgcccgaccccgagaaccccgccacaaagaccgtgtttgaccaggaggcccagattaccgcctttgcctcctggaagcgaatctgcaacaagattgaggactggaccgtggagcgatttggccagaacgccatcaagggcaaggccggcttcgagggcgtcctgcagaaggtggccaactcggacgtgttcgcccgagagtccgtctccctgtcttaa

SEQ ID NO: 1884 - protein, 184 aa, Yarrowia lipolytica CLIB122
MKFFDSRHYFNYSWEQVSIANWKKYPNEVSTHVIAVDVLRREVDPKSGVLRTERLITCKQSIPKWLLALVGGQEVSYVREVSEVDPKARTVVMRSTNMTMNNLLLVFETCTYSPDPENPATKTVFDQEAQITAFASWKRICNKIEDWTVERFGQNAIKGKAGFEGVLQKVANSDVFARESVSLS

SEQ ID NO: 1885 - DNA, 567 bp, Aspergillus nidulans FGSC A4
  CDS (1)..(567)
atgaaggtcttttcatctctttgcacgttcgactactcgtgggaggaggtttcaaccgccaactggaggaaatattgtccctggaatgataagtcgacgcatgttgtgggggtagatactctctcgcggggggtggaccccgagacaggaattttgcgaactgagcgattgatcacatgcaaccaatccgtaccgcaatgggtatcgtcgttgtttggaggtagcccgacctcccatgtttacgaggtttcatatgtcgaccctatttccaagaaagtaacaatgtgctcgacaaaccttacatgggccaatgttttgaacgtgcgcgagactgtcatctaccaaccgtcggtgacaaacccttcgtctaagaccgaatttcagcaggaagcgaagataactgctctctgcggaggctggcaaaagattaagaacaaggtggaagaggcaagcgtcgagcgatttagagaaaatgccaagcgtggcagggaaggcttcgaagccgtccttgagatgagtcgacgagttttcagcgagcagcgcgctctcgaatccagcgtggcatga

SEQ ID NO: 1886 - protein, 188 aa, Aspergillus nidulans FGSC A4
MKVFSSLCTFDYSWEEVSTANWRKYCPWNDKSTHVVGVDTLSRGVDPETGILRTERLITCNQSVPQWVSSLFGGSPTSHVYEVSYVDPISKKVTMCSTNLTWANVLNVRETVIYQPSVTNPSSKTEFQQEAKITALCGGWQKIKNKVEEASVERFRENAKRGREGFEAVLEMSRRVFSEQRALESSVA

SEQ ID NO: 1887 - DNA, 585 bp, Candida albicans SC5314
  CDS (1)..(585): transl_table=12
atgaagttatttgaatcagaacattcttttaattacccatgggatcaagttactgctgctaattggcaaaaataccctaatgaattagcctcacatgttatatctgttgatattttacagcgagaaatgattaataacaatacgacattgagaacagaaaggttgattggctgtaaacaacctattccgaaatggttatcgtttgtggtgggaggcgcaactgtgagttatgtgcgtgaagtcagtgaggttgacttggttaataggaccctagtgatgaaatccatgaatttgactatgaataatttattattggtaaaggaaactgttatttataaaccggacgacgaattacctcataacaaaactgtattccatcaaagtgctgagatcactgcatttgcttcgttaagcagactttgtgacaagttggaagattggtcagtggaacggtttggccagaatgccaaatctggtagattagcgtttgaaaatgttttgaataaattgacattgaagtgggaagaaaatgggatctttgagaataacaagatcttgcaggaggttaagaatttactgatttag

SEQ ID NO: 1888 - protein, 194 aa, Candida albicans SC5314
MKLFESEHSFNYPWDQVTAANWQKYPNELASHVISVDILQREMINNNTTLRTERLIGCKQPIPKWLSFVVGGATVSYVREVSEVDLVNRTLVMKSMNLTMNNLLLVKETVIYKPDDELPHNKTVFHQSAEITAFASLSRLCDKLEDWSVERFGQNAKSGRLAFENVLNKLTLKWEENGIFENNKILQEVKNLSI

SEQ ID NO: 1889 - DNA, 672 bp, Tribolium castaneum
  CDS (1)..(672)
atgaaaatctggacgagtgagcacactttcaatcacccctgggagacggtggccactgccgcctggaggaagtaccccaacccccacaacccggcagtgatcggcaccgacgtggtggagcgccaggtcgtcgacggggtcctccacacccaccgcttagtcagctcgatttggtacttccccaaatgggcacaggccataattggtagcgccaaagtatgttacgcgcgtgagcactcagaggtggaccccttcgctcgccgaatgatcctcaggacaataaatttgaccttttgtcgacatatcgccgtccatgagacacttaactacctcccgcatccatcagactccagcaagactctcctcaaacaagaagctgtagttacggtgaaaggagtccccctcaacacctacatggaggacctcctcactaacaaaatctcaaacaatgccggtaaaggcagacaggccatggaatgggtgataaaaaagttgaacgacgaggtgaaggatttaacgaggagtacagacgagatccttaaccaaacgaagaaatccatagatgacatagcgtcaagtgcgaaaaaatcaatggacgatatctcgcaaaaggccaaaaagagtttcgacgacatacaaaatctacgaccggggaacttctcagaattttag

SEQ ID NO: 1890 - protein, 223 aa, Tribolium castaneum
MKIWTSEHTFNHPWETVATAAWRKYPNPHNPAVIGTDVVERQVVDGVLHTHRLVSSIWYFPKWAQAIIGSAKVCYAREHSEVDPFARRMILRTINLTFCRHIAVHETLNYLPHPSDSSKTLLKQEAVVTVKGVPLNTYMEDLLTNKISNNAGKGRQAMEWVIKKLNDEVKDLTRSTDEILNQTKKSIDDIASSAKKSMDDISQKAKKSFDDIQNLRPGNFSEF

SEQ ID NO: 1891 - DNA, 648 bp, Drosophila melanogaster
  CDS (1)..(648)
atgaaaatctggacatcggagcacatattcaaccacccgtgggagacggtcacgcaggcggcgtggcgcaagtaccccaatccgatgacgccctctatcattggcacggacgtggtcgagcgccgtgtggtggacggcgtcctgcacacgcatcgcctggtacagtccaagtggtacttccccaagtggacgcacgcgctgatcggcacggctaaaacttgtttcgccagcgaacgctccacagtggacccggagcgcaaacagatggtgctgaagacaaacaacctcaccttctgccgcaacatcagcgtggacgaggtgctctactatgagccgcatccgtcggatgccagcaagacgctgctcaagcaggaggccaccgtgaccgtctttggtgtgccgctgtcccactacatggaggacctgctcacctcgaccattagcacaaatgccggcaagggacgccagggcctggagtgggtgatcgggctgatcaacacggaggtcaagggcatcgctcgcggcaccgacgaacttctgcacaacacacggcgctccatcgacgaggtgacggagagcgcgcggaagagcatggacgagatcagcgcgcaggccgccaaggcggcgaaggcgatgcacattacgtag

SEQ ID NO: 1892 - protein, 215 aa, Drosophila melanogaster
MKIWTSEHIFNHPWETVTQAAWRKYPNPMTPSIIGTDVVERRVVDGVLHTHRLVQSKWYFPKWTHALIGTAKTCFASERSTVDPERKQMVLKTNNLTFCRNISVDEVLYYEPHPSDASKTLLKQEATVTVFGVPLSHYMEDLLTSTISTNAGKGRQGLEWVIGLINTEVKGIARGTDELLHNTRRSIDEVTESARKSMDEISAQAAKAAKAMHIT

SEQ ID NO: 1893 - DNA, 540 bp, Saccharomyces cerevisiae
  CDS (1)..(540)
atgaaatcatttcaaaaatcttatgaattcgattacccatgggagaaagtcaccacggcgaactggatgaaatatccaaacaagatctccacacacgttattgcagtcgatgtgctccgccgagagctcaaagaacatggcgatgtacttcttacagaacggctgataaccatacgtcagaacacccctcactggatgtccattttagtggggaacactaatttagcatacgtgcgagaggtctccaccgttgatcgaagggacagatctttaactatgaggagttgcaatatgaccttcccgcatattttgaagtgttacgaaaccgtacgttatgttcctcatccgaaaaatccatcgaatgtgactcttttcaagcaggatgcaaagtttctgtctggtgttccgaccaaaacctttagtgagaaagtagaaaactggggcgttaaacgttttagtgataacgcggtgaaggggaaagtcgggtttgatagtattctagcaatgttcaacgatatctggaaaaatgctaacgaataa

SEQ ID NO: 1894 - protein, 179 aa, Saccharomyces cerevisiae
MKSFQKSYEFDYPWEKVTTANWMKYPNKISTHVIAVDVLRRELKEHGDVLLTERLITIRQNTPHWMSILVGNTNLAYVREVSTVDRRDRSLTMRSCNMTFPHILKCYETVRYVPHPKNPSNVTLFKQDAKFLSGVPTKTFSEKVENWGVKRFSDNAVKGKVGFDSILAMFNDIWKNANE

SEQ ID NO: 1895 - DNA, 594 bp, Glycine max
  CDS (1)..(594)
atggtgaaagcacatacacaggaacacgtctacaagcacccttgggaacgtgtaacttgtgcatcttggcgcaagtttgctgaccaagagaacaaacgcatattatcccatattcttgatgttgacacattgaaccacagccttgacccttcatcagggaagctttacacgacccgtgctatcacgatccattgtcctgggccatggtttgtccgcaagattgttggtcaggatatttgccactgtgtggaatccactgtggtggatgcacggtcgcgctccatgcaactaacctcccggaatatcagcctccagaagttcattgaagtggaagagaagatccgatatgatcctcacccggataacccgactgggtgcacaatctgccaccaggagactcgcatccggattaagccgctgtcggctttggcacccatggctgaaaaggtggagcaacgatgtgctgaaaagttccttcagaatagtgtcaagggtaaagagggtatggacaggatttgtaaatatcttgaagcagaatcaagcagccttgccttgggattctatctttctcatctcagttttgggtttatttag

SEQ ID NO: 1896 - protein, 197 aa, Glycine max
MVKAHTQEHVYKHPWERVTCASWRKFADQENKRILSHILDVDTLNHSLDPSSGKLYTTRAITIHCPGPWFVRKIVGQDICHCVESTVVDARSRSMQLTSRNISLQKFIEVEEKIRYDPHPDNPTGCTICHQETRIRIKPLSALAPMAEKVEQRCAEKFLQNSVKGKEGMDRICKYLEAESSSLALGFYLSHLSFGFI

SEQ ID NO: 1897 - DNA, 27 bp, Artificial sequence
  primer
atgaaattgtttcaaaacagttacgat

SEQ ID NO: 1898 - DNA, 25 bp, Artificial sequence
  primer
ctaattttcgtggttgtatgcgtct

SEQ ID NO: 1899 - protein, 173 aa, Artificial sequence
  consensus sequence
  Variant (2)..(9): Xaa in position 2 to 9 is any amino acid
  Variant (11)..(13): Xaa in position 11 to 13 is any amino acid
  Variant (15)..(16): Xaa in position 15 to 16 is any amino acid
  Variant (18)..(19): Xaa in position 18 to 19 is any amino acid
  Variant (21)..(21): Xaa in position 21 is any amino acid
  Variant (23)..(23): Xaa in position 23 is any amino acid
  Variant (26)..(26): Xaa in position 26 is any amino acid
  Variant (27)..(30): Xaa in position 27 to 30 is any or no amino acid
  Variant (32)..(36): Xaa in position 32 to 36 is any amino acid
  Variant (38)..(40): Xaa in position 38 to 40 is any amino acid
  Variant (42)..(44): Xaa in position 42 to 44 is any amino acid
  Variant (46)..(51): Xaa in position 46 to 51 is any amino acid
  Variant (52)..(53): Xaa in position 52 to 53 is any or no amino acid
  Variant (55)..(55): Xaa in position 55 is any amino acid
  Variant (57)..(57): Xaa in position 57 is any amino acid
  Variant (60)..(66): Xaa in position 60 to 66 is any amino acid
  Variant (68)..(68): Xaa in position 68 is any amino acid
  Variant (70)..(74): Xaa in position 70 to 74 is any amino acid
  Variant (76)..(82): Xaa in position 76 to 82 is any amino acid
  Variant (83)..(84): Xaa in position 83 to 84 is any or no amino acid
  Variant (86)..(86): Xaa in position 86 is any amino acid
  Variant (88)..(88): Xaa in position 88 is any amino acid
  Variant (91)..(101): Xaa in position 91 to 101 is any amino acid
  Variant (103)..(103): Xaa in position 103 is any amino acid
  Variant (105)..(110): Xaa in position 105 to 110 is any amino acid
  Variant (112)..(112): Xaa in position 112 is any amino acid
  Variant (114)..(116): Xaa in position 114 to 116 is any amino acid
  Variant (118)..(118): Xaa in position 118 is any amino acid
  Variant (120)..(124): Xaa in position 120 to 124 is any amino acid
  Variant (125)..(127): Xaa in position 125 to 127 is any or no amino acid
  Variant (129)..(131): Xaa in position 129 to 131 is any amino acid
  Variant (133)..(133): Xaa in position 133 is any amino acid
  Variant (135)..(147): Xaa in position 135 to 147 is any amino acid
  Variant (148)..(151): Xaa in position 148 to 151 is any or no amino acid
  Variant (153)..(161): Xaa in position 153 to 161 is any amino acid
  Variant (164)..(165): Xaa in position 164 to 165 is any amino acid
  Variant (167)..(172): Xaa in position 167 to 172 is any amino acid
MXXXXXXXXFXXXWXXVXXAXWXKYXXXXXNXXXXXVXXXDXXXRXXXXXXXXLXTXRLXXXXXXXPXWXXXXXGXXXXXXXXXEXSXVDXXXXXXXXXXXNXTXXXXXXVXEXXXYXPXXXXXXXXTXXXQXAXXXXXXXXXXXXXXXXXEXXXXXXXXXNAXXGXXXXXXV

SEQ ID NO: 1900 - protein, 29 aa, Artificial sequence
  protein pattern
  Variant (2)..(2): Xaa in position 2 is Ala, Asp, Asn or Gln
  Variant (3)..(3): Xaa in position 3 is His or Tyr
  Variant (4)..(4): Xaa in position 4 is Pro or Ser
  Variant (5)..(5): Xaa in position 5 is Phe or Trp
  Variant (6)..(6): Xaa in position 6 is Asp or Glu
  Variant (7)..(7): Xaa in position 7 is any amino acid
  Variant (8)..(8): Xaa in position 8 is Ile or Val
  Variant (9)..(9): Xaa in position 9 is Ala, Ser or Thr
  Variant (10)..(10): Xaa in position 10 is any amino acid
  Variant (12)..(12): Xaa in position 12 is any amino acid
  Variant (14)..(14): Xaa in position 14 is any amino acid
  Variant (17)..(17): Xaa in position 17 is any or no amino acid
  Variant (19)..(19): Xaa in position 19 is any or no amino acid
  Variant (21)..(22): Xaa in position 21 to 22 is any amino acid
  Variant (23)..(23): Xaa in position 23 is Ala, Asn, Ser or Thr
  Variant (24)..(24): Xaa in position 24 is Glu, Pro, Ser or Thr
  Variant (25)..(25): Xaa in position 25 is any amino acid
  Variant (26)..(26): Xaa in position 26 is Ile or Val
  Variant (27)..(27): Xaa in position 27 is any amino acid
  Variant (28)..(28): Xaa in position 28 is Ala, Gly or Ser
  Variant (29)..(29): Xaa in position 29 is Thr or Val
FXXXXXXXXXAXWXKYXPXNXXXXXXXXX

SEQ ID NO: 1901 - protein, 36 aa, Artificial sequence
  protein pattern
  Variant (2)..(2): Xaa in position 2 is any amino acid
  Variant (4)..(4): Xaa in position 4 is any or no amino acid
  Variant (6)..(6): Xaa in position 6 is any or no amino acid
  Variant (8)..(10): Xaa in position 8 to 10 is any amino acid
  Variant (11)..(11): Xaa in position 11 is Lys or Arg
  Variant (12)..(12): Xaa in position 12 is any amino acid
  Variant (13)..(13): Xaa in position 13 is Leu, Met or Val
  Variant (14)..(14): Xaa in position 14 is any amino acid
  Variant (15)..(15): Xaa in position 15 is Leu or Met
  Variant (16)..(16): Xaa in position 16 is any amino acid
  Variant (17)..(17): Xaa in position 17 is Ser or Thr
  Variant (18)..(18): Xaa in position 18 is any amino acid
  Variant (20)..(20): Xaa in position 20 is Leu or Met
  Variant (22)..(25): Xaa in position 22 to 25 is any amino acid
  Variant (26)..(26): Xaa in position 26 is Ile, Leu, Met or Val
  Variant (27)..(27): Xaa in position 27 is any amino acid
  Variant (28)..(28): Xaa in position 28 is Cys or Val
  Variant (29)..(29): Xaa in position 29 is any amino acid
  Variant (31)..(33): Xaa in position 31 to 33 is any amino acid
  Variant (35)..(35): Xaa in position 35 is any amino acid
EXSXVXDXXXXXXXXXXXNXTXXXXXXXXEXXXYXP

SEQ ID NO: 1902 - protein, 16 aa, Artificial sequence
  protein pattern
  Variant (2)..(2): Xaa in position 2 is any amino acid
  Variant (4)..(4): Xaa in position 4 is Glu or His
  Variant (7)..(7): Xaa in position 7 is Ile or Val
  Variant (8)..(8): Xaa in position 8 is Gly, Gln, Ser or Thr
  Variant (9)..(13): Xaa in position 9 to 13 is any amino acid
  Variant (15)..(15): Xaa in position 15 is any amino acid
LXTXRLXXXXXXXPXW

SEQ ID NO: 1903 - protein, 24 aa, Artificial sequence
  protein pattern
  Variant (2)..(2): Xaa in position 2 is Asp, Glu or Asn
  Variant (3)..(4): Xaa in position 3 to 4 is any amino acid
  Variant (5)..(5): Xaa in position 5 is Thr or Val
  Variant (6)..(7): Xaa in position 6 to 7 is any amino acid
  Variant (8)..(8): Xaa in position 8 is Phe or Ile
  Variant (9)..(10): Xaa in position 9 to 10 is any amino acid
  Variant (13)..(13): Xaa in position 13 is any or no amino acid
  Variant (15)..(15): Xaa in position 15 is any or no amino acid
  Variant (17)..(17): Xaa in position 17 is Lys or Arg
  Variant (18)..(18): Xaa in position 18 is any amino acid
  Variant (19)..(19): Xaa in position 19 is Ala or Gly
  Variant (20)..(20): Xaa in position 20 is Phe, Ile, Leu or Met
  Variant (21)..(21): Xaa in position 21 is Asp or Glu
  Variant (22)..(22): Xaa in position 22 is any amino acid
  Variant (23)..(23): Xaa in position 23 is Ile or Val
  Variant (24)..(24): Xaa in position 24 is Ile or Leu
EXXXXXXXXXNAXKXGXXXXXXXX

SEQ ID NO: 1904 - DNA, 690 bp, Saccharomyces cerevisiae
  CDS (1)..(690)
atgactgtttctacttccaagaccccaaaaaagaatattaagtataccttaacacatactttacaaaaatggaaagaaactttaaagaaaattacccacgaaacgttgagtagtatcgatgactctagtggaagcgatgaaaaaatagaggctctgtttactgtgtctcagcctgccgtcgtagcctccaagggtatagacagagatagtggtgcttctatgtcgcaggtaggaggaggtgtcaatagtacattggagatgaagctcacagatgagagtgaggaatctagctctgctaataacacgaccacaaccgcctcgcatactctatcgaattcgaagaagtctacgcagaactttgaaaactataacgtagtggaggaacgcataaaattagcacagaaaagtaaggcgccgttttgtaacgctgagaaaatctggaaacgaagaagacaactctggacacaacccactgagcaaagtgaaagcgccaataatgacggagttactcgaagggagattttccaagctatacctcaggaatattatgctcgagtttacaagaaactggtggtagatgataagccattgagagagcctctaaatctggaagatgctttacaagtcataaatgcaggctggacggaaacgagaaagtgggctaatgctgccaaggcatgccatgactga

SEQ ID NO: 1905 - protein, 229 aa, Saccharomyces cerevisiae
MTVSTSKTPKKNIKYTLTHTLQKWKETLKKITHETLSSIDDSSGSDEKIEALFTVSQPAVVASKGIDRDSGASMSQVGGGVNSTLEMKLTDESEESSSANNTTTTASHTLSNSKKSTQNFENYNVVEERIKLAQKSKAPFCNAEKIWKRRRQLWTQPTEQSESANNDGVTRREIFQAIPQEYYARVYKKLVVDDKPLREPLNLEDALQVINAGWTETRKWANAAKACHD

SEQ ID NO: 1906 - DNA, 693 bp, Saccharomyces pastorianus
  CDS (1)..(693)
atgacttcgacctcaaaatatccgaaaaagaacattaaatataccttaacgcataccttacagaaatggaaggaaacgttaaagaaaattactcatgaaacgctgagtaatatcgacgattcaagcggaagcgatgagaagattgaggcgctattcaccgtggctcaacctcccgttacaacttcaaagggcatagaaagagacagtggggcttccatgtctcaagtagggatgggaggtgtcaacagtacattggaaatgaaacttactgacgagagtgaggaatctagttccgctaacaatgcaacaacaaccacaaccacttcccatattctgtcgaattctagaaaatccatacagagttttgaaaactataacgtggtggaagaacgcataaaactagcccaacaaagcaagaagccattttgtaatggtgaaaaactctggagacgaagaagacagctttggacacaacacaatgaacaagaaggaagcactggcgacgatggagctgctcacagggaagtctttcaagccatacctgaagaatactatgctcgtatttataagaaattggtcgtagatgacaagcctttaagagagccactaaacctggaagacgctttacaagtaattaatacaggctggacggaaacaaggaaatgggctaatgctgccaaaggcatgccgtaa

SEQ ID NO: 1907 - protein, 230 aa, Saccharomyces pastorianus
MTSTSKYPKKNIKYTLTHTLQKWKETLKKITHETLSNIDDSSGSDEKIEALFTVAQPPVTTSKGIERDSGASMSQVGMGGVNSTLEMKLTDESEESSSANNATTTTTTSHILSNSRKSIQSFENYNVVEERIKLAQQSKKPFCNGEKLWRRRRQLWTQHNEQEGSTGDDGAAHREVFQAIPEEYYARIYKKLVVDDKPLREPLNLEDALQVINTGWTETRKWANAAKGMP

SEQ ID NO: 1908 - DNA, 687 bp, Saccharomyces pastorianus
  CDS (1)..(687)
atgactgtttctacttccaagaccccaaaaaagaatattaagtataccttaacacatactttacaaaaatggaaagaaactttaaagaaaattacccacgaaacgttgagtagtatcgatgactctagtggaagcgatgaaaaaatagaggctctgtttactgtgtctcagcctgccgtcgtagcctccaagggtatagacagagatagtggtgcttctatgtcgcaggtaggaggaggtgtcaatagtacattggagatgaagctcacagatgagagtgaggaatctagctctgctaataacacgaccacaaccgcctcgcatactctatcgaattcgaagaagtctacgcagaactttgaaaactataacgtagtggaggaacgcataaaattagcacagaaaagtaaggcgccgttttgtaacgctgagaaaatctggaaacgaagaagacaactctggacacaacccactgagcaaagtgaaagcgccaataatgacggagttactcgaagggagattttccaagctatacctcaggaatattatgctcgagtttacaagaaactggtggtagatgataagccattgagagagcctctaaatctggaagatgctttacaagtcataaatgcaggctggacggaaacgagaaagtgggctaatgctgccaagggcatgccatga

SEQ ID NO: 1909 - protein, 228 aa, Saccharomyces pastorianus
MTVSTSKTPKKNIKYTLTHTLQKWKETLKKITHETLSSIDDSSGSDEKIEALFTVSQPAVVASKGIDRDSGASMSQVGGGVNSTLEMKLTDESEESSSANNTTTTASHTLSNSKKSTQNFENYNVVEERIKLAQKSKAPFCNAEKIWKRRRQLWTQPTEQSESANNDGVTRREIFQAIPQEYYARVYKKLVVDDKPLREPLNLEDALQVINAGWTETRKWANAAKGMP

SEQ ID NO: 1910 - DNA, 858 bp, Candida glabrata CBS 138
  CDS (1)..(858)
atgataggaggtaaaagttcgccgaaatcgatgaagaattcaataggtagtacacttcgaaagtggagaagcactctgcggaaggtgacccatgatacgttaaactcactagatgaggtgacagcaaatgaggagaagatagatgctctatttgatggagaaggtggaaaaactgttaactggggtccagttcggaccagcaaaaatgggttggtacaagtgcatgaggaggatatgcttgaagaagatgttacaaatgatctcaagtcgtcaagtttcggttttgaaaagagtacaacagctcaaccggttggaattcaaggactcttgaaatctggaagtattgagcagataagctcgggctctaggtcgcttgtgggaggtgtaggcggaactagtatgaggctttcagaagagagtgaagaaggtgggtcaactactggtactagcaacaaacatgagcagctaacaataatgaagtctagctcaggaggtagccaaggtgtttcacataaagaaaagttgacctatgataactttgacgctgttgcggaatgtaataaacttcgacaaagatcggataagccatttgttggtggtccaaagatctgggagaaaaggagaaagctctggtgcgagccctcagtctctgctgaagaaatcgctcaccgtagagagaatgggagaggtgtttttgatgcaattccagaggcttatcatactagtgtttacaagaagttggttgttgataataaacctttaaaggaaccgttgaacttatctcatgcgatgaaagtaattaatgctggttggatagatacaaaaaaatgggctaacgccggtaagggattgccataa

SEQ ID NO: 1911 - protein, 285 aa, Candida glabrata CBS 138
MIGGKSSPKSMKNSIGSTLRKWRSTLRKVTHDTLNSLDEVTANEEKIDALFDGEGGKTVNWGPVRTSKNGLVQVHEEDMLEEDVTNDLKSSSFGFEKSTTAQPVGIQGLLKSGSIEQISSGSRSLVGGVGGTSMRLSEESEEGGSTTGTSNKHEQLTIMKSSSGGSQGVSHKEKLTYDNFDAVAECNKLRQRSDKPFVGGPKIWEKRRKLWCEPSVSAEEIAHRRENGRGVFDAIPEAYHTSVYKKLVVDNKPLKEPLNLSHAMKVINAGWIDTKKWANAGKGLP

SEQ ID NO: 1912 - DNA, 24 bp, Artificial sequence
  primer
atgactgtttctacttccaagacc

SEQ ID NO: 1913 - DNA, 22 bp, Artificial sequence
  primer
tcagtcatggcatgccttggca

SEQ ID NO: 1914 - protein, 279 aa, Artificial sequence
  consensus sequence
  Variant (2)..(4): Xaa in position 2 to 4 is any amino acid
  Variant (6)..(7): Xaa in position 6 to 7 is any amino acid
  Variant (9)..(13): Xaa in position 9 to 13 is any amino acid
  Variant (16)..(16): Xaa in position 16 is any amino acid
  Variant (19)..(20): Xaa in position 19 to 20 is any amino acid
  Variant (23)..(23): Xaa in position 23 is any amino acid
  Variant (25)..(25): Xaa in position 25 is any amino acid
  Variant (28)..(28): Xaa in position 28 is any amino acid
  Variant (31)..(33): Xaa in position 31 to 33 is any amino acid
  Variant (35)..(40): Xaa in position 35 to 40 is any amino acid
  Variant (44)..(44): Xaa in position 44 is any amino acid
  Variant (48)..(53): Xaa in position 48 to 53 is any amino acid
  Variant (56)..(59): Xaa in position 56 to 59 is any amino acid
  Variant (61)..(62): Xaa in position 61 to 62 is any amino acid
  Variant (65)..(89): Xaa in position 65 to 89 is any amino acid
  Variant (91)..(97): Xaa in position 91 to 97 is any amino acid
  Variant (98)..(109): Xaa in position 98 to 109 is any or no amino acid
  Variant (111)..(112): Xaa in position 111 to 112 is any amino acid
  Variant (114)..(115): Xaa in position 114 to 115 is any amino acid
  Variant (116)..(122): Xaa in position 116 to 122 is any or no amino acid
  Variant (126)..(127): Xaa in position 126 to 127 is any amino acid
  Variant (129)..(129): Xaa in position 129 is any amino acid
  Variant (130)..(130): Xaa in position 130 is any or no amino acid
  Variant (132)..(132): Xaa in position 132 is any amino acid
  Variant (134)..(135): Xaa in position 134 to 135 is any amino acid
  Variant (140)..(141): Xaa in position 140 to 141 is any amino acid
  Variant (143)..(156): Xaa in position 143 to 156 is any amino acid
  Variant (157)..(166): Xaa in position 157 to 166 is any or no amino acid
  Variant (168)..(168): Xaa in position 168 is any amino acid
  Variant (170)..(175): Xaa in position 170 to 175 is any amino acid
  Variant (177)..(179): Xaa in position 177 to 179 is any amino acid
  Variant (181)..(181): Xaa in position 181 is any amino acid
  Variant (183)..(184): Xaa in position 183 to 184 is any amino acid
  Variant (187)..(187): Xaa in position 187 is any amino acid
  Variant (189)..(189): Xaa in position 189 is any amino acid
  Variant (191)..(192): Xaa in position 191 to 192 is any amino acid
  Variant (195)..(198): Xaa in position 195 to 198 is any amino acid
  Variant (200)..(200): Xaa in position 200 is any amino acid
  Variant (202)..(203): Xaa in position 202 to 203 is any amino acid
  Variant (206)..(206): Xaa in position 206 is any amino acid
  Variant (209)..(225): Xaa in position 209 to 225 is any amino acid
  Variant (227)..(228): Xaa in position 227 to 228 is any amino acid
  Variant (230)..(230): Xaa in position 230 is any amino acid
  Variant (234)..(235): Xaa in position 234 to 235 is any amino acid
  Variant (237)..(240): Xaa in position 237 to 240 is any amino acid
  Variant (248)..(248): Xaa in position 248 is any amino acid
  Variant (252)..(252): Xaa in position 252 is any amino acid
  Variant (258)..(259): Xaa in position 258 to 259 is any amino acid
  Variant (261)..(262): Xaa in position 261 to 262 is any amino acid
  Variant (266)..(266): Xaa in position 266 is any amino acid
  Variant (269)..(270): Xaa in position 269 to 270 is any amino acid
  Variant (272)..(272): Xaa in position 272 is any amino acid
  Variant (278)..(278): Xaa in position 278 is any amino acid
KXXXKXXKXXXXXTLXKWXXTLXKXTHXTLXXXDXXXXXXEKIXALFXXXXXXTVXXXXVXXSKXXXXXXXXXXXXXXXXXXXXXXXXXGXXXXXXXXXXXXXXXXXXXSXXQXXXXXXXXXGGVXXTXXMXLXXESEEXXSXXXXXXXXXXXXXXXXXXXXXXXXSXKXXXXXXNXXXVXEXXKLXQXSXXPFXXXXKXWXXRRXLWXXXXXXXXXXXXXXXXXRXXFXAIPXXYXXXXYKKLVVDXKPLXEPLNLXXAXXVINXGWXXTXKWANAXK

SEQ ID NO: 1915 - protein, 56 aa, Artificial sequence
  protein pattern
  Variant (2)..(2): Xaa in position 2 is Glu or Gly
  Variant (3)..(3): Xaa in position 3 is Ile or Val
  Variant (5)..(5): Xaa in position 5 is Asp or Gln
  Variant (9)..(9): Xaa in position 9 is any or no amino acid
  Variant (11)..(11): Xaa in position 11 is any or no amino acid
  Variant (13)..(13): Xaa in position 13 is His or Tyr
  Variant (14)..(14): Xaa in position 14 is Ala or Thr
  Variant (15)..(15): Xaa in position 15 is Arg or Ser
  Variant (16)..(16): Xaa in position 16 is Ile or Val
  Variant (24)..(24): Xaa in position 24 is Asp or Asn
  Variant (28)..(28): Xaa in position 28 is Lys or Arg
  Variant (34)..(34): Xaa in position 34 is Glu or Ser
  Variant (35)..(35): Xaa in position 35 is Asp or His
  Variant (37)..(37): Xaa in position 37 is Leu or Met
  Variant (38)..(38): Xaa in position 38 is any amino acid
  Variant (42)..(42): Xaa in position 42 is Ala or Thr
  Variant (45)..(45): Xaa in position 45 is any amino acid
  Variant (46)..(46): Xaa in position 46 is Asp or Glu
  Variant (48)..(48): Xaa in position 48 is Lys or Arg
  Variant (54)..(54): Xaa in position 54 is Ala or Gly
  Variant (56)..(56): Xaa in position 56 is Ala or Gly
RXXFXAIPXEXYXXXXYKKLVVDXKPLXEPLNLXXAXXVINXGWXXTXKWANAXKX

SEQ ID NO: 1916 - protein, 60 aa, Artificial sequence
  protein pattern
  Variant (2)..(2): Xaa in position 2 is Asn or Gln
  Variant (3)..(3): Xaa in position 3 is Gly or Ser
  Variant (4)..(7): Xaa in position 4 to 7 is any amino acid
  Variant (8)..(8): Xaa in position 8 is Glu or Gln
  Variant (9)..(9): Xaa in position 9 is any amino acid
  Variant (10)..(10): Xaa in position 10 is Phe or Leu
  Variant (11)..(11): Xaa in position 11 is Glu or Thr
  Variant (12)..(13): Xaa in position 12 to 13 is any amino acid
  Variant (15)..(17): Xaa in position 15 to 17 is any or no amino acid
  Variant (19)..(19): Xaa in position 19 is Ala or Val
  Variant (21)..(22): Xaa in position 21 to 22 is any amino acid
  Variant (23)..(23): Xaa in position 23 is any or no amino acid
  Variant (26)..(26): Xaa in position 26 is any amino acid
  Variant (28)..(28): Xaa in position 28 is any amino acid
  Variant (30)..(30): Xaa in position 30 is Asp or Lys
  Variant (31)..(31): Xaa in position 31 is any amino acid
  Variant (34)..(34): Xaa in position 34 is Cys or Val
  Variant (35)..(35): Xaa in position 35 is Gly or Asn
  Variant (36)..(36): Xaa in position 36 is Ala or Gly
  Variant (37)..(37): Xaa in position 37 is Glu or Pro
  Variant (39)..(39): Xaa in position 39 is Ile or Leu
  Variant (41)..(41): Xaa in position 41 is Glu, Lys or Arg
  Variant (42)..(42): Xaa in position 42 is Lys or Arg
  Variant (45)..(45): Xaa in position 45 is any amino acid
  Variant (48)..(48): Xaa in position 48 is Cys or Thr
  Variant (49)..(49): Xaa in position 49 is Glu or Gln
  Variant (50)..(50): Xaa in position 50 is any amino acid
  Variant (51)..(51): Xaa in position 51 is Asn, Ser or Thr
  Variant (52)..(52): Xaa in position 52 is any amino acid
  Variant (53)..(53): Xaa in position 53 is Gln or Ser
  Variant (54)..(54): Xaa in position 54 is Ala, Glu or Ser
  Variant (55)..(55): Xaa in position 55 is Glu or Gly
  Variant (56)..(56): Xaa in position 56 is Glu or Ser
  Variant (57)..(57): Xaa in position 57 is any amino acid
  Variant (58)..(58): Xaa in position 58 is Ala, Gly or Asn
  Variant (59)..(59): Xaa in position 59 is any amino acid
  Variant (60)..(60): Xaa in position 60 is Asp or Arg
SXXXXXXXXXXXXNXXXVXEXXXKLXQXSXXPFXXXXKXWXXRRXLWXXXXXXXXXXXXX

SEQ ID NO: 1917 - protein, 57 aa, Artificial sequence
  protein pattern
  Variant (2)..(6): Xaa in position 2 to 6 is any amino acid
  Variant (7)..(7): Xaa in position 7 is any or no amino acid
  Variant (9)..(10): Xaa in position 9 to 10 is any or no amino acid
  Variant (12)..(12): Xaa in position 12 is Gln or Arg
  Variant (15)..(15): Xaa in position 15 is Lys or Arg
  Variant (16)..(16): Xaa in position 16 is Glu or Ser
  Variant (19)..(19): Xaa in position 19 is Lys or Arg
  Variant (21)..(21): Xaa in position 21 is Ile or Val
  Variant (24)..(24): Xaa in position 24 is Asp or Glu
  Variant (27)..(28): Xaa in position 27 to 28 is Asn or Ser
  Variant (29)..(29): Xaa in position 29 is Ile or Leu
  Variant (31)..(31): Xaa in position 31 is Asp or Glu
  Variant (32)..(32): Xaa in position 32 is Ser or Val
  Variant (33)..(33): Xaa in position 33 is Ser or Thr
  Variant (34)..(34): Xaa in position 34 is Ala or Gly
  Variant (35)..(35): Xaa in position 35 is Asn or Ser
  Variant (36)..(36): Xaa in position 36 is Asp or Glu
  Variant (40)..(40): Xaa in position 40 is Asp or Glu
  Variant (44)..(44): Xaa in position 44 is Asp or Thr
  Variant (45)..(45): Xaa in position 45 is Gly or Val
  Variant (46)..(46): Xaa in position 46 is Ala, Glu or Ser
  Variant (47)..(47): Xaa in position 47 is Gly or Gln
  Variant (48)..(48): Xaa in position 48 is Gly or Pro
  Variant (49)..(49): Xaa in position 49 is any amino acid
  Variant (50)..(51): Xaa in position 50 to 51 is Thr or Val
  Variant (52)..(52): Xaa in position 52 is Ala, Asn or Thr
  Variant (53)..(54): Xaa in position 53 to 54 is any amino acid
  Variant (55)..(55): Xaa in position 55 is Gly or Pro
  Variant (56)..(56): Xaa in position 56 is Ile or Val
  Variant (57)..(57): Xaa in position 57 is Asp, Glu or Arg
KXXXXXXTXXLXKWXXTLXKXTHXTLXXXDXXXXXXEKIXALFXXXXXXXXXXXXXX

SEQ ID NO: 1918 - protein, 13 aa, Artificial sequence
  protein pattern
  Variant (2)..(2): Xaa in position 2 is Gly or Ser
  Variant (3)..(3): Xaa in position 3 is Ala or Gly
  Variant (5)..(5): Xaa in position 5 is any amino acid
  Variant (7)..(7): Xaa in position 7 is any amino acid
  Variant (10)..(10): Xaa in position 10 is any or no amino acid
  Variant (12)..(12): Xaa in position 12 is any or no amino acid
SXXSXSXVGXGXG

SEQ ID NO: 1919 - protein, 21 aa, Artificial sequence
  protein pattern
  Variant (2)..(2): Xaa in position 2 is any amino acid
  Variant (3)..(3): Xaa in position 3 is any or no amino acid
  Variant (5)..(5): Xaa in position 5 is Lys or Arg
  Variant (7)..(7): Xaa in position 7 is Ser or Thr
  Variant (8)..(8): Xaa in position 8 is Asp or Glu
  Variant (13)..(14): Xaa in position 13 to 14 is any or no amino acid
  Variant (16)..(16): Xaa in position 16 is Ala, Ser or Thr
  Variant (17)..(17): Xaa in position 17 is Ala, Asn, Ser or Thr
  Variant (18)..(18): Xaa in position 18 is Ala, Gly or Asn
  Variant (19)..(19): Xaa in position 19 is Asn or Thr
  Variant (20)..(20): Xaa in position 20 is Ala, Asn, Ser or Thr
  Variant (21)..(21): Xaa in position 21 is Ala, Asn or Thr
TXXMXLXXESEEXXSXXXXXX

SEQ ID NO: 1920 - DNA, 1518 bp, Saccharomyces cerevisiae
  CDS (1)..(1518)
atgagtgaaggccccgtcaaattcgaaaaaaataccgtcatatctgtctttggtgcgtcaggtgatctggcaaagaagaagacttttcccgccttatttgggcttttcagagaaggttaccttgatccatctaccaagatcttcggttatgcccggtccaaattgtccatggaggaggacctgaagtcccgtgtcctaccccacttgaaaaaacctcacggtgaagccgatgactctaaggtcgaacagttcttcaagatggtcagctacatttcgggaaattacgacacagatgaaggcttcgacgaattaagaacgcagatcgagaaattcgagaaaagtgccaacgtcgatgtcccacaccgtctcttctatctggccttgccgccaagcgtttttttgacggtggccaagcagatcaagagtcgtgtgtacgcagagaatggcatcacccgtgtaatcgtagagaaacctttcggccacgacctggcctctgccagggagctgcaaaaaaacctggggcccctctttaaagaagaagagttgtacagaattgaccattacttgggtaaagagttggtcaagaatcttttagtcttgaggttcggtaaccagtttttgaatgcctcgtggaatagagacaacattcaaagcgttcagatttcgtttaaagagaggttcggcaccgaaggccgtggcggctatttcgactctataggcataatcagagacgtgatgcagaaccatctgttacaaatcatgactctcttgactatggaaagaccggtgtcttttgacccggaatctattcgtgacgaaaaggttaaggttctaaaggccgtggcccccatcgacacggacgacgtcctcttgggccagtacggtaaatctgaggacgggtctaagcccgcctacgtggatgatgacactgtagacaaggactctaaatgtgtcacttttgcagcaatgactttcaacatcgaaaacgagcgttgggagggcgtccccatcatgatgcgtgccggtaaggctttgaatgagtccaaggtggagatcagactgcagtacaaagcggtcgcatcgggtgtcttcaaagacattccaaataacgaactggtcatcagagtgcagcccgatgccgctgtgtacctaaagtttaatgctaagacccctggtctgtcaaatgctacccaagtcacagatctgaatctaacttacgcaagcaggtaccaagacttttggattccagaggcttacgaggtgttgataagagacgccctactgggtgaccattccaactttgtcagagatgacgaattggatatcagttggggcatattcaccccattactgaagcacatagagcgtccggacggtccaacaccggaaatttacccctacggatcaagaggtccaaagggattgaaggaatatatgcaaaaacacaagtatgttatgcccgaaaagcacccttacgcttggcccgtgactaagccagaagatacgaaggataattag

SEQ ID NO: 1921 - protein, 505 aa, Saccharomyces cerevisiae
MSEGPVKFEKNTVISVFGASGDLAKKKTFPALFGLFREGYLDPSTKIFGYARSKLSMEEDLKSRVLPHLKKPHGEADDSKVEQFFKMVSYISGNYDTDEGFDELRTQIEKFEKSANVDVPHRLFYLALPPSVFLTVAKQIKSRVYAENGITRVIVEKPFGHDLASARELQKNLGPLFKEEELYRIDHYLGKELVKNLLVLRFGNQFLNASWNRDNIQSVQISFKERFGTEGRGGYFDSIGIIRDVMQNHLLQIMTLLTMERPVSFDPESIRDEKVKVLKAVAPIDTDDVLLGQYGKSEDGSKPAYVDDDTVDKDSKCVTFAAMTFNIENERWEGVPIMMRAGKALNESKVEIRLQYKAVASGVFKDIPNNELVIRVQPDAAVYLKFNAKTPGLSNATQVTDLNLTYASRYQDFWIPEAYEVLIRDALLGDHSNFVRDDELDISWGIFTPLLKHIERPDGPTPEIYPYGSRGPKGLKEYMQKHKYVMPEKHPYAWPVTKPEDTKDN

SEQ ID NO: 1922 - DNA, 2012 bp, Oryza sativa
  CDS (177)..(1730)
gtttggtggatggaaagcgggtgtgagtgaggaagatccccctataaatcgcacccggaaaagatcaccatccattgcccaattcgccgtcgtcgtcttcttcttccacctcgggaagtcaaatctcgtcgccactgctggttttgtctccaaaggaagagaccatacagttcatcatgtcaggaggatctggtgattcttccccttcatcagggcgggctagcttcagttctttgtcaggtttgaaggacctagaactgtcttcagagtctggttgcttgtccattgtggtcctaggtgcttctggagaccttgctaagaagaaaacattcccagcgctgtttcacctctttcagcagggatttctacaatctggagaagtccatatatttgggtatgcaagatcaaatatttcggatgatggattaagagaacgcattcgtggatacctcaaaggagcttcagatgaacatatttcacaatttttgcaattaattaaatatgttagtggttcctacaatagcggggaaggatttgcatcattaaataacgccatttcagagaatgaaacttcgaagaacaacaaaccaggaagctcacgtagactattttatttggcattgcctccatcagtctacccctcagtatgcaaaatgataagatcatactgcatgaatccatcttctcattctggctggacaagggttattgttgaaaagccctttgggaaggacttggagtctgcagaggaactcagtgcccagcttggagagctgcttaatgaacaacagctgtacagaattgaccactatttaggaaaagaattggtccaaaatctgcttgtgcttcgctttgcaaaccgtttgttcctacctctttggaatcgtgataacattgctaatgtacagattgtattcagagaggactttgggactgaaggacgtggagggtactttgatcaatatggcatcattcgtgatatcattcagaaccatttgttgcaggtcttctgtttggtggctatggaaaagcctgtctctcttaagcctgagcacataagagatgaaaaagtcaaggttcttcagtcagtgacacctataaagcatgatgaggtggtccttgggcaatatgatggctacaaggatgactctacggtaccagatgactccaacacacctacttttgcatctcttgtattgagggtaaacaatgaaagatgggaaggagttcctttcattctcaaggctggcaaagcactgaacaataggaaggcagaggtacgtgtgcagttcaaggatgctcctggtgacatttttaaatgcaagaagcaaggaaggaatgaattcgttatacggttgcagccatcggaagccatgtatatgaaattaactgtcaagaaacccggactagaaatggcaaccgaacaaagcgagctggatctgtcatatgggctacgctaccaagacgtgaagatcccagaagcgtatgaacgcctcatcctggatacgataagaggggatcagcagcactttgttcgccgagacgaactgaaggctgcgtgggagatcttcactccgctgctgcacgacatcgacgacggcaaggtgaaggccctgccgtacaagccgggaacccggggacccccagaggccgacgagctgagcaagaggatgggctacgtgcagacccatggctacgtttggatacctccaaccctttcaaaattctagccgctatgtaccaatgcaggctctgtctagatgccggtttatcaggagctttgtaatattttttttaaaagaactcctactacttcgcctgtctagaacactgtaatgttggtgatcttggaataaaaagaagactatatatgctgcaagtaagcaagttacacatgttatggttagagttggacctgttatgagtttgccacaagcaactatattataggggctactataccatggatcttgttcagacaggatgatatctataaagtatcagactctggt

SEQ ID NO: 1923 - protein, 517 aa, Oryza sativa
MSGGSGDSSPSSGRASFSSLSGLKDLELSSESGCLSIVVLGASGDLAKKKTFPALFHLFQQGFLQSGEVHIFGYARSNISDDGLRERIRGYLKGASDEHISQFLQLIKYVSGSYNSGEGFASLNNAISENETSKNNKPGSSRRLFYLALPPSVYPSVCKMIRSYCMNPSSHSGWTRVIVEKPFGKDLESAEELSAQLGELLNEQQLYRIDHYLGKELVQNLLVLRFANRLFLPLWNRDNIANVQIVFREDFGTEGRGGYFDQYGIIRDIIQNHLLQVFCLVAMEKPVSLKPEHIRDEKVKVLQSVTPIKHDEVVLGQYDGYKDDSTVPDDSNTPTFASLVLRVNNERWEGVPFILKAGKALNNRKAEVRVQFKDAPGDIFKCKKQGRNEFVIRLQPSEAMYMKLTVKKPGLEMATEQSELDLSYGLRYQDVKIPEAYERLILDTIRGDQQHFVRRDELKAAWEIFTPLLHDIDDGKVKALPYKPGTRGPPEADELSKRMGYVQTHGYVWIPPTLSKF

SEQ ID NO: 1924 - DNA, 1900 bp, Oryza sativa
  CDS (151)..(1668)
  misc_feature (1883)..(1883): n is a, g, c or t
  misc_feature (1888)..(1888): n is a, g, c or t
tcgcaggaggaggcgcagcagcactagccgcggtataaaacatccaagcgctcctccatcgtcgccaccgctccggtttgcctcccgcgcgagccctcgtcgacgccgccggtatattgctgaaggaagaagagcaccaacctatttatcatgtcaggaggatcttcaccaaggtcaagacgaagcagctttaattctttatcaagagatctcgaactcccttcagagcaaggttgtctctctgttattgtcctcggggcttctggagacctagccaagaagaaaactttcccggcactcttccatctttttgcacagggatttatacaatcaggtgaagtgcatatatttgggtatgcgagatcaaacctttctgatgatgggttaagggaacgcattcgtggatacctcaaaggagcctcagaagaacatctctcagactttttgcaacatataaaatatgtcagtggttcctatgacagcggagaaggatttgagaaattgaacaaggaaatttcagagtatgagaagtcaaacaaatcagaaagccctcgcaggctcttctatttggcattgcctccatctgtctacccttcagtctgcaaaatgatcagaacatattgcatgaatccatctggatggactagagtcattgttgagaagccatttggaaaggacttggactctgcagaagaattaagtgcccaacttggggagctatttgacgaaaaccaactctacagaattgatcactacttgggaaaagagttggtccaaaacctgcttgtgcttcgttttgccaaccgcttgttcttgcctctttggaaccgcgacaatattgataatatacagattgtattcagggaggactttgggactgacgggcgtggtggatattttgatcaatatggaatcattcgtgacatcatccagaaccatttgttacaggttttctgtttggttgcaatggaaaagcctgtctctcttaagcctgagcacattagagatgagaaagtcaaggttctgcagtccgtgaaccctataaagcatgatgaggttgtccttggacaatacgaggggtacaaggatgaccctacagtgccagatgactcaaacaccccaacttttgcatctgtcgtgtttcgggtacacaatgaaagatgggagggtgttcctttcattcttaaagctggtaaagcactaagctcaaggaaagcagaagtccgtgtgcagttcaaagatgttcctggtgacatctttaaatgtaaaaggcaaggaagaaatgagtttgtcatacgccttcagccatcagaagccatgtacatgaaacttactgtcaaaaaacctggattggagatggccaccgagcagagtgaacttgatctgtcatacgggatgcggtaccaaaacgtcaaaattccagaggcatacgagcgtctcatattggatacgatacgaggagaccaacagcacttcgttcgccgagatgagctgaaggctgcttggcagatcttcactcccctgctgcacgacatcgacgaaggcaaggtgaagtctattccataccagcctggcagccgaggccccaaggaagccgatgaactgagcgagagggttgggtatatgcagacccacggttacatatggataccacccacccttgcatagacagacagacagacagacagtagtattgtttagctaggaagagtgcctctaaactgttattattgcggatatattcgtttcatattttcacgataacgcctgactagtgactacctggcgttgtaataatgtgttgcttcgtaagtataactgctattgtgaaataaaagtgcatgtttcgatcgaaaaaaaaaaaaaaaaaaaataaaaaaaanaaaanaaataaaaaaaa

SEQ ID NO: 1925 - protein, 505 aa, Oryza sativa
MSGGSSPRSRRSSFNSLSRDLELPSEQGCLSVIVLGASGDLAKKKTFPALFHLFAQGFIQSGEVHIFGYARSNLSDDGLRERIRGYLKGASEEHLSDFLQHIKYVSGSYDSGEGFEKLNKEISEYEKSNKSESPRRLFYLALPPSVYPSVCKMIRTYCMNPSGWTRVIVEKPFGKDLDSAEELSAQLGELFDENQLYRIDHYLGKELVQNLLVLRFANRLFLPLWNRDNIDNIQIVFREDFGTDGRGGYFDQYGIIRDIIQNHLLQVFCLVAMEKPVSLKPEHIRDEKVKVLQSVNPIKHDEVVLGQYEGYKDDPTVPDDSNTPTFASVVFRVHNERWEGVPFILKAGKALSSRKAEVRVQFKDVPGDIFKCKRQGRNEFVIRLQPSEAMYMKLTVKKPGLEMATEQSELDLSYGMRYQNVKIPEAYERLILDTIRGDQQHFVRRDELKAAWQIFTPLLHDIDEGKVKSIPYQPGSRGPKEADELSERVGYMQTHGYIWIPPTLA

SEQ ID NO: 1926 - DNA, 2311 bp, Zea mays
  CDS (280)..(1833)
  misc_feature (2303)..(2303): n is a, g, c or t
tcgagccgggccccgggggggtcgggccccagtgcgatccctccctcccactccacccatcattacaaatccccctccctccgtaaacggcggtcgcgaagtcaaatctcacctcaccagtggctgccttctccgctccgcgctgcgcctcccccaaagcttcagtggctgctgcgacccttctgttctccgctcttggtcttgggtgatcgccggcggtacttgtagcgggcctttgtaggtatttatctgagggaagaagaaactatacaattcatcatgtcaggagggtcgtctgaatcttccccgttatctggacaaaatagccttagttctctatcaatttccaaggacaatgaactatcttcagagtctggctgcttgtccattgttgtactaggcgcttctggagaccttgctaagaagaaaactttcccagcgctctttcaccttttccagcagggatttctgcaatctggagaagtccatatatttgggtacgcaagatcaaatctttctgatgatggattaagagaacgcattcgtggatacctcaagggagcttcagatgaacatctttctcagtttttgcagttagtaaaatatgttagtggctcctatgatagggtggaaggatttgagttattaaataaggcaatctctgagtatgaaacttcaaaaaacaatgactcgggaagctaccgcagattattttatttggcattgcctccatcagtctacccatcagtatgcaaaatgataagatcatattgcatgagtccatcttcacacaccggttggacaagggttattgttgaaaagccctttggaaaggatttgaacactgcagaggaactgagtgctgaacttgggcagctgtttcaagaagaacaactctatagaattgaccactatttaggaaaagagcttgtccaaaacttgcttgtgcttcgttttgcaaaccgcttatttttgcctctctggaaccgtgataacatagctaacgtacagatcgtatttaaggaagactttggaactgaaggacgtggaggatattttgatcaatatggtatcattcgtgatatcattcagaaccacttgttgcaggtcttctgtttggtggctatggaaaagcctgtctctcttaaacccgagcacattagagatgaaaaagtcaaggttctgcaatcggtggagcctataaagcatgaagaggtagtcatcggacaatatgatggctacaaggatgaccctactgtgccagatgactccaacacccctacttttgcatctgttgtactgagggtacacaacgaaagatgggagggggttccattcatcctcaaggctggcaaagcactaaattcgaggaaagcagagatacgtgtacagttcaaggatgctcctggtgacatttttagatgcaagaaacaaggcaggaatgagtttgtcatacgcctgcagccatcagaagccatgtacatgaaactaacggtcaaaaaacccggactggaaatggcaaccgaacaaagcgaactggatctatcgtatgggatgcggtacaatggcgtcaaaatcccagaagcatacgagcgtctcatcttggatacgataagaggagaccagcagcacttcgttcgccgagatgagctgagggccgcatgggaaatcttcactcctttgcttcacgacatcgatggtggcaagctcaggtccgttccgtacaagccgggaacccgaggaccgcaggaagccgacgagttgagcaggaggatggggtatgtgcagacccatgggtatgtatgggttccgccgaccctttctaaggtttagctgtttgattatcagctgccgtgtaaccacagaatgacagaaagcggggaagatccctttgtaatacgtgggtcgtgtaataagagaaacttctgcttgttgtttgagtgaccctttacggtattggaataaaaaaagaatgtgatgttattatctcaaaaaaaaaaaaaaaaaaaaaaagtccgcccgcagtttctgaaggcacaccaaaacgatgagacctgtagacagtactctagtctctagtccacgaagtcctcgtacttgtgttggctggccctcgactagcgtgttgtagcacactagcgccacagtaatcgagagtgctctcccaggtcgaggttagtgtggcggagcagccggggcgttagaatctgaggaggtggtggtgctggtggtggcgacgtcgcgtccagcccgctcgccatgctccgcggatgtgagagtgaccctttacggtattggaatgnttcgatta

SEQ ID NO: 1927 - protein, 517 aa, Zea mays
MSGGSSESSPLSGQNSLSSLSISKDNELSSESGCLSIVVLGASGDLAKKKTFPALFHLFQQGFLQSGEVHIFGYARSNLSDDGLRERIRGYLKGASDEHLSQFLQLVKYVSGSYDRVEGFELLNKAISEYETSKNNDSGSYRRLFYLALPPSVYPSVCKMIRSYCMSPSSHTGWTRVIVEKPFGKDLNTAEELSAELGQLFQEEQLYRIDHYLGKELVQNLLVLRFANRLFLPLWNRDNIANVQIVFKEDFGTEGRGGYFDQYGIIRDIIQNHLLQVFCLVAMEKPVSLKPEHIRDEKVKVLQSVEPIKHEEVVIGQYDGYKDDPTVPDDSNTPTFASVVLRVHNERWEGVPFILKAGKALNSRKAEIRVQFKDAPGDIFRCKKQGRNEFVIRLQPSEAMYMKLTVKKPGLEMATEQSELDLSYGMRYNGVKIPEAYERLILDTIRGDQQHFVRRDELRAAWEIFTPLLHDIDGGKLRSVPYKPGTRGPQEADELSRRMGYVQTHGYVWVPPTLSKV

SEQ ID NO: 1928 - DNA, 2489 bp, Zea mays
  CDS (194)..(1990)
ctctcatcgcggctgcccctcggcgatctcatgagcctcggtcgcctctcttcctcagcccgctcgccccctcttcgatacccccgataaaacccccgacccgccccgtctccagctggccaccccatcctcgtcttctccaattccaaagtaagaaagccacacgcgaggccgaccgaggaagtccaatctcatggcgctctcctgcatgaggtgccccgcgggcgccggcgccgcctccgcccgacgcgccgcagcgcagccgttggccgcggaggctgcggtctccttcgccagatgccgcggcttcgggaggtccgccaccgctgcgacttccgcctggttttggcgcaaccatgccgttgcctcacagggagtgaaagctcccatggatgctgatgtcaagaatgctgtcatacctcctacctcaccaaaggtggaaagtggctctccttcagaaatcactctggatgaatttgaagacttgagcgctctatgcaagaatgatgattctactgttagcatcacagtagttggagcatctggtgaccttgccaagaagaagatatttcctgccctttttgctctctactatgaagattgccttcccaagcatttcaccatctttggctatgcacggagcaagatgacagatgctgaactgaggaacatggttagcaaaacactgacttgcagaatagataaaagggaaaattgtagcgagaaaatggaagagttcctcaaaagatgcttctatcattcaggccaatatgattcagaagagcatttcatagatctagacaagaagctaaagcaacatgagggttccagagtttctaaccgccttttctacttgtcaatacctcctaatatatttttggatgttgtaaaatgtgcaagcaaatcagcatcttcggtgaatggttggacacgagtaattgttgagaagcccttcggccgagactcagaatcctctgctgcattaacaagcggtctgaagcagtaccttgtagaggaccaaattttcaggattgaccattatttgggaaaagaactggtggagaatttgtctgtcctgcgcttctcaaatctcgtttttgagcctctctggtcaagacaatatataagaaatgtgcaacttatattctcagaagactttggtactgaaggacgtggaggatactttgatggctacggtattattcgagacataatgcagaatcatctcattcagatactagctttatttgctatggaaactcctattagtttggaagcagaggatataagaaatgagaaggttaaagttcttcgttccatgaagccgttgcagctggaagatgtggtcgtaggacagtataaaagtcacacaaaaggtggtaccacataccctgggtatactgatgataagacagtgcccaaggatagtgtgactccaacgtttgctgctgcggcgcttttcataaataatgccagatgggatggagttccctttcttatgaaagctgggaaagctttgcacacaaaacgagctgagattagggtacagttccgacatgttcctggaaatctctacaaggggagttttggcacagatcttgatagggccactaatgagcttgtgatacgtgtgcaaccggatgaagcaatttacctaaagattaacaacaagattcctggtctcggtatgcgactagataggagtaacttgaatctccattatgccgcaaggtactcaaaggagatacctgatgcttacgagagactcctgcttgatgccatcgaaggagagcgcaggcttttcatccgctcagatgagttggatgctgcatggtcactcttcacacccctcctgaaggagctggaagagaagcggatagctcctgagctctacccatatggaagccgtggacctgtcggggcccactatctcgccgccaagtacaacgtaagatggggtgacttgagtgcggagcactacaaggcatgaaacgaagatggccatatctttgtgatattcttgcttttccatttctataagtttgcacgccctggcagtgagatagatttaagagaaaaaaaagatgagaataaggcgggcagttaactaggttggaaggcatgtatccattactagactgaatagctttgttggcataattgcagctgttagggctagtttgcaaccccgtgtttccaaagaattttcattttcccaaagaaaattagtttattttccctttggaaaatgagaatctcttgggaaaattgagttgccaaacgcccttaaaaatatgtttctaggaatcagtttatttttcacaggaacaataaaggaaacggaaaaaatttgccgcatttcaaaaaaaaaaaaaaaaaaaaaaaaaaaaaaaaaaaaaaaaaaaaaaaaaaaaaaaaaaaaaaaaaaaatataaaaaaaaaaaaggggggggcccgccacttgggggcttgtccacccgggaattaat

SEQ ID NO: 1929 - protein, 598 aa, Zea mays
MALSCMRCPAGAGAASARRAAAQPLAAEAAVSFARCRGFGRSATAATSAWFWRNHAVASQGVKAPMDADVKNAVIPPTSPKVESGSPSEITLDEFEDLSALCKNDDSTVSITVVGASGDLAKKKIFPALFALYYEDCLPKHFTIFGYARSKMTDAELRNMVSKTLTCRIDKRENCSEKMEEFLKRCFYHSGQYDSEEHFIDLDKKLKQHEGSRVSNRLFYLSIPPNIFLDVVKCASKSASSVNGWTRVIVEKPFGRDSESSAALTSGLKQYLVEDQIFRIDHYLGKELVENLSVLRFSNLVFEPLWSRQYIRNVQLIFSEDFGTEGRGGYFDGYGIIRDIMQNHLIQILALFAMETPISLEAEDIRNEKVKVLRSMKPLQLEDVVVGQYKSHTKGGTTYPGYTDDKTVPKDSVTPTFAAAALFINNARWDGVPFLMKAGKALHTKRAEIRVQFRHVPGNLYKGSFGTDLDRATNELVIRVQPDEAIYLKINNKIPGLGMRLDRSNLNLHYAARYSKEIPDAYERLLLDAIEGERRLFIRSDELDAAWSLFTPLLKELEEKRIAPELYPYGSRGPVGAHYLAAKYNVRWGDLSAEHYKA

SEQ ID NO: 1930 - DNA, 1690 bp, Arabidopsis thaliana
  CDS (67)..(1614)
ctagtcagggttcttctctatctctctcgccaaagaatcgtacttcttctctcaggttttaaggagatgggatctggtcaatggcacgttgagaaaaggtctacgtttaggaatgattcgtttgtgagagaatatggtatagttccagaaactggttgtctttcaatcatagttcttggtgcttctggtgatcttgctaagaagaagacttttcctgctctttttaacttataccgtcagggatttctcaatccagatgaagttcatattttcgggtatgcgaggactaagatttctgatgaagagctgagagataggattcgtggatatcttgttgatgagaagaatgctgagcaagctgaagctttgtcaaagtttctgcagctgattaagtatgtgagtggcccttatgatgctgaggaggggttccagagattagacaaggcaatttcagagcacgaaatctccaaaaatagtactgaagggtcttctagaagactgttttatcttgcacttccaccgtctgtttatccttctgtatgcaagatgatcaagacgtgctgcatgaacaaatctgatcttggtggatggacacggattgttgtggagaagccatttggcaaggaccttgaatctgcagagcaactgagttctcagattggagagttatttgatgaatcacagatctatcgtatagaccattatcttgggaaggaattagttcaaaacatgttggtcctccggtttgcaaatcgctttttcttgccactttggaaccgtgacaatatcgagaacgtgcagattgttttcagggaagattttggaactgaagggcgtggcggatattttgacgaatatggaataatccgtgatattattcaaaaccatctgctacaggttctttgccttgttgccatggagaaaccaatatctcttaaacctgagcatatccgggatgagaaagtgaaggtgcttcaatctgtggttccgataagcgatgacgaggtagttcttggacaatacgaaggatatagggatgatgatactgttccaaacgactcaaacactccaacatttgccacaacaatccttcgcatacacaacgaaagatgggaaggtgttccatttatattaaaggccggaaaatcgttgaattcaaggaaggcagaaattcgcattcaattcaaggatgtcccaggcgacatattcagatgtcaaaagcaaggaaggaacgagtttgtgatacgcttgcaaccttcagaggcaatgtacatgaaactaactgttaagcaaccaggtctagatatgaatactgtgcaaagtgaactagacttgtcgtatgggcaacggtatcaaggtgtcgctatccctgaggcatacgagcgcttaattcttgacacaatcaaaggcgatcaacaacatttcgttcgtagagacgaattaaaggttgcgtgggagatcttcacgccgctactccacaggatcgacaaaggagaagtaaagtcaatcccatacaaaccaggaagccgaggaccgaaagaagctgatcagctactagagaaagctggttatcttcagactcacggctatatctggatccctcctacactataaaaccctacatatatataaatacacaatacatgtatctacatgtatatgtataaaaatttatgctgaatagtccctc

SEQ ID NO: 1931 - protein, 515 aa, Arabidopsis thaliana
MGSGQWHVEKRSTFRNDSFVREYGIVPETGCLSIIVLGASGDLAKKKTFPALFNLYRQGFLNPDEVHIFGYARTKISDEELRDRIRGYLVDEKNAEQAEALSKFLQLIKYVSGPYDAEEGFQRLDKAISEHEISKNSTEGSSRRLFYLALPPSVYPSVCKMIKTCCMNKSDLGGWTRIVVEKPFGKDLESAEQLSSQIGELFDESQIYRIDHYLGKELVQNMLVLRFANRFFLPLWNRDNIENVQIVFREDFGTEGRGGYFDEYGIIRDIIQNHLLQVLCLVAMEKPISLKPEHIRDEKVKVLQSVVPISDDEVVLGQYEGYRDDDTVPNDSNTPTFATTILRIHNERWEGVPFILKAGKSLNSRKAEIRIQFKDVPGDIFRCQKQGRNEFVIRLQPSEAMYMKLTVKQPGLDMNTVQSELDLSYGQRYQGVAIPEAYERLILDTIKGDQQHFVRRDELKVAWEIFTPLLHRIDKGEVKSIPYKPGSRGPKEADQLLEKAGYLQTHGYIWIPPTL

SEQ ID NO: 1932 - DNA, 1915 bp, Arabidopsis thaliana
  CDS (101)..(1648)
ataaaaattcgaactatcaaactccaccccataacaaaattctccaaactagtgaaaattttgtcgccaccgtcgcagagtgttaaaaaactattggaagatgggttctggtcaatggcatatggagaagaggtctactttaaagaatgattcgtttgtacaagaatacaatccagtcactgaaactgggagtctctctatcattgttcttggtgcttctggtgatcttgctaagaagaagacttttcctgcacttttcaatctatttcatcagggatttcttaatccagatgaagttcatatatttggatatgcaaggagtaagattactgatgaggagcttagagataaaatccgcggatatcttgttgatgagaagaatgcatctaagaaaacagaagctttgtccaagtttctaaagctgattaagtatgtgagtggaccttatgattctgaggaagggtttaagagattagacaaggcgatttcggagcacgagatatctaaaaagactgctgaaggatcttctaggagattgttttatcttgcacttcctccgtctgtataccctcctgtaagcaagatgatcaaggcatggtgcactaacaaatctgatcttggtggatggactaggattgttgttgagaaaccatttggaaaggatttggaatctgcagagcagctgagttctcagattggagccttgtttgaagaaccacagatttatcgtattgatcactatctgggaaaagagttagttcaaaacatgttggttcttcggtttgccaatcgcttgtttttgccactatggaaccgcgacaatattgcaaacgtacagatcgttttcagagaagattttggaactgaaggtcgcggtggatattttgatgaatacggaatcattcgtgatattattcaaaaccacttgctccaggttctttgccttgtcgccatggagaaaccaatctctcttaaacccgagcacatccgggatgagaaagtgaaggttcttcaatctgtgattcccataaaagatgaagaggtggttcttggacaatatgaaggatatagagatgatccaactgttccaaatgactcaaacactccaacgtttgccacaacaattcttcgcattaacaatgaaagatgggaaggtgttccttttatactgaaggccggaaaggcaatgagttcaaagaaggcagatattcgcattcagtttaaagatgttcctggcgacatattcaaatgtcaaaaccaagggaggaacgagtttgttatacgcttgcagccttcagaggccatgtacatgaagctaactgtgaagcaaccgggtctggagatgcaaaccgtgcagagtgaactagacctatcgtacaagcagcgttaccaagatgtctcgattccagaggcttacgaacgccttattcttgacacaatcagaggcgaccaacaacactttgttcgcagagacgaattaaaggcagcttgggaaatcttcactccactgcttcacaggatcgacggagaagtgaaatcggtcccatacaaacaaggtagccgtggcccagcggaagcagatcagctacttaagaaagctggttatatgcagactcatggctacatttggatccctcctacattgtaaatggtataatcatagagatgatgatgatgagtacacacaaaataagagggttttttttttcttttttttccttgcttgctgaataaaaactcttcaccagtttggagtttgtttaagtgaatcttatgtatactagtgatcttcactaggacattgtttgtttatgccttgtagtttttgttgtactagtcccttgttttctttttttacataatgcaaaacagctttgtggaaaagctaattaaattaagagatcttattctgctc

SEQ ID NO: 1933 - protein, 515 aa, Arabidopsis thaliana
MGSGQWHMEKRSTLKNDSFVQEYNPVTETGSLSIIVLGASGDLAKKKTFPALFNLFHQGFLNPDEVHIFGYARSKITDEELRDKIRGYLVDEKNASKKTEALSKFLKLIKYVSGPYDSEEGFKRLDKAISEHEISKKTAEGSSRRLFYLALPPSVYPPVSKMIKAWCTNKSDLGGWTRIVVEKPFGKDLESAEQLSSQIGALFEEPQIYRIDHYLGKELVQNMLVLRFANRLFLPLWNRDNIANVQIVFREDFGTEGRGGYFDEYGIIRDIIQNHLLQVLCLVAMEKPISLKPEHIRDEKVKVLQSVIPIKDEEVVLGQYEGYRDDPTVPNDSNTPTFATTILRINNERWEGVPFILKAGKAMSSKKADIRIQFKDVPGDIFKCQNQGRNEFVIRLQPSEAMYMKLTVKQPGLEMQTVQSELDLSYKQRYQDVSIPEAYERLILDTIRGDQQHFVRRDELKAAWEIFTPLLHRIDGEVKSVPYKQGSRGPAEADQLLKKAGYMQTHGYIWIPPTL

SEQ ID NO: 1934 - DNA, 1867 bp, Glycine max
  CDS (106)..(1662)
aactgttttgagtttccaaccttaaaagactctcttttctctctctgaactctgaagcaaaacaacattaccagagtggttcttgtaattcagtgctgctagaagatggaaactagtgaatggcatatcgagcgaagatctagcttcggctctgaatcccccttagcaagagaggcaggaaatgtgcctgaaactgggtcactctctattgtggtgcttggtgcttctggtgatcttgctaagaagaagacatttcctgcacttttccacctatacctgcagggattcttaccaccagatgaagttcatatttttggctatgcaaggacaaaaatctctgatgatgaattgagaaaccggttgcgcggctatcttgttccaaagaaaggtgcttccccccaacagttggaggatgtagagaagtttttacagctgatcaaatatgtaagcggctcttatgattctgaggatggcttccgcctgttggataaagagatttcagagcatgaatatttgaaaaacagtgttgagggtttatctcggaggcttttctatcttgctcttccaccttcagtatatccatcagtttgcaagatgatcaagacttgttgcatgaataaatctgatcttggtggatggacacgtgttgttgttgagaaaccttttggtaaggatctagaatctgcagaggaactcagtactgagattggaaagttgtttgaggaaccacagatttatcgtattgatcactacttgggaaaggaactagtgcagaacttgttggtacttcgctttgcaaatcggtttttcttgccactttggaaccgcgacaacattgacaacgtacagatagttttcagagaggattttggaactgatggccgtggtggatattttgaccagtatggaattattcgagatattattcaaaaccatctgctgcaggttctttgcttggttgctatggaaaaaccagtttctctcaggcctgagcacattcgggatgagaaagtgaaggttcttgaatcagtgctccctattaatgatgatgaggttgttcttggacaatatgaaggctataaagatgacccaaccgtacctgatgagtctaacaccccaacatttgcaactgttgttctgcgaatacacaatgaaagatgggaaggtgttcctttcatactaaaagcagggaaggcactaaattctagaaaggcagagataagggttcaattcaaggatgtccctggtgatattttcaagtgtaaaaagcaggggagaaatgagtgtgttatccgcctacagccttcagaagctatttacatgaagcttacggtcaagcaacctggactggagatgtctacggttcaaagtgagcttgacttgtcatatggacaacggtatcaaggagtaaccattcctgaggcttatgaacgcctaattcttgacacaattagaggtgatcagcaacattttgttcgcagagatgagttgaaggcatcctggcagatcttcaccccacttctgcacagaattgatgaaggggaattcaagccactcccctacaaaccaggaagcagaggtcctgcagaagcagatcagttacttgaaaaagctggctatgttcaaacacacggctacatatggatccctcctaccttgtagagtgatctaatgtaataagatgaggaatttttagctgctaatgaatacacaataagcttgtgaggcttcttccctttgaagcactcccacggatgtgtatcaagcatttggaacaatataagagactaagagtgtttggcacggtttgtgtaactgatttgcctttaaatgcaaaataaatggaaaatgaagtccatttactagc

SEQ ID NO: 1935 - protein, 518 aa, Glycine max
METSEWHIERRSSFGSESPLAREAGNVPETGSLSIVVLGASGDLAKKKTFPALFHLYLQGFLPPDEVHIFGYARTKISDDELRNRLRGYLVPKKGASPQQLEDVEKFLQLIKYVSGSYDSEDGFRLLDKEISEHEYLKNSVEGLSRRLFYLALPPSVYPSVCKMIKTCCMNKSDLGGWTRVVVEKPFGKDLESAEELSTEIGKLFEEPQIYRIDHYLGKELVQNLLVLRFANRFFLPLWNRDNIDNVQIVFREDFGTDGRGGYFDQYGIIRDIIQNHLLQVLCLVAMEKPVSLRPEHIRDEKVKVLESVLPINDDEVVLGQYEGYKDDPTVPDESNTPTFATVVLRIHNERWEGVPFILKAGKALNSRKAEIRVQFKDVPGDIFKCKKQGRNECVIRLQPSEAIYMKLTVKQPGLEMSTVQSELDLSYGQRYQGVTIPEAYERLILDTIRGDQQHFVRRDELKASWQIFTPLLHRIDEGEFKPLPYKPGSRGPAEADQLLEKAGYVQTHGYIWIPPTL

SEQ ID NO: 1936 - DNA, 2251 bp, Triticum aestivum
  CDS (151)..(1911)
tttttttctccccttcgatatccccgataaaacctccatctccatccccatccccgcccctcctatcgccacttcgccagccagctcgcccgcccgcccgcctagtcttctccgaaggaaggaacgaaggaaggaagcggccgcacgctcatggccctctcctgcatgaggtgcccggcggcggcggccggcggcggccccctcgcgcgccgcccgcaaccgccgccctcctcgtccctcgccttctccttcgccagatgcggagccgccaaggggtggcgcatccacgccgtcgccgggaaaggagtgaaagctcccatggatgctgtggagaacgctgtcgcccccgccgccccgtcaacggtggcaaatggcacttcttcagcaatcaccgtcgaggaatttgaagatttagcctctctagtgaaggatgatgaggcgtcggttagcatcaccgtagttggagcgtctggtgaccttgcgaagaagaagatatttcctgcccttttcgctctttactatgaaggttgtcttcccaagcatttctccatctttggctatgcgcggagtaaaatgacagatgctgaactgagagacatggtcagcaaaacactgacttgcaggattgataaaagggagaactgtagtgagaaaatggaagagtttctgaaacgatgcttctaccactcaggtcaatatgactcagaggaagatttcagggagctaggcaagaagatcaaacaacatgagggtcccagagtatctaaccatcttttctacttgtcgatacctccaaatatattcctggatgttgtaaaatgtgcaagcaaatcagcatcatctgtgagtggctggacaagggtaattgttgaaaaaccctttggccgggactcagagtcttctgctgccctaacgaaaggtctgaagcagtacctgacagaggaccaaatcttcaggattgaccattacttgggaaaggaactggtggagaacttgtctgtccttcgcttctcgaatcttgtttttgagcctctgtggtcaaggcaatatattaggaatgtgcaactgatattctcggaagactttggcactgaagggcgaggagggtactttgatagctatggtattatccgagacataatgcagaatcatcttcttcagatactagctctatttgcaatggaaactcctattagcttggaagcagaggacatacgaaatgagaaggttaaagttttgcgctccatgaagccattgcgactagaagatgtggtaataggacagtataaaagtcatacaaagggtggtattacataccctggatacactgaagataagacggtgcccaagggtagtctgactccaacatttgctgcagctgcgctttttataaataacgctagatgggatggagttccctttctcatgaaggctggaaaagctttgcatactaaacaggctgagattagagtacagtttcgacatgttcctggaaatctctacaaggggtcttttggaaccgatcttgacagggctactaatgaacttgtgatacgcgtgcaaccagatgaaggaatttacctaaagattaacaacaagattcctggtcttggtatgagactagataggagtaatctgaatcttcactatgcagcaaggtaccccaaggagataccagatgcgtacgagaggctcctgctcgacgcgatagaaggagagcgaaggctcttcatccggtcggacgagctggacgcagcgtgggagctcttcacgcccctcctgaaggagctggagcagaagcggatggcccccgagctatacccctacgggagccgcgggcccatgggcgcccactacctggcagccaagtacaaggtgagatggggcgacctgggtggctcggaacactaggaagagagcgtggtttcacacgggaggtgatgatttctgtttttggcgtcgcaatttctgcaaaaggccttgcagcgcacgcccagctagtgggggtgtgcgaggaacagatctgaataagggtgagcggttggcgatgcttgtgttcatcgatcgatcgaccgtgagtgagtatatttgttggtaccactggcttacatattctatgattcttaagaggaagcccagagcagaaagctcattcatcctggctgttcgtcggctcatttggttgtctggctgggccgggctgttgtattgggactgctgattgtgtaactgcaaaagctgttacttcttt

SEQ ID NO: 1937 - protein, 586 aa, Triticum aestivum
MALSCMRCPAAAAGGGPLARRPQPPPSSSLAFSFARCGAAKGWRIHAVAGKGVKAPMDAVENAVAPAAPSTVANGTSSAITVEEFEDLASLVKDDEASVSITVVGASGDLAKKKIFPALFALYYEGCLPKHFSIFGYARSKMTDAELRDMVSKTLTCRIDKRENCSEKMEEFLKRCFYHSGQYDSEEDFRELGKKIKQHEGPRVSNHLFYLSIPPNIFLDVVKCASKSASSVSGWTRVIVEKPFGRDSESSAALTKGLKQYLTEDQIFRIDHYLGKELVENLSVLRFSNLVFEPLWSRQYIRNVQLIFSEDFGTEGRGGYFDSYGIIRDIMQNHLLQILALFAMETPISLEAEDIRNEKVKVLRSMKPLRLEDVVIGQYKSHTKGGITYPGYTEDKTVPKGSLTPTFAAAALFINNARWDGVPFLMKAGKALHTKQAEIRVQFRHVPGNLYKGSFGTDLDRATNELVIRVQPDEGIYLKINNKIPGLGMRLDRSNLNLHYAARYPKEIPDAYERLLLDAIEGERRLFIRSDELDAAWELFTPLLKELEQKRMAPELYPYGSRGPMGAHYLAAKYKVRWGDLGGSEH

SEQ ID NO: 1938 - DNA, 1755 bp, Zea mays subsp. mays
  CDS (97)..(1620)
aaaccgaagcagcgacagagctcttccctcccacacgctcggcgctctgtccgccagaaatctcgtcgctggtagaagagaatcgtgccatttgtcatgtcaggaggatcttcaccatcatcaaggcgaaacagctttaattctttgtctaaggacctagaccttccttcagagcaaggttgtctctccattgttgtacttggggcttctggtgaccttgctaagaagaaaacattcccagccctctaccacctctttgagcagggattcatacaatctggagaagtccatatatttggttatgctagatcaaatctttctgatgatgggttaagagaacgcattcgtgggtatctcaaaggagccccagaagatctttcagaatttttgcaactaataaaatatgtcagtggttcctatgatactggagaaggatttgagaaactgaacagggcaatatcagagtatgaggtgtcaaagagttcaggaagctatcgcaggctcttttatttggcattgcctccatctgtctacccttcagtgtgcaaaatgatcagaacatattgcatgaatccatcttctcaccctggatggaccagagtcattgttgagaagccctttggaaaggacttggattccgctgaagaattaagtgcccaacttggggagctattcgaggaacaccaactatacaggatagaccattacctgggaaaagagttggtccaaaacttgcttgttcttcgttttgccaaccgattattcttgcctctttggaaccgcgacaatattgataatatacagattgtattcagggaagactttggtactgaagggcgtggaggatattttgaccaatatggaatcattcgtgatatcattcagaatcatttactgcaggttttctgtttggttgcaatggaaaagcctgtctcccttaagcctgagcacatcagagatgagaaagtcaaggttctgcaatctgtgaaccctattaagcctgaagaggtagtccttgggcaatacgatggctacaaggatgaccctacagtgccagatgactcgaataccccaacttttgcatctgttgttcttcgggtacacaatgaaagatgggaaggtgttcctttcattcttaaagctggtaaagcattgagttcaaagaaagcagaagttcgggtgcaattcaaggatgtccctggtgacatttttagaagcaagaagcaaggaagaaatgagtttgttatacgcctccaaccatcagaagccatgtacatgaaactaactgttaagaagcctgggttagaaatggctactgaacaaagtgaacttgatctgtcatatgggatgcggtaccaaaatgtcaaaattcctgaggcatatgaacgccttatcttggatacaataagaggtgatcagcagcactttgttcgcagagatgagctacaggctgcttggaagatcttcactcctttgctgcatgacattgacgacggcaagctgaaggccctcccgtatgaacctggcagccggggacccaaggaagccgacgaattgagcgcgagagttggatacgtgcagacccacggttacatatgggtaccgccgacccttgcatagaagagaatacgaattgtttgtacctaggaagatccgagtgtcctacaataaagctgtgcgtatatgctcattttcgctatatcgcctgccgttgtaataatgttgtgctggatatgaaataaaattgcgtgttcc

SEQ ID NO: 1939 - protein, 507 aa, Zea mays subsp. mays
MSGGSSPSSRRNSFNSLSKDLDLPSEQGCLSIVVLGASGDLAKKKTFPALYHLFEQGFIQSGEVHIFGYARSNLSDDGLRERIRGYLKGAPEDLSEFLQLIKYVSGSYDTGEGFEKLNRAISEYEVSKSSGSYRRLFYLALPPSVYPSVCKMIRTYCMNPSSHPGWTRVIVEKPFGKDLDSAEELSAQLGELFEEHQLYRIDHYLGKELVQNLLVLRFANRLFLPLWNRDNIDNIQIVFREDFGTEGRGGYFDQYGIIRDIIQNHLLQVFCLVAMEKPVSLKPEHIRDEKVKVLQSVNPIKPEEVVLGQYDGYKDDPTVPDDSNTPTFASVVLRVHNERWEGVPFILKAGKALSSKKAEVRVQFKDVPGDIFRSKKQGRNEFVIRLQPSEAMYMKLTVKKPGLEMATEQSELDLSYGMRYQNVKIPEAYERLILDTIRGDQQHFVRRDELQAAWKIFTPLLHDIDDGKLKALPYEPGSRGPKEADELSARVGYVQTHGYIWVPPTLA

SEQ ID NO: 1940 - DNA, 1874 bp, Oryza sativa
  CDS (9)..(1742)
ggctccaaatggccggcaccggcttacgattccggcagggcgccatcttcttctcaggagctcatgctgctgctcatccaagaacaaggactcctcaccaccattgctcacctcagaggacgcacgatgcgagaggaaggtgccgcctcacggctaagtccgcaaatggacgcccacagatcagtgcctccttcagagatgtggcgatagatggggcacagtctgaagatggggcgccagagcagggaggatccaccgtcagcatcaccgtcgtcggcgcctccggcgatctcgccaagaagaagatctttcccgcgcttttcgccctgtactacgaggactgcctcccggagcattttacagtttttggttatgctcgtagcaagatgagcgatgaagagctcaggaacatgattagcttgactctgacatgccggattgatcagagggagaactgcagtgacaagatggaacagtttctgaagagatgcttttatcaatctgggcagtacaattcagaggaagggttttctgaactggacagaaagctaaaagaaaaggaggctggcaaggtaccaaacaggctcttttacctgtcgattccaccgaacatatttgtcgatgtggtgagatctgctagtcgcacagcatcatctcaagacggatggacaaggttcatagtggagaagccattcggccgcgattccgagtcgtcaggggagctcactcgaaacttgaagaagtacttggccgaggagcagatattcaggattgaccattatttggggaaggagctggttgagaacctctcggtgctccgtttctccaatctcgtcttcgagccactgtggtcgaggaactacatcaggaatgtgcagctcatattttctgaagatttcggcacggagggtcgaggcggccacttcgacaactacgggatcatcagggacataatgcagaaccacctgctgcagatcctggccctgttcgccatggagactccggtcagcctcgacgccgaggacatccgcaacgagaaggtgaaagtgctgaggtcgatgaggcagctgaggctggaggacgtggtggtgggtcagtacaaggggcacagcaagggcgggaagacgtacccggcgtacgtggacgacccgacggtgccgagcggcagcatcacgccgacgttcgccgccgccgccctcttcatcgacaacgcccgctgggacggcgtccccttcctcatgaaggccggcaaggccctgcacacgcgacgggcggagatcagggtgcagttccggcgggtgccggggaacctgtacgggcggcggagccggagcgtgggcggcggcgggacgacagcgacgagggagctggagaaggcgacgaacgagctggtgctgcgggtgcagcccgacgaggcgatctacctcaagatcaacagcaaggtgcccgggctggggatgaggctggacagcagcgacctcaacctgctctactccgagcgctaccccgccgagatccccgacgcctacgagcgcctgctgctcgacgccatcgagggcgagcgccgcctcttcatccgcagcgacgagctcgacgccgcctgggccatcttcacccccgtcctcgccgacctcgaggccaacaaggtggcacccgagctctacccgtacggcagccggggacccgtcggagcgcactacctcgccgccaaccacaacgtccgctggggtgacattagctagctcagaaaatgaaaagatcgatcggagtcgctgttaccgtgcttgctataatcttcatttaccatttgcattgatgaattctttattggactgctcagggacgaaattaataaaacaaagctctagtcattc

SEQ ID NO: 1941 - protein, 577 aa, Oryza sativa
MAGTGLRFRQGAIFFSGAHAAAHPRTRTPHHHCSPQRTHDARGRCRLTAKSANGRPQISASFRDVAIDGAQSEDGAPEQGGSTVSITVVGASGDLAKKKIFPALFALYYEDCLPEHFTVFGYARSKMSDEELRNMISLTLTCRIDQRENCSDKMEQFLKRCFYQSGQYNSEEGFSELDRKLKEKEAGKVPNRLFYLSIPPNIFVDVVRSASRTASSQDGWTRFIVEKPFGRDSESSGELTRNLKKYLAEEQIFRIDHYLGKELVENLSVLRFSNLVFEPLWSRNYIRNVQLIFSEDFGTEGRGGHFDNYGIIRDIMQNHLLQILALFAMETPVSLDAEDIRNEKVKVLRSMRQLRLEDVVVGQYKGHSKGGKTYPAYVDDPTVPSGSITPTFAAAALFIDNARWDGVPFLMKAGKALHTRRAEIRVQFRRVPGNLYGRRSRSVGGGGTTATRELEKATNELVLRVQPDEAIYLKINSKVPGLGMRLDSSDLNLLYSERYPAEIPDAYERLLLDAIEGERRLFIRSDELDAAWAIFTPVLADLEANKVAPELYPYGSRGPVGAHYLAANHNVRWGDIS

SEQ ID NO: 1942 - DNA, 1897 bp, Glycine max
  CDS (133)..(1689)
gaaaacaccaactgttttgagttttccaaccttaaaaagactctctcttctctctctctctttctctccctgaagcaaaacaacattagcatcaaaaccagagtggttctagtaatccggtgctgctagaggatgggaactagtgaatggcatatcgagcgaagatctagcttcggcactgaatcccccttagcaagagaggcaggaaatgtgcctgaaactgggtcactctctattgttgtgcttggcgcttctggggatcttgctaagaagaagacatttcctgcacttttccatctataccggcagggattcttaccagcagatgaagttcacatttttggctatgcaaggacaaaaatatctgatgatgaattgagaaaccggttgcgtggctatcttgttccaaacaaaggtgcttctccccaactgttggaggatgtagagaagtttttacagctgatcaaatatgtaagtggctcttatgattctgaggatggatttcgcttgttggataaagagatttcagagcatgaatatttgaaaaagagtgttgagggtttatctcggaggcttttctatcttgctcttccaccttcagtatatccatctgtttgcaagatgatcaagacttgttgcatgaataaatctgatcttggtggatggacacgtgttgttgtcgagaagccttttggtaaggatctagaatctgcagaggaactcagtactgagattggaaagttgtttgaggaaccacagatttatcgtattgatcactacttgggaaaggaactagtgcagaacttgttggtacttcgctttgcaaatcggtttttcttgccactttggaaccgcgacaacattgacaatgtacagatagttttcagagaggattttggaactgatggccgtggtggatattttgaccaatatggaattattcgagatattattcaaaaccatttgctgcaggttctttgcttggttgctatggaaaaaccagtttctctcaggcctgagcacattcgggatgagaaagtgaaggttcttgaatcagtgctccctattagagatgatgaggttgttcttggacaatacgaaggctataaagatgacccaacagtacctgacaagtcaaacaccccaacatttgcaactgttattctgcgaatacacaatgaaagatgggaaggtgttccgttcatactaaaagcagggaaggcactaaattctagaaaggcagagatcagggttcaattcaaggatgtccctggtgatattttcaagtgtaaaaagcaggggagaaatgagtttgttatccgcctacaacctttagaagctatgtacatgaagcttacggtcaagcaacctggactggagatgtcaacagttcaaagtgagctagacttgtcatatggacaacggtatcaaggagtaaccattcctgaggcttatgaacgcctaattcttgacacaattaaaggtgatcagcagcattttgttcgcagagatgagttgaaggcatcctggcagatcttcaccccacttttgcacagaattgatgaaggggaattcaagccactcccctacaaaccaggaagcagaggtcctgcagaagcagatcagttacttgaaaaagcaggctatgttcaaacacacggctacatatggatccctcctaccttgtagagtaatctaatgtaataacatgaggaatctttagttgctaatgaatacacaataagcttgagaggcttcccttggaaccactcctcatgaatgtgtaatcaagcatttgaactatgagagtgtttgacacggtttgtgtaactgatttgcctttaaatgcaaaataaatggaaaatgaagtctatttaccggcaaaaaaaaaaaaaaa

SEQ ID NO: 1943 - protein, 518 aa, Glycine max
MGTSEWHIERRSSFGTESPLAREAGNVPETGSLSIVVLGASGDLAKKKTFPALFHLYRQGFLPADEVHIFGYARTKISDDELRNRLRGYLVPNKGASPQLLEDVEKFLQLIKYVSGSYDSEDGFRLLDKEISEHEYLKKSVEGLSRRLFYLALPPSVYPSVCKMIKTCCMNKSDLGGWTRVVVEKPFGKDLESAEELSTEIGKLFEEPQIYRIDHYLGKELVQNLLVLRFANRFFLPLWNRDNIDNVQIVFREDFGTDGRGGYFDQYGIIRDIIQNHLLQVLCLVAMEKPVSLRPEHIRDEKVKVLESVLPIRDDEVVLGQYEGYKDDPTVPDKSNTPTFATVILRIHNERWEGVPFILKAGKALNSRKAEIRVQFKDVPGDIFKCKKQGRNEFVIRLQPLEAMYMKLTVKQPGLEMSTVQSELDLSYGQRYQGVTIPEAYERLILDTIKGDQQHFVRRDELKASWQIFTPLLHRIDEGEFKPLPYKPGSRGPAEADQLLEKAGYVQTHGYIWIPPTL

SEQ ID NO: 1944 - DNA, 1476 bp, Klebsiella pneumoniae subsp. pneumoniae MGH 78578
  CDS (1)..(1476): transl_table=11
atggcggtaacgcaaacggcccaggcatgcgacctggtcattttcggcgcgaagggcgacctggcgcggcgtaaattgttgccttccctgtatcagcttgaaaaggcgggccagatccacgctgacaccagaatcattggcgtcggccgtgccgactgggataaagcggcttataccaaagtcgtgcgcgaagcgctggaaaccttcatgaaggaaaaaattgatgaaggtttgtgggataccctgagcggacgcctggagttctgtaatcttgacgtcaatgacaccagcggcttcacccgcctgggtgagatgctggatcaaaagaaccgtgtcaccatcaactatttcgctatgccgccgagcacctttggcgcgatctgtaaagggctgggcgaagcgaagcttaatgccaagcctgcgcgcgtggtcatggaaaaaccgctcggcacctcgctggaaacctcccgtgaaatcaacgaccaggtcggcgagttttttgaagagtgtcaggtctaccgtatcgaccactatctcggtaaagagacggtcctcaacctgctggcgctgcgcttcgccaactccctgttcgtcaataactgggactgccgcaccatcgatcacgtcgaaatcaccgtcgcggaagaggtgggtattgaagggcgctggggttacttcgaccaggccgggcagatgcgcgacatgatccagaaccacctgctgcagatcctgtgcatgattgccatgtcaccgccgtccgatctcagcgccgacagcatccgtgatgaaaaggtcaaggtgctgaaatccctgcgccgtattgaccgctccaacgtgcgcgagaaaaccgttcgcggccagtataccgccggctttgcccagggcaaaaaagtgcctggctatctcgaagaggagggggccaacaagaccagcaacaccgaaaccttcgtggcgatccgcgtcgatatcgataactggcgctgggctggcgtaccgttctatctgcgcaccggcaaacgtctgccgaccaaatgctcagaggtagtggtttacttcaaaaccccggaactgaatctgtttaaagagacctggcaggagctgccgcagaacaagctgaccattcgcctgcagccggacgaaggggtagatatccaggtactgaacaaagtgccgggcctcgatcataaacataacctgcagatcactaaactggatctgagctactccgaaaccttcaaccagacgcatctggccgatgcctatgaacgtctgctgctggagaccatgcgtggcatccaggcgctgttcgttcgccgcgacgaagtagaagaggcgtggaaatgggttgactccattaccgaagcctgggcagccgaccgcgatgcgccgaaaccgtatcaggccgggacctggggaccggttgcgtcggtggccatgatcactcgcgacggtcgttcatggaacgagttcgagtaa

SEQ ID NO: 1945 - protein, 491 aa, Klebsiella pneumoniae subsp. pneumoniae MGH 78578
MAVTQTAQACDLVIFGAKGDLARRKLLPSLYQLEKAGQIHADTRIIGVGRADWDKAAYTKVVREALETFMKEKIDEGLWDTLSGRLEFCNLDVNDTSGFTRLGEMLDQKNRVTINYFAMPPSTFGAICKGLGEAKLNAKPARVVMEKPLGTSLETSREINDQVGEFFEECQVYRIDHYLGKETVLNLLALRFANSLFVNNWDCRTIDHVEITVAEEVGIEGRWGYFDQAGQMRDMIQNHLLQILCMIAMSPPSDLSADSIRDEKVKVLKSLRRIDRSNVREKTVRGQYTAGFAQGKKVPGYLEEEGANKTSNTETFVAIRVDIDNWRWAGVPFYLRTGKRLPTKCSEVVVYFKTPELNLFKETWQELPQNKLTIRLQPDEGVDIQVLNKVPGLDHKHNLQITKLDLSYSETFNQTHLADAYERLLLETMRGIQALFVRRDEVEEAWKWVDSITEAWAADRDAPKPYQAGTWGPVASVAMITRDGRSWNEFE

SEQ ID NO: 1946 - DNA, 1476 bp, Xanthobacter autotrophicus Py2
  CDS (1)..(1476): transl_table=11
atgtcgagtcgcgtcattccggtgcaacccttcgtcctcacggtgttcggcgccaccggggaccttgcccgccgcaagctgctgcctgcgctgtaccagcgcgaccgggccggacaattgccggagcgcgccgccatcgtcggcgcctcgcgccagcagatgacgccggaggctttcgtcgccttcgcccgcgccgccatcaccgaatatgtgccggccggcgacctcgaggatgcggacgtggcccgcttcctcgcccgcctcacctatgtgccggtggaggcggaaggcgagggcggctggccgcagcttgcggccctcatcgccacccacacggacatgatccgggtgttctatctcgccaccgggccggccctgttcggccccatctgctcccggctcggcgcccacggcatcgccgtggatggtgcgcgggtggtggtggagaagccgctgggcaagagcctggagagcgctgtggcgctcaacaaggccatcggcgaagtcttcgaggagcgcaacgtctaccgtatcgaccattatctcggtaaggagacggtgcagaacctgatggcgctcaggtttgccaataacctgttcgagccggtgtggaacaacgcccacatcgaccatgtgcagatcacggtcgcagaagacatcggcaccgccggccgtgccggttactatgacaccgccggcgccctgcgcgacatggtgcagaaccacattctccaattgctctgcctggtggccatggagccccccgtgtcgctggatgcggatgcggtgcgcgacgagaagctgaaggttctcaaggcgcttttgcccatcaccgaggccaatgccggccagctcaccgtgcgcggccagtatcgcgccggggcctcggcgggcggggccgtgccgggctatctggaggagctgggctcttctacgtccgagaccgagaccttcgtggccctgaaggcggagatcggcaactggcgctggtccggcgtgccgttctacctgcgcaccggcaagaggctggcctcgcgggtgtcggagatcgtcatcaccttccggccggtgccccattcggtgttcgatgcgtccgccggcacgctgcgggccaacgtgctggtgctgcggctccaaccggaggagggcgtgaagctgtggctgatgatcaaggatcccggccccggcggcatgcggcttgagcatgtgcccctcgacatgagctttgccagcgtcttcggcgtgcgcaatcccgatgcctatgagcgcctgctcatggacgtggtgcgcggcaaccagaccctgttcatgcgccgcgacgaggtggaggcggcgtggcgctgggtggacccgatcctcgaggcgtggcgcgcctcccgcgagccgcccaagccctataccgccggcacctggggccccgctgccgccatcgccctcatcgagcgcgacggccggacctggtccggcgacgactga

SEQ ID NO: 1947 - protein, 491 aa, Xanthobacter autotrophicus Py2
MSSRVIPVQPFVLTVFGATGDLARRKLLPALYQRDRAGQLPERAAIVGASRQQMTPEAFVAFARAAITEYVPAGDLEDADVARFLARLTYVPVEAEGEGGWPQLAALIATHTDMIRVFYLATGPALFGPICSRLGAHGIAVDGARVVVEKPLGKSLESAVALNKAIGEVFEERNVYRIDHYLGKETVQNLMALRFANNLFEPVWNNAHIDHVQITVAEDIGTAGRAGYYDTAGALRDMVQNHILQLLCLVAMEPPVSLDADAVRDEKLKVLKALLPITEANAGQLTVRGQYRAGASAGGAVPGYLEELGSSTSETETFVALKAEIGNWRWSGVPFYLRTGKRLASRVSEIVITFRPVPHSVFDASAGTLRANVLVLRLQPEEGVKLWLMIKDPGPGGMRLEHVPLDMSFASVFGVRNPDAYERLLMDVVRGNQTLFMRRDEVEAAWRWVDPILEAWRASREPPKPYTAGTWGPAAAIALIERDGRTWSGDD

SEQ ID NO: 1948 - DNA, 1518 bp, Oryza sativa (japonica cultivar-group)
  CDS (1)..(1518)
atgtcaggaggatcttcaccaaggtcaagacgaagcagctttaattctttatcaagagatctcgaactcccttcagagcaaggttgtctctctgttattgtcctcggggcttctggagacctagccaagaagaaaactttcccggcactcttccatctttttgcacagggatttatacaatcaggtgaagtgcatatatttgggtatgcgagatcaaacctttctgatgatgggttaagggaacgcattcgtggatacctcaaaggagcctcagaagaacatctctcagactttttgcaacatataaaatatgtcagtggttcctatgacagcggagaaggatttgagaaattgaacaaggaaatttcagagtatgagaagtcaaacaaatcagaaagccctcgcaggctcttctatttggcattgcctccatctgtctacccttcagtctgcaaaatgatcagaacatattgcatgaatccatctggatggactagagtcattgttgagaagccatttggaaaggacttggactctgcagaagaattaagtgcccaacttggggagctatttgacgaaaaccaactctacagaattgatcactacttgggaaaagagttggtccaaaacctgcttgtgcttcgttttgccaaccgcttgttcttgcctctttggaaccgtgacaatattgataatatacagattgtattcagggaggactttgggactgacgggcgtggtggatattttgatcaatatggaatcattcgtgacatcatccagaaccatttgttacaggttttctgtttggttgcaatggaaaagcctgtctctcttaagcctgagcacattagagatgagaaagtcaaggttctgcagtccgtgaaccctataaagcatgatgaggttgtccttggacaatacgaggggtacaaggatgaccctacagtgccagatgactcaaacaccccaacttttgcatctgtcgtgcttcgggtacacaatgaaagatgggagggtgttcctttcattcttaaagctggtaaagcactaagctcaaggaaagcagaagtccgtgtgcagttcaaagatgttcctggtgacatctttaaatgtaaaaggcaaggaagaaatgagtttgtcatacgccttcagccatcagaagccatgtacatgaaacttactgtcaaaaaacctggattggagatggccaccgagcagagtgaacttgatctgtcatacgggatgcggtaccaaaacgtcaaaattccagaggcatacgagcgtctcatattggatacgatacgaggagaccaacagcacttcgttcgccgagatgagctgaaggctgcttggcagatcttcactcccctgctgcacgacatcgacgaaggcaaggtgaagtctattccataccagcctggcagccgaggccccaaggaagccgatgaactgagcgagagggttgggtatatgcagacccacggttacatatggataccacccacccttgcatag

SEQ ID NO: 1949 - protein, 505 aa, Oryza sativa (japonica cultivar-group)
MSGGSSPRSRRSSFNSLSRDLELPSEQGCLSVIVLGASGDLAKKKTFPALFHLFAQGFIQSGEVHIFGYARSNLSDDGLRERIRGYLKGASEEHLSDFLQHIKYVSGSYDSGEGFEKLNKEISEYEKSNKSESPRRLFYLALPPSVYPSVCKMIRTYCMNPSGWTRVIVEKPFGKDLDSAEELSAQLGELFDENQLYRIDHYLGKELVQNLLVLRFANRLFLPLWNRDNIDNIQIVFREDFGTDGRGGYFDQYGIIRDIIQNHLLQVFCLVAMEKPVSLKPEHIRDEKVKVLQSVNPIKHDEVVLGQYEGYKDDPTVPDDSNTPTFASVVLRVHNERWEGVPFILKAGKALSSRKAEVRVQFKDVPGDIFKCKRQGRNEFVIRLQPSEAMYMKLTVKKPGLEMATEQSELDLSYGMRYQNVKIPEAYERLILDTIRGDQQHFVRRDELKAAWQIFTPLLHDIDEGKVKSIPYQPGSRGPKEADELSERVGYMQTHGYIWIPPTLA

SEQ ID NO: 1950 - DNA, 1470 bp, Mesorhizobium loti MAFF303099
  CDS (1)..(1470): transl_table=11
atgaccagccagatcattcccgtcgatcctttcgacttcatcattttcggcggcaccggcgacctgtcggaacgcaagcttctgccgtcgctctattatcgccagcgcgaccatcaattctccgagccgacgcgcatcatcggcacatcgcgctcgaaaatgagcgacgaggaattccgggccttcgccagccaggcgatctccgatcacgtcaagccggccgatatcgacgccaaggaattgaagaccttcctggcgcggctctcctatatctcggccgatgcgacgagcggcgctggcttcgacaagcttaagaaggcgatcggcgagagcgagagcatccgcgccttctatctggcggtggcgccggcgctgttcggcgatatctcgcacaagctgaaagagaacaagctgatcacgccgaactcgcgcatcgtgctggagaagccgatcggccgcgaccttgcctcggcgcgggcactcaacgatttggtcggcgacgacttccacgaaagccagattttccgcatcgaccactatctcggcaaggagacggtgcagaacctgatggcgctgcgctttgccaacgcgctctatgagccgctgtggaactccgcccatatcgaccacgtacagatcacggtggccgagaccgtcggcttggaagaccgcgtcacctactacgacaaggccggcgcgctgcgcgacatggtgcagaaccacatgctgcagttgctctgcctcgtggccatggaggcgccgtcgtcgatggacgccgacgccgtgcgcgacgagaagctcaaggtgctgcgggcgctgaagcgcatcaacggcaacgaggcgccgaagcacacggtgcgcggccagtatcgcgccggtgcatcggccggcgggccggtgaagggctatgtcgaggagctcggcaaggacagcaacaccgagaccttcgtcgccatcaaggccgagatcggcacctggcgctgggccggcgttccgttctacctcaggaccggcaagcgcttggcgacccgggtttcggaaatcgtcatcgagttcaagccgatcccgcattcgatcttcggcgacagcgccgggccgatcttcgccaaccagctggtcatccggctgcagccggacgagggcgtcaagcagttcatcatgatcaaggatccgggcccgggcggcatgcggctgcgccagatctcgctcgacatgagcttcgcgcaatccttcgacggccgcgcgcccgatgcctatgaacggctgatcatggacgtcatccgtggcaaccagacgctgttcatgcgccgtgacgaggtcgaggcggcgtggaaatggatcgacccgatccagaatgcctgggaaggcgccaagcaggaagcgcagggctatacggcaggcacatgggggccatctgcctcgatagcgctgatcgaacgtgacgggcggacatggcacgagagcaattga

SEQ ID NO: 1951 - protein, 489 aa, Mesorhizobium loti MAFF303099
MTSQIIPVDPFDFIIFGGTGDLSERKLLPSLYYRQRDHQFSEPTRIIGTSRSKMSDEEFRAFASQAISDHVKPADIDAKELKTFLARLSYISADATSGAGFDKLKKAIGESESIRAFYLAVAPALFGDISHKLKENKLITPNSRIVLEKPIGRDLASARALNDLVGDDFHESQIFRIDHYLGKETVQNLMALRFANALYEPLWNSAHIDHVQITVAETVGLEDRVTYYDKAGALRDMVQNHMLQLLCLVAMEAPSSMDADAVRDEKLKVLRALKRINGNEAPKHTVRGQYRAGASAGGPVKGYVEELGKDSNTETFVAIKAEIGTWRWAGVPFYLRTGKRLATRVSEIVIEFKPIPHSIFGDSAGPIFANQLVIRLQPDEGVKQFIMIKDPGPGGMRLRQISLDMSFAQSFDGRAPDAYERLIMDVIRGNQTLFMRRDEVEAAWKWIDPIQNAWEGAKQEAQGYTAGTWGPSASIALIERDGRTWHESN

SEQ ID NO: 1952 - DNA, 1506 bp, Vibrio cholerae O1 biovar eltor str. N16961
  CDS (1)..(1506): transl_table=11
atgatggtaatacctgaaaacagcagcatcgtaattttcggtgcttcgggagatttgacgtaccgtaagcttattcctgcgttgtatcacctctatgccagtcagcaactgcctaaatcgtttgcgattttaggtgtgagccgtaccgagtacagtgacgagtcttaccgcgagaagctaaagcgctcactgcaagagctggaaaaaacagaacctgccgctctcgaagccttcatgcagcatgtgcattatcaagcgctgaacacctcagaagtagctgattatcagcacttagcgacccgccttgatacactggctaacgattatcagtttgagcagcgtaatacgctgttttatctcgcaactccaccaagcttgtatggcgtgatcccagcttgccttgcggcacatggcctcaacgatgagagccaaggctggaagcgtctgatcatcgaaaaaccttttggttacgatctgcaatctgcacaagatctggatgtggaaatccaccaccacttcaaagagcatcagatctaccgtatcgaccactaccttggtaaagaaaccgtgcaaaacctgctggtgttccgctttgccaacggcatgtttgagccactgtggaaccgtaactttattgattacgtggaaatcacaggcgcagaattcctaggtgtggaagagcgcggcggttattacgatggttctggcgcggtgcgcgatatgttccaaaaccacctgctgcaagtgctggctatggtgggcatggagccgcctgcggcgatcaacgcggattccattcgtaacgaagtgaacaaggtactgcaaagcctacaaccgctttctgaatctgatctgcgcaacaatctggtgctcggtcaatacaccgaatcggaagtgcgtgggcaatttttacccagctaccgtaatgagccgggcgtggcggcggattcacgcaccgaaacttacgtcgcgctaaaaatgttcatcaataactggcgttggaatggtgtgccattctatgtgcgcagcggtaaacgtttaccaacgcgtgtcaccgaagtggtcattcacttcaaacgtacaccgcatcctgtctttgggcaaaatgcgccagagaacaagctgatcatccgtattcagcctgatgaaggcattctgatgagcttcggcttgaaagagcccggcgcaggtttcaaagccaaagaagtgtcgatgaatttccactacgcctcacttgagcagatcaaaatgctgaccgcttatgagcgtttgctgctggatgcactcaatggtgacgcgacactgtttgcccgtactgatgctgtagaagcttgttggaagtttgtgcagccgatcctcgatttcaaacaagatccgcaatcgctgtatggctacgcctgtggcacttggggcccgaaagagtcggatgacttgctgcgccgtgacggccgtgagtggcgcttcccttgtaaaaacctcactaacacggattactgcgaattatga

SEQ ID NO: 1953 - protein, 501 aa, Vibrio cholerae O1 biovar eltor str. N16961
MMVIPENSSIVIFGASGDLTYRKLIPALYHLYASQQLPKSFAILGVSRTEYSDESYREKLKRSLQELEKTEPAALEAFMQHVHYQALNTSEVADYQHLATRLDTLANDYQFEQRNTLFYLATPPSLYGVIPACLAAHGLNDESQGWKRLIIEKPFGYDLQSAQDLDVEIHHHFKEHQIYRIDHYLGKETVQNLLVFRFANGMFEPLWNRNFIDYVEITGAEFLGVEERGGYYDGSGAVRDMFQNHLLQVLAMVGMEPPAAINADSIRNEVNKVLQSLQPLSESDLRNNLVLGQYTESEVRGQFLPSYRNEPGVAADSRTETYVALKMFINNWRWNGVPFYVRSGKRLPTRVTEVVIHFKRTPHPVFGQNAPENKLIIRIQPDEGILMSFGLKEPGAGFKAKEVSMNFHYASLEQIKMLTAYERLLLDALNGDATLFARTDAVEACWKFVQPILDFKQDPQSLYGYACGTWGPKESDDLLRRDGREWRFPCKNLTNTDYCEL

SEQ ID NO: 1954 - DNA, 1491 bp, Pasteurella multocida subsp. multocida str. Pm70
  CDS (1)..(1491): transl_table=11
atgaaaattgaagcagacaacaattgtattgtaatttttggtgcatcaggtgatttaacttatcgtaaattgattcctgcactgtataacttatataaaatcggtcgtttgactgagcatttctccgtgttaggtgtggcaagaacggaattaagtgatgagggtttccgtgaaaaaatgcgccaagcgttgatcaaaagtgaaaaagcgaatggcgaaacactcgatcaattttgtagccacctttattatcaggcattaaataccgcggatgctgccgattatggcaagttaattcctcgtcttgatgatttacatgataaatatcaaacctgtggtaacacactttactatttatccacgccgccaagtctttatggtgtgattccagaatgtcttgcggcacatgggttaaatactgaagagtttggctggaagcggttaattgtggaaaaaccgtttggttatgatatccgcacggcaaaagaactcgatattcaaattcaccgtttctttgatgaacaccaaatttatcgtattgaccactatcttggtaaagaaacggttcaaaatctgctcgtgctgcgtttttctaatggatggtttgaaccactctggaaccgtaattttattgattatattgaaatcacgggcgcagaatctatcggtgtagaagagcgtggtggttattacgatgattctggcgcaatgcgtgatatgttccaaaaccatttgttgcaagtgttagccatggttgcgatggagccaccggcaattattaatgctgactcaatgcgtgatgaagtggcaaaagtcttgtattgtttacatccattaagtgaggatgacttagaaaatcatttagtcttagggcaatatacggcaggcacagttgaaggtgaagcagttaagggctacttacaggaaaaaggtgtaccggcagagtctaatacggaaacttacatggcattacgctgtgaaattgacaactggcgttgggcgggtgtgccattttatgtgcgtactgggaaacggttaccaagtcgagtgaccgaaattgtgattcatttcaaaaccacaccacatccggtatttagccaaaaagcaccagaaaacaaattaattatccgtattcaacccgatgaagcgatttcgatgcgttttggtttgaaaaaaccgggagcaggttttgaagcaaaagaagtgtcgatggatttccgttatgcggatcttgcctcaccaagcttactgaccgcttatgagcgtttattattggattctatgaaaggcgatgccactttgtttgcgcgtactgatgcggtacatgcctgttggcagtttgtggagccgattttacaatataaagcacaaaatgggcgtgtttatgagtatgaagccggtacttggggaccgacagaagccgacaaactgatcgcgaaaacgggtcgtgtttggcgtaaaccaagtggattaatgaaaaagaaagtgtaa

SEQ ID NO: 1955 - protein, 496 aa, Pasteurella multocida subsp. multocida str. Pm70
MKIEADNNCIVIFGASGDLTYRKLIPALYNLYKIGRLTEHFSVLGVARTELSDEGFREKMRQALIKSEKANGETLDQFCSHLYYQALNTADAADYGKLIPRLDDLHDKYQTCGNTLYYLSTPPSLYGVIPECLAAHGLNTEEFGWKRLIVEKPFGYDIRTAKELDIQIHRFFDEHQIYRIDHYLGKETVQNLLVLRFSNGWFEPLWNRNFIDYIEITGAESIGVEERGGYYDDSGAMRDMFQNHLLQVLAMVAMEPPAIINADSMRDEVAKVLYCLHPLSEDDLENHLVLGQYTAGTVEGEAVKGYLQEKGVPAESNTETYMALRCEIDNWRWAGVPFYVRTGKRLPSRVTEIVIHFKTTPHPVFSQKAPENKLIIRIQPDEAISMRFGLKKPGAGFEAKEVSMDFRYADLASPSLLTAYERLLLDSMKGDATLFARTDAVHACWQFVEPILQYKAQNGRVYEYEAGTWGPTEADKLIAKTGRVWRKPSGLMKKKV

SEQ ID NO: 1956 - DNA, 1512 bp, Lactococcus lactis subsp. lactis Il1403
  CDS (1)..(1512): transl_table=11
atgaccgaacaaaaacaagcacttttcaccatcttcggagcaactggtgacctcgctaaaagaaagctctacccttcactctttcgcctcttcaaaaaaggtgaactagctgacaattttgcagtcatcggtaccgctcgccgtccatggacaaacgagtattatcgtgaagttgttttagagtctatcaaagatttaatgaactcaaaaacggaagccgaaaatttcgccagccatttttattatcaaagtcacgatgttagcgacagctcacattacgttaacttaaaagatttgggtgaaaaattgcgtaaacagtataaaactgctggcaatcaagtcttctttttagcaatggctcctcaattttttggcactatctctgaacaccttaaatcagaaaatattttgacaggtgagggttttgagagaatcgtcattgaaaaaccatttggaacaagctacgatacggcaaaatcacttaatgacagcctcgcaaaagtatttagtgaagaacaaattttccgaatcgaccactaccttggaaaagaaatgatccaggccgtttctgccgttcgttttgccaatccaatctttgaatcgctttggaataatcaacacattgataacgttcagattacttttgccgaatttatcggtgttgaagaccgtggcggttactacgaaacttctggtgctttaaaagatatgattcaaaaccatgtcttacaagtactcagcctcattgccatggaaaaacctgaaaaatttgatgaatcttatattgtaaaagaaaaagttaaagcccttaatgcaatccgtcaatattcttctgaggaagctttagaaaacttcgttcgtggtcaatatatcgcaggacgttttgacggtgaagattacctaggctatcgcgaagaagattctgttgcaacagacagtcgaactgaaactttcgccgctggaaaatttgtcattgataatgagcgttggtcaggcgtccctttctatgttcgctcaggaaaacgtatgactgaaaaaggaactcgtattaatatcgttttcaaaaaagataaagacaatctctttgcagaaaattgcgatgaccaatccgttcaaaatgttttgaccatttatattcaaccaactgaagggttttcactttcagtaaatggaaaagcggctggtcaaggcttccatttagagcctttgcggttaaatttccgacacgatagtgaatttcttggaaattctcctgaagcatatgaaaaacttttcctagatgtccttaatggagacggaacaaatttctcacattgggaagaagcggctcgcgcctgggaacttattgatgttattcgagaagcttgggataaagaaacttctgagcttccaacttatgcggctcgcacaatgggacctaaggctgcatttgacttactagaaaaaaatggtcacgaatgggcttggcaacctgatttatggtatcaagaacgtggttactacaataaataa

SEQ ID NO: 1957 - protein, 503 aa, Lactococcus lactis subsp. lactis Il1403
MTEQKQALFTIFGATGDLAKRKLYPSLFRLFKKGELADNFAVIGTARRPWTNEYYREVVLESIKDLMNSKTEAENFASHFYYQSHDVSDSSHYVNLKDLGEKLRKQYKTAGNQVFFLAMAPQFFGTISEHLKSENILTGEGFERIVIEKPFGTSYDTAKSLNDSLAKVFSEEQIFRIDHYLGKEMIQAVSAVRFANPIFESLWNNQHIDNVQITFAEFIGVEDRGGYYETSGALKDMIQNHVLQVLSLIAMEKPEKFDESYIVKEKVKALNAIRQYSSEEALENFVRGQYIAGRFDGEDYLGYREEDSVATDSRTETFAAGKFVIDNERWSGVPFYVRSGKRMTEKGTRINIVFKKDKDNLFAENCDDQSVQNVLTIYIQPTEGFSLSVNGKAAGQGFHLEPLRLNFRHDSEFLGNSPEAYEKLFLDVLNGDGTNFSHWEEAARAWELIDVIREAWDKETSELPTYAARTMGPKAAFDLLEKNGHEWAWQPDLWYQERGYYNK

SEQ ID NO: 1958 - DNA, 1773 bp, Deinococcus radiodurans R1
  CDS (1)..(1773): transl_table=11
atgaccgaccggccccgtcccaaaaagagcagtccgaaaaagagtggccccgagaaggccctcgccaaggaaagtgccgcgcagggcgaggcggccaaggcgacccggcaggccactcagcagaccgaggcggccaagaaggtcggtgtggcccagcccggcgctccggcgcagtcccgcaaagcggcccgcaagtcacgccagcgggtgcccaagcacgccggggacaatgcccccaaaagcgacgcgcccggcgccgacggccagaatccctttcgcaccgccatgcgccgcagccgcgcgcccgaacctgccacgctggtgattttcggcgcgaccggcgaccttgcccggcgcaagttgctgcccgccgtgttcggcctgtggcaagacggcctgctcggcagcgcgttcaacatcgtcggcgtgggccggcaggaaatggacgacgagcagttcaaggactacgccatagacgccctgaagacctccaaggaaaccgacgaaatcaaggaaggcagcctggaaaagttccgcgagctgctctactacgaatacggcgaattcggcgaggacgaggtgtacgacaaggtccgcagtgaactcgaccgcgccgagaccgcccgtggcggcggcaagaacgcgctgttttacctctccaccccgccgagcctcttcgagccgatttcgagcggcctggggcggcagggcctgcaagacgagacggaaggctggcggcgcatcgtcatcgaaaaacccttcgggcgcgacctgcaatcggcccgcgaactcaacgacgccattcaccgcgtctgggacgagtcgcaggtgtaccgcatcgaccattatctcggtaaggagacggtgcagaacctgatggcgatccgtttcgggaacgccattttcgagccgctgtggaaccgggggtttgtcgaccacgtgcagatcacggcgtccgaggacctggggctggagggccgcgccgggtactacgaggaagcgggcatcgtgcgcgacatgctgcaaaaccacctgatgcagctttttaccctgaccgccatggaagcgccctcggcgttcgaggccgacgccatccgcgacgagaaggtcaaggtgctgcgggccgtcaagcgcattccggcggaccgggtgcccgaagtcgccgtgcgcgggcagtacggccccggcgccctcgacggccagaccgtgcccggctacaagcaggagccggacgtaaagcgcggcagccgcacgcccacctacgtcgccgtcaagctcgaggtggacaactggcgctggcagggcgtgccgtttttcctgcgcaccggcaagcgcttgcccaagaaagtcaccgaaatcgccgtggtgttcaagcgcccgccgctgggcctctttcccggcggactggagcgcaacgtgctggccttccgcattcagcccgacgaaggcgtgagcctgaagttctcctccaaatcgccggggcaagagatggtgctgcgcgaggtcgtgatggatttccgttacgacgccttcggggcacagctcgaaagcccctactcgcgcttgctgctcgacgcgatgctcggcgacgccaccctctttccccgcgaggacgaggtggaccacgcctggcaaatcgtctcgggcatcttgcaggcctgggaaggcgcggacgcggcggcccccaaattccccaactacgcggcgggcacctggggccccgacgccgccgatgagctgctcggccccggacggcgctggaggcggctgtga

SEQ ID NO: 1959 - protein, 590 aa, Deinococcus radiodurans R1
MTDRPRPKKSSPKKSGPEKALAKESAAQGEAAKATRQATQQTEAAKKVGVAQPGAPAQSRKAARKSRQRVPKHAGDNAPKSDAPGADGQNPFRTAMRRSRAPEPATLVIFGATGDLARRKLLPAVFGLWQDGLLGSAFNIVGVGRQEMDDEQFKDYAIDALKTSKETDEIKEGSLEKFRELLYYEYGEFGEDEVYDKVRSELDRAETARGGGKNALFYLSTPPSLFEPISSGLGRQGLQDETEGWRRIVIEKPFGRDLQSARELNDAIHRVWDESQVYRIDHYLGKETVQNLMAIRFGNAIFEPLWNRGFVDHVQITASEDLGLEGRAGYYEEAGIVRDMLQNHLMQLFTLTAMEAPSAFEADAIRDEKVKVLRAVKRIPADRVPEVAVRGQYGPGALDGQTVPGYKQEPDVKRGSRTPTYVAVKLEVDNWRWQGVPFFLRTGKRLPKKVTEIAVVFKRPPLGLFPGGLERNVLAFRIQPDEGVSLKFSSKSPGQEMVLREVVMDFRYDAFGAQLESPYSRLLLDAMLGDATLFPREDEVDHAWQIVSGILQAWEGADAAAPKFPNYAAGTWGPDAADELLGPGRRWRRL

SEQ ID NO: 1960 - DNA, 1434 bp, Xylella fastidiosa 9a5c
  CDS (1)..(1434): transl_table=11
atgcacaacaccctcttattgtttggcgccaccggcgacctcgcccaacgctatctcttcccctccttactgcacctgtttactgatggcttattgccacaagacttccgcattcgtgctctggccttgtcgccccataacaccacacaattccgcgacatcctgcgcccgcgcttggaacaagcactacccatcgccaacactgcgcacatccaagccctactacaacgtgtcgactacctttccgtagacttgaacgacccaacatcaatcgccgaagcagtccgagatctgacggaacatccctgcatcagctacttggcaatcccaccaggcctgtacaccaacaccgccctaggattggcacagggaggggcactgcagacaccacaccgattgatgctggaaaaaccgatcggacgcgactcaataaacgcacgcgaaatcctaaacaccatcggcacactgattgacgaagatcgcatcttccgcgtagaccactatctaggcaaagcagcagtgcagaacctcgtcgcactgcgcttcggaaacaccctgctagaagcggtatggaaccgaaaccacattgagtcagtacacatcctcatcgccgaaaccgaaggcgtcgatggccgcaatgcttactacgcacgtgctggcgcactacgcgacatgatgcaaagccacatcctgcaactcctatgcctggtcgccatggaacccccggcctctctggaagccgaccgcatccgcgacgaaaaagtcaaaatcctgcgcgcactacgcccactgaacgcccaaaacgccgcaatgcacagcgtgcgtggacgctacagcgcgggcaccattaacagccaaccagtgccagcctatcaaccaccggaaggcagcaatgtagagacctttgtcggtgtcaccgcatacatcgacaactggcgctgggcgggcgtaccgttccacctatgcacaggaaaacgcttggccgaacgctcaacccagatcgtcgtcaccctcaaacccgtcacacactggctatttgaacgtccagaccggaacaatgcagcaccaaaccgcctgtgcttcaaactacagccccaggaaaatatcgaactaaacctgatgagcagcctggccggccccgaatggggaaccctggaactgcaaccgctggaattggagctatccgtcccgaccggaaaacatcgccacatcgcctatgagcgcctattcctcgacgcattcaacggcaacccggcgctatttgtacgtcacgacgaagtcacagccgcctgggattggatcgacagcgtcagcaatgcctgggaactgtccgacttaccactgcaaccctaccccgccggcagctggggcccacctcaagcccaccaatttctgccgccattggggattgatggccatggaaacgacgcatga

SEQ ID NO: 1961 - protein, 477 aa, Xylella fastidiosa 9a5c
MHNTLLLFGATGDLAQRYLFPSLLHLFTDGLLPQDFRIRALALSPHNTTQFRDILRPRLEQALPIANTAHIQALLQRVDYLSVDLNDPTSIAEAVRDLTEHPCISYLAIPPGLYTNTALGLAQGGALQTPHRLMLEKPIGRDSINAREILNTIGTLIDEDRIFRVDHYLGKAAVQNLVALRFGNTLLEAVWNRNHIESVHILIAETEGVDGRNAYYARAGALRDMMQSHILQLLCLVAMEPPASLEADRIRDEKVKILRALRPLNAQNAAMHSVRGRYSAGTINSQPVPAYQPPEGSNVETFVGVTAYIDNWRWAGVPFHLCTGKRLAERSTQIVVTLKPVTHWLFERPDRNNAAPNRLCFKLQPQENIELNLMSSLAGPEWGTLELQPLELELSVPTGKHRHIAYERLFLDAFNGNPALFVRHDEVTAAWDWIDSVSNAWELSDLPLQPYPAGSWGPPQAHQFLPPLGIDGHGNDA

SEQ ID NO: 1962 - DNA, 1401 bp, Mycobacterium tuberculosis CDC1551
  CDS (1)..(1401): transl_table=11
ttggttgacggcggaggtggcgcgtcagatctgttggtgatcttcggaattaccggtgacctggcccgcaagatgaccttccgcgcgttgtatcggctcgagcgccaccagttgctggactgccccatcctgggtgtggccagtgacgacatgtccgtcgggcagttggtcaagtgggctcgcgagtccatcggtcgtaccgaaaagatcgacgatgcggtgttcgaccggttggcgggccggttgtcctacctgcacggtgacgtcaccgacagccagctctacgattcgctggccgaactgattggctcggcctgtcggccgctgtattacctggaaatgccgccggcgctgttcgcgccgattgtcgaaaatctcgcgaacgtgcggctgttggagcgcgcacgcgttgccgtggaaaagccgttcggccacgacctggcctccgcgctcgaactcaacgcccggctgcgagcggtgttgggcgaagaccaaatcctgcgtgtggaccactttctgggcaagcagcccgtcgtcgagctggagtacctgaggttcgccaatcaggcgttagccgagctctgggatcgcaacagcatctccgagatccacatcaccatggccgaggacttcggggtggaggaccgcggcaagttttacgacgccgtcggtgccctgcgtgacgtcgtgcaaaaccatctgctgcaggtgctggcgctggtgacgatggaaccgccggtcggttccagcgccgatgacctcaacgacaagaaggccgaggtcttccgggcgatggcgccgctggatcccgatcggtgcgtgcgtgggcagtacctcggctacaccgaagttgcgggcgtagcaagcgattcggcgaccgaaacgtatgtcgcgctgcgaaccgagatcgacaactggcgctgggccggggtgccgatcttcgtgcggtccggaaaagagctgcccgcgaaggtcaccgaagtacggctatttctacgccgagttccggcattggcctttctgcccaaccgccgaccggccgagcccaaccagattgtgctgcgtatcgaccccgatccgggtatgcgactgcagatttcggcccacaccgacgactcgtggcgagatatccacctggactcctcgttcgcggtggacctcggtgaaccgatacgaccctatgagcggctgctgtatgccggattggtcggcgatcaccagttgttcgcccgcgaggacagcatcgagcagacgtggcggatcgtgcagccgctgctcgacaacccgggtgaaatccatcggtacgatcgcggttcctggggtccggaagccgcgcagtcgttgctgcgcggtcaccgcggttggcagtcgccgtggctgccccgcggcacggacgcatga

SEQ ID NO: 1963 - protein, 466 aa, Mycobacterium tuberculosis CDC1551
MVDGGGGASDLLVIFGITGDLARKMTFRALYRLERHQLLDCPILGVASDDMSVGQLVKWARESIGRTEKIDDAVFDRLAGRLSYLHGDVTDSQLYDSLAELIGSACRPLYYLEMPPALFAPIVENLANVRLLERARVAVEKPFGHDLASALELNARLRAVLGEDQILRVDHFLGKQPVVELEYLRFANQALAELWDRNSISEIHITMAEDFGVEDRGKFYDAVGALRDVVQNHLLQVLALVTMEPPVGSSADDLNDKKAEVFRAMAPLDPDRCVRGQYLGYTEVAGVASDSATETYVALRTEIDNWRWAGVPIFVRSGKELPAKVTEVRLFLRRVPALAFLPNRRPAEPNQIVLRIDPDPGMRLQISAHTDDSWRDIHLDSSFAVDLGEPIRPYERLLYAGLVGDHQLFAREDSIEQTWRIVQPLLDNPGEIHRYDRGSWGPEAAQSLLRGHRGWQSPWLPRGTDA

SEQ ID NO: 1964 - DNA, 1512 bp, Agrobacterium tumefaciens str. C58
  CDS (1)..(1512): transl_table=11
ttgatgccccaacctttgaagatcgagagaatcgatatgagcagtcagatcattcctgttgaaccttttgattgtgtcgttttcggcggcacgggcgatcttgccgagcgcaagcttctgccggccctttatcaccggcaggtcgaaggccagttcacggagccgacccgcatcatcggcgcgtcgcgttcggtcatgacccatgaggaatatcgcaaattcgcgcaggacgccctgaaggaacacctgaaggccggcgaatatgacgatgcgcaggtgaccctgttcctcaaccggcttttctacgtgcccgtcgatgccaagtccggcaatggctgggacgtgctgaagaaactgctcgatgagggcaaggaacgcatccgcgcgttttatctggccgtcgcacccggcattttcggcgacatcgccgacaagatccgtgagcacaagctgatcacccgctcgacccgcatcgtcgttgaaaagccgatcggccgggatctcgcatccgcgcaggaactgaacgacaccatcggtcacgtcttcaaggaagagcagatcttccgcatcgaccactatctcggcaaggagacggtgcagaacctgatggcgctgcgtttcgccaatgcgctttacgagccgctgtggaattccgcccatatcgaccacgttcagatcaccgttgccgaagcggtgggtcttgaaggtcgcgccggttattacgacaaggccggtgcgctgcgcgacatggtgcagaaccacattctccagctgctttgcctcgttgccatggagccgcccgcttccatgaaatcggaggcagtgcgcgacgaaaagctcaaggtactgcgctcgctgaagccaatcgataccagcaatgtcgaaaagctgacggtacgcggccagtaccgcgccggcgcttccgcaggcggccccgtcaagggttatctggaagagctggaaggcggcgtttccaacaccgaaaccttcgtcgccatcaaggctgaaatcgccaactggcgctgggccggcgttcccttctacatccgcaccggcaaacgcctcgcgacccgtgtttcggaaatcgtcgtcaccttcaagcagatcccgcactcgatcttcgacgatgcggctggcaagatcgaagccaacaagctggtcattcgcctgcagccggatgaaggcgtcaagcagtcgctcctcatcaaggatcccggtccaggcggcatgcgcctgcgtcaggtctcgctggacatgagctttgccgaagccttcaacgtgcgcagccccgatgcctatgagcggctgttgatggacaccattcgttccaaccagacattgttcatgcgccgcgacgaggtcgaggccgcgtgggactggatcgaccccatcttgaagagctgggaagagctgggacagagcgtacagggttacactgccggcacctggggcccgagcggttcgatcgcactgatcgagcgcgacggccgcacctggcacgatgccgactga

SEQ ID NO: 1965 - protein, 503 aa, Agrobacterium tumefaciens str. C58
MMPQPLKIERIDMSSQIIPVEPFDCVVFGGTGDLAERKLLPALYHRQVEGQFTEPTRIIGASRSVMTHEEYRKFAQDALKEHLKAGEYDDAQVTLFLNRLFYVPVDAKSGNGWDVLKKLLDEGKERIRAFYLAVAPGIFGDIADKIREHKLITRSTRIVVEKPIGRDLASAQELNDTIGHVFKEEQIFRIDHYLGKETVQNLMALRFANALYEPLWNSAHIDHVQITVAEAVGLEGRAGYYDKAGALRDMVQNHILQLLCLVAMEPPASMKSEAVRDEKLKVLRSLKPIDTSNVEKLTVRGQYRAGASAGGPVKGYLEELEGGVSNTETFVAIKAEIANWRWAGVPFYIRTGKRLATRVSEIVVTFKQIPHSIFDDAAGKIEANKLVIRLQPDEGVKQSLLIKDPGPGGMRLRQVSLDMSFAEAFNVRSPDAYERLLMDTIRSNQTLFMRRDEVEAAWDWIDPILKSWEELGQSVQGYTAGTWGPSGSIALIERDGRTWHDAD

SEQ ID NO: 1966 - DNA, 1386 bp, Agrobacterium tumefaciens str. C58
  CDS (1)..(1386): transl_table=11
atgaaagcatcagccacggacagacagcgatcggacgtgctggtggtgttcggcgccacgggtgatcttgcctataagatgatctttccctctctctacgccatggtgaaacgcggcgcgctgcaaacgcccatcatcggagtcgctttcgacgattggccgcgtgagcagctgatagcgcgggcgcgcgatgcggtcgccaaccatttggacaagatcgatgaagccgtcttcgaaaaattcgccgcacagctgacctatgtctccggcgattatcgcaacgaagcgacattcgaaaagctgcgcacggcgcttggcgggcaccagcatccgctttattatctcgccattccgccttccctgttcgaaaccgtggtaaccggcctcaacagggcgggcatcgccgcttcggcccggctgatggtggagaaaccctttggccgtgaccttgcctccgccgaagccttaaatgaagcgttgcacgcggttttcgcagaggatgctattttccgcatcgaccatttcctgggcaaggaagccatccagaaccttctttattttcgttttgccaatgcctttctagagcccgtgtggaatcgcgaccacgttgagagcgtgcagatcaccatggccgaagatttcggcatcagggggcgcggcaagttttatgacgaagtcggatgtatccgcgatgtgatccagaaccatctgatcaatgtgctgttgctgctggccatggagccgccagccaccagcgcctcggatgatctcgtcgatgaaaaagtgcagatactgaaagccatgccgccgctcacccgcgatgatgtggtgcgcggacagttcagaggttatctggacgagccgggtgtcgcctcggcgtccaaccgggaaaccttcgccgccgcccgctttcgcgtcgccacctggcgctggaatggcgtgcctttcttcatccggtccggcaagaacctgccggcgcatgcaaccgaagtcgtggtccgcttcaagcggccgccaattgcgctctttggcgatgtcgagacaacgcccgccaattatgtgcgcttccgtctgggcccggatatcgcgatcggaatcggtgcgcgtcgcaaggcagctggcgatggcatgcgcggcgaggccgtagaactcggcgcggtcgatgacggtatcggtgacatggcgccttatgagcggctgatcggcgatgcgatggccggcgagcgtcagctctttacccgccaggatgcggcggaactggcctggaagatcgtggagcctatcctcgatgatcccgccgtgccgcctgtctatgaggtgggaagctggggcccggcggaaatggcagggtttggcccgccaggcggatgggttgatcccgaataa

SEQ ID NO: 1967 - protein, 461 aa, Agrobacterium tumefaciens str. C58
MKASATDRQRSDVLVVFGATGDLAYKMIFPSLYAMVKRGALQTPIIGVAFDDWPREQLIARARDAVANHLDKIDEAVFEKFAAQLTYVSGDYRNEATFEKLRTALGGHQHPLYYLAIPPSLFETVVTGLNRAGIAASARLMVEKPFGRDLASAEALNEALHAVFAEDAIFRIDHFLGKEAIQNLLYFRFANAFLEPVWNRDHVESVQITMAEDFGIRGRGKFYDEVGCIRDVIQNHLINVLLLLAMEPPATSASDDLVDEKVQILKAMPPLTRDDVVRGQFRGYLDEPGVASASNRETFAAARFRVATWRWNGVPFFIRSGKNLPAHATEVVVRFKRPPIALFGDVETTPANYVRFRLGPDIAIGIGARRKAAGDGMRGEAVELGAVDDGIGDMAPYERLIGDAMAGERQLFTRQDAAELAWKIVEPILDDPAVPPVYEVGSWGPAEMAGFGPPGGWVDPE

SEQ ID NO: 1968 - DNA, 1422 bp, Caulobacter crescentus CB15
  CDS (1)..(1422): transl_table=11
ttggtgctgctgggcggagcgggcgatttggccctccggatgctgctgccttctctgtatttcctggagctcgaccgactgctgccgcacgatctgcggatcattggcgtcgcccgggccgaccatgacgcggccagctacaaggcgctggtccgcgagcaactgggcaagcgcgcgacagtggaggaggcggtttggaatcgcctcgccgcgcgcctcgactacgtgcctgcgaacatcaccagtgaggaagacaccaagaagctggccgaacggatcggtgcgcatggcacgctggtcatcttcttctcgctgtcgcccagcctctacggcccggcttgccaggctttgcaggccgccggcctgacggggcccaacacgcgcttgatcctcgaaaagccgcttggccgcgatctcgaaagctccaaggccaccaacgccgccgtcgccgctgtggtcgacgagagccaagtgttccgcatcgaccactatctgggcaaggaaaccgtccagaacctgacggccctgcgcttcgccaacgtgctgttcgagcccctgtgggatcgcaacacgatcgaccatgtgcagatcaccatcgccgagaccgaaaaggtcggcgaccgctggccctactacgacgaatacggcgcgctgcgggacatggtgcagaaccacatgctgcaactgctgtgtctggtcgccatggaagcgccctcaggcttcgatcccgatgcggtgcgcgacgagaaggtcaaggtgctgcgctccctgcggcccttcaccaaggagaccgtggcccacgacaccgtgcgtggccagtacgtcgccggtgtggtcgagggcggcgcgcgcgctggctatgtcgaggaagtgggcaagcccaccaagaccgagactttcgtggccatgaaggtcgcgatcgacaactggcgttgggacggcgtgccgttcttcctgcgcaccggcaagaacctgccggaccgccgcacccagatcgtcgtccagttcaagcctttgccgcacaacatcttcggtccggcgaccgatggcgagctgtgcgccaaccgcctagtcatcgacctgcagccggacgaagacatctcgctgacgatcatgaacaagcgtccgggtctctcggacgagggcatgcgactgcagtcgctgccgctgtcgctgtcgtttggccagaccggcgggcgccgtcgcatcgcttacgaaaagctgttcgtcgacgccttccgcggcgaccgtacgctgttcgtgcgtcgcgatgaggtcgagcaggcctggcgcttcatcgacggcgtctcggcggcctgggaagaggccagtatcgaaccggcgcactatgcggcgggcacctggggaccgcagtccgcccagggcctgatctcgcccggcggccgagcctggaaggcctga

SEQ ID NO: 1969 - protein, 473 aa, Caulobacter crescentus CB15
MVLLGGAGDLALRMLLPSLYFLELDRLLPHDLRIIGVARADHDAASYKALVREQLGKRATVEEAVWNRLAARLDYVPANITSEEDTKKLAERIGAHGTLVIFFSLSPSLYGPACQALQAAGLTGPNTRLILEKPLGRDLESSKATNAAVAAVVDESQVFRIDHYLGKETVQNLTALRFANVLFEPLWDRNTIDHVQITIAETEKVGDRWPYYDEYGALRDMVQNHMLQLLCLVAMEAPSGFDPDAVRDEKVKVLRSLRPFTKETVAHDTVRGQYVAGVVEGGARAGYVEEVGKPTKTETFVAMKVAIDNWRWDGVPFFLRTGKNLPDRRTQIVVQFKPLPHNIFGPATDGELCANRLVIDLQPDEDISLTIMNKRPGLSDEGMRLQSLPLSLSFGQTGGRRRIAYEKLFVDAFRGDRTLFVRRDEVEQAWRFIDGVSAAWEEASIEPAHYAAGTWGPQSAQGLISPGGRAWKA

SEQ ID NO: 1970 - DNA, 1476 bp, Salmonella typhimurium LT2
  CDS (1)..(1476): transl_table=11
atggcggtaacgcaaacagcccaggcatgtgacctggtcattttcggcgcgaaaggcgacctggcgcgccggaaattgctgccttccctgtatcagcttgagaaagccggccagatccatccggatacccgtatcattggggtggggcgcgcggactgggataaagaagcctatacccacgttgtgcgtgaagcgctggaaaccttcatgaaggaaaaaattgatgaaggcttgtgggatacgctgagcggccgtctggatttttgtaatcttgacgttaacgatacgcctgcgtttagtcgcctgggcgatatgctggatcaaaaaaaccgcaccaccattaactattttgcgatgccgcccagcacctttggcgctatttgcaaagggttaggagaggctaaactcaacgccaaaccggcgcgcgtcgtgatggaaaaaccgttgggtacttcgctggcgacctcgcgtgagattaacgatcgggtcggcgaatactttgaagagtgccaggtatatcgtatcgaccactatctgggtaaagaaacggttctcaacctgctggcgctgcgttttgccaactcgttattcgttaataactgggataaccgcactatcgatcacgttgagattaccgtagcggaagaggtggggattgaagggcgctggggatactttgaccaggccggtcagatgcgcgatatgatccagaaccacttgctgcaaattctctgcatgattgccatgtcaccgccgtctgacctgagcgccgacagtattcgcgatgaaaaagtcaaagtgttgaaatcgctgcgccggattgatcgctccaacgtgcgtgaaaaaacggttcgtggtcaatacaccgcgggctttgcgcaggggcaaaaggtgccgggctatctggaagaagagggcgcgaataaaagcagcaacaccgaaacattcgtcgcgatccgcgtcgacatcgataactggcgttgggcgggcgtgccattctatctgcgcaccggcaagcgtctgccaaccaagtgctctgaagtcgtggtttatttcaagacgcctgaactgaacctctttaaagagtcctggcaagacctgccgcagaacaaattgacgattcgcctgcagccggatgaaggcgtagatattcaggtgcttaacaaagtaccggggctggatcataagcataatctgcagatcacgaagcttgatctgagctactccgagacctttaatcagacgcacctggcggatgcctatgaacgcctgctgctggaaacgatgcgtggcattcaggcgctgtttgtccgccgtgacgaagtggaagaagcctggaagtgggtggactccattaccgaagcatgggcgatggacaacgacgcgccgaagccgtatcaggcgggcacctggggaccggtagcgtccgtggcgatgattacccgtgacggtcgttcgtggaatgagtttgagtaa

SEQ ID NO: 1971 - protein, 491 aa, Salmonella typhimurium LT2
MAVTQTAQACDLVIFGAKGDLARRKLLPSLYQLEKAGQIHPDTRIIGVGRADWDKEAYTHVVREALETFMKEKIDEGLWDTLSGRLDFCNLDVNDTPAFSRLGDMLDQKNRTTINYFAMPPSTFGAICKGLGEAKLNAKPARVVMEKPLGTSLATSREINDRVGEYFEECQVYRIDHYLGKETVLNLLALRFANSLFVNNWDNRTIDHVEITVAEEVGIEGRWGYFDQAGQMRDMIQNHLLQILCMIAMSPPSDLSADSIRDEKVKVLKSLRRIDRSNVREKTVRGQYTAGFAQGQKVPGYLEEEGANKSSNTETFVAIRVDIDNWRWAGVPFYLRTGKRLPTKCSEVVVYFKTPELNLFKESWQDLPQNKLTIRLQPDEGVDIQVLNKVPGLDHKHNLQITKLDLSYSETFNQTHLADAYERLLLETMRGIQALFVRRDEVEEAWKWVDSITEAWAMDNDAPKPYQAGTWGPVASVAMITRDGRSWNEFE

SEQ ID NO: 1972 - DNA, 1476 bp, Listeria monocytogenes EGD-e
  CDS (1)..(1476): transl_table=11
atgacagatgagttagaacaaaaagcactgattactatttttggcggtacgggagatttggcaaatcgcaaactttacccttcgctatatcatttgtacagtaagggatctcttggcgacaattttgctgttattggaacggctcgtcgtgaatggagtaacgatttcttccgtgataaagtaaaagagtctatcaaagacattgacggttctgaaaaagacgcagatgcatttgcttctcacttctactatcaatctcatgatgtgacaaataaagaatcttatctaactttaaaagatttgtctgatgaattagatgcaaaatacgaattagatggcaatcgccttttctatcttgcaatggcgccaaatttctttggaactatcgcaagtcgcattaaatctgaaggctttgttgatacagacggtttccatcgtttaattatcgaaaaaccattcggccatgatttagctagtgcggaagaattaaacaattcacttcgtcaagctttcaaggaagatgaaatttatcgtattgaccattatttaggaaaagaaatgatccaaaatatttcggttattcgttttgcaaattctattattgaatcgctttggaataatcgttacatcgataatattcaagttactttaacagaggtacttggagtcgaagatcgtggacgctattacgatgaaagtggcgcacttcgagacatggttcaaaatcatatcttacaaatcgtttctttacttgcaatggagccaccgattaacttatctactcgcgagattcgtcatgaaaaagttcgcgcgcttcgttctttacgcgtttttgaaggaaaagaagtgcatcaaagctttatccgtggtcaatatggtcccggtgaagtggatggtaaagagttaaaaggttatcgtcaagaagataatgtggatccccattccaatacggaaacatttgttgcagccaaacttgaaatcgataatttccgctgggctggcgtaccattttacattcgcactggtaaacgtcttgcgaagaaaacaacgcaaattgcgattcagtttaaagatgtcccactaaacttattcgggcaacaacaatcacttggtggtaatgtgcttgttattcatatccaaccggacgaaggtattacacttcatttgaacgtaaaagaacctggtcaaggtatggttacgatgccagtcaacttgaattatattcattcctctccagacggcatgaacacacctgaggcttacgaaaaattgattctagactgtcttcgcggtgacgcgacttacttctctcactgggatgaagtatcgctatcatggaactttatcgaccatatagcagatgtttggacaaatacgaaagatcatttcccgaactacaaatccggttcaatggggccaaaagaagcagacgacctcattcaacgtgacggattccagtggttcccgatcgattaa

SEQ ID NO: 1973 - protein, 491 aa, Listeria monocytogenes EGD-e
MTDELEQKALITIFGGTGDLANRKLYPSLYHLYSKGSLGDNFAVIGTARREWSNDFFRDKVKESIKDIDGSEKDADAFASHFYYQSHDVTNKESYLTLKDLSDELDAKYELDGNRLFYLAMAPNFFGTIASRIKSEGFVDTDGFHRLIIEKPFGHDLASAEELNNSLRQAFKEDEIYRIDHYLGKEMIQNISVIRFANSIIESLWNNRYIDNIQVTLTEVLGVEDRGRYYDESGALRDMVQNHILQIVSLLAMEPPINLSTREIRHEKVRALRSLRVFEGKEVHQSFIRGQYGPGEVDGKELKGYRQEDNVDPHSNTETFVAAKLEIDNFRWAGVPFYIRTGKRLAKKTTQIAIQFKDVPLNLFGQQQSLGGNVLVIHIQPDEGITLHLNVKEPGQGMVTMPVNLNYIHSSPDGMNTPEAYEKLILDCLRGDATYFSHWDEVSLSWNFIDHIADVWTNTKDHFPNYKSGSMGPKEADDLIQRDGFQWFPID

SEQ ID NO: 1974 - DNA, 1470 bp, Ralstonia solanacearum GMI1000
  CDS (1)..(1470): transl_table=11
atgtcggtgcccgcattcgacatggtgttgtttggcggtacgggtgatctggcccgccgcaagctgattccggccttgttcgatgcgcaccaggggggcgagctccattcgcgcgggcggatctttgccatcggcacccagccgctggagaccgccggttacctggccctgctcgagcgggaggtgcgccccaccatgcgcctgtattccggcgcgcccgtgtcggacgatgcctgggcctctttcgtcgcccgcatcgtctaccagcaggtcgatgcccgcaagccggaacagttcgatgccctggccgccgcgctgggcgagaaccgcgccccggtcaccgtgtgctacctggccaccgcgcccggcattttcgtcgacatctgcgcgcagcttgcccgcgtcggcctgaacacgcccaacgtgcggttggtgctcgagaagccgctgggcaccgacctggcctccaacgagcgcatcaattcggccgtggccgagttctttgccgaagaccagatctaccggatcgaccactacctcggcaaggagtcggtgcagaacctgatggcgatccgcttcggcaacgcgctgttcgagccgctgtggcgccgcgagtggatcaaggacgtgcagatcaccatcgccgagcagctcggcgtggagaagcgcggcgacttctacgacggcgtcggcgccctgcgcgatatggtgcagaaccacctgctgcagctggtgtgcatcgtcgccatggagccgcccgccagcctgtcgcaggacgccatccgtgacgagaagctgaagatcctcaaggcgctcaagccgatcccgctgcaggaggtgcccgagaagaccgtgcgcggccagtatctggagggcgccatcgccgggcagccggtgcagggctacctggacgagcacggcattccgcatgacagccgcaccgagaccttcgtcgccatcaaggccgagatcgccaactggcgctgggccggcgtgccgttctacctgcgcaccggcaagcgcatgccgcagcggctggcggagatcgtggtgcgttttcatgacgtgccgcacgcgctgtttcccaagccgctggtccagttccccgagaaccgcctggtgatccgcctgcagccggaggaaagcatccgcctgcagttcctgaccaaaacgccgggcgcggcactgggcctgcagccgtccacgctggacctggatttcaccaaccacggcggcgtgcgccacgccggcgcctacgagcgcctgctgatggacgccgtcaacggccagcttggcctgttcgtgcgccgcgacgagcaggccgaggcctggcgctgggtcgagcccatcatcgaggcatggaaccaggcccgcacgccgcccaagggctacacggcgggcagctgggggccggccgcttccagcgcgctgctctcacgcgatgccgctgcctggcacgaggagatgtga

SEQ ID NO: 1975 - protein, 489 aa, Ralstonia solanacearum GMI1000
MSVPAFDMVLFGGTGDLARRKLIPALFDAHQGGELHSRGRIFAIGTQPLETAGYLALLEREVRPTMRLYSGAPVSDDAWASFVARIVYQQVDARKPEQFDALAAALGENRAPVTVCYLATAPGIFVDICAQLARVGLNTPNVRLVLEKPLGTDLASNERINSAVAEFFAEDQIYRIDHYLGKESVQNLMAIRFGNALFEPLWRREWIKDVQITIAEQLGVEKRGDFYDGVGALRDMVQNHLLQLVCIVAMEPPASLSQDAIRDEKLKILKALKPIPLQEVPEKTVRGQYLEGAIAGQPVQGYLDEHGIPHDSRTETFVAIKAEIANWRWAGVPFYLRTGKRMPQRLAEIVVRFHDVPHALFPKPLVQFPENRLVIRLQPEESIRLQFLTKTPGAALGLQPSTLDLDFTNHGGVRHAGAYERLLMDAVNGQLGLFVRRDEQAEAWRWVEPIIEAWNQARTPPKGYTAGSWGPAASSALLSRDAAAWHEEM

SEQ ID NO: 1976 - DNA, 1575 bp, Drosophila melanogaster
  CDS (1)..(1575)
atggcaacgcaaaaggaagatcacaccgccctggatctcataatcaagtcactcaagtcgcctacaatggtctgcgagggaacccactttgacggcaagattccgcacacgttcgtcatctttggggcgtcgggcgatctggccaagaagaagatctaccccacgctctggtggctctaccgcgatgacctgctgcccaagccgaccaagttctgcggctatgcccgttccatgctgaccgtcgatagcatcaaggagcagtgtctgccgtacatgaaggtccagccgcacgagcagaagaagtacgaggagttctgggccctcaatgagtacgtgtccggcagatatgacggacgcactggcttcgagctgcttaaccagcagctggagattatggagaacaagaacaaggccaaccgcatcttctatctggccctgccgcccagcgtcttcgaggaggtgactgtcaacatcaagcagatctgcatgtcggtctgcggttggaaccgcgtgattatcgagaagcctttcggccgggatgacgcctcctcgcaggcgctgagcgaccatctggccggtctgttccaggaggatcagctgtaccgcatcgatcactacctgggcaaggagatggtgcagaacctgatgaccatacgcttcggcaacaagatcctcagctcgacgtggaaccgcgagaacatcgcctccgtgctgatcacgttcaaggagcccttcggcacgcagggtcgtggcggctacttcgacgagttcggcatcatacgcgacgtgatgcagaaccatctgctgcagatcctctcgctggtggccatggagaagccggtgagctgccacccggacgacattcgtgacgagaaggtcaaggtgctgaagagcatcgaggccctgacgctggatgacatggtgctgggccagtacctgggcaatccgcagggtacaaacgatgatgcgcgcacgggctacgtggaggaccccaccgttagcaacgattcgaacacgcccacctacgccctcggcgtgctcaagatcaacaacgagcgctggcagggagtgcccttcatcctgcgctgcggcaaggcgctgaacgagcgcaaggcggaggtgcgtatccagtaccaggacgtgcccggcgacatcttcgagggcaatacgaagcgcaacgagctggtcatccgcgtccagccgggcgaggccctgtactttaagatgatgaccaagagccccggcatcacgttcgacatcgaggagacggagctggacctcacctacgagcaccgctacaaggactcctacctgccggacgcgtacgagcgtctcatcctcgacgtcttctgcggctcccagatgcacttcgtccgctcggacgagctgcgcgaggcgtggcgcatatttacgcccattctgcaccagatcgagaaggagcacattcggccaatcacctaccagtacggatcgcgcggtcccaaggaggcggaccgcaagtgcgaggagaacaatttcaagtactccggctcctacaagtggcacggcggcaaggcggccacgtccaatcactga

SEQ ID NO: 1977 - protein, 524 aa, Drosophila melanogaster
MATQKEDHTALDLIIKSLKSPTMVCEGTHFDGKIPHTFVIFGASGDLAKKKIYPTLWWLYRDDLLPKPTKFCGYARSMLTVDSIKEQCLPYMKVQPHEQKKYEEFWALNEYVSGRYDGRTGFELLNQQLEIMENKNKANRIFYLALPPSVFEEVTVNIKQICMSVCGWNRVIIEKPFGRDDASSQALSDHLAGLFQEDQLYRIDHYLGKEMVQNLMTIRFGNKILSSTWNRENIASVLITFKEPFGTQGRGGYFDEFGIIRDVMQNHLLQILSLVAMEKPVSCHPDDIRDEKVKVLKSIEALTLDDMVLGQYLGNPQGTNDDARTGYVEDPTVSNDSNTPTYALGVLKINNERWQGVPFILRCGKALNERKAEVRIQYQDVPGDIFEGNTKRNELVIRVQPGEALYFKMMTKSPGITFDIEETELDLTYEHRYKDSYLPDAYERLILDVFCGSQMHFVRSDELREAWRIFTPILHQIEKEHIRPITYQYGSRGPKEADRKCEENNFKYSGSYKWHGGKAATSNH

SEQ ID NO: 1978 - DNA, 1476 bp, Agrobacterium tumefaciens str. C58
  CDS (1)..(1476): transl_table=11
atgagcagtcagatcattcctgttgaaccttttgattgtgtcgttttcggcggcacgggcgatcttgccgagcgcaagcttctgccggccctttatcaccggcaggtcgaaggccagttcacggagccgacccgcatcatcggcgcgtcgcgttcggtcatgacccatgaggaatatcgcaaattcgcgcaggacgccctgaaggaacacctgaaggccggcgaatatgacgatgcgcaggtgaccctgttcctcaaccggcttttctacgtgcccgtcgatgccaagtccggcaatggctgggacgtgctgaagaaactgctcgatgagggcaaggaacgcatccgcgcgttttatctggccgtcgcacccggcattttcggcgacatcgccgacaagatccgtgagcacaagctgatcacccgctcgacccgcatcgtcgttgaaaagccgatcggccgggatctcgcatccgcgcaggaactgaacgacaccatcggtcacgtcttcaaggaagagcagatcttccgcatcgaccactatctcggcaaggagacggtgcagaacctgatggcgctgcgtttcgccaatgcgctttacgagccgctgtggaattccgcccatatcgaccacgttcagatcaccgttgccgaagcggtgggtcttgaaggtcgcgccggttattacgacaaggccggtgcgctgcgcgacatggtgcagaaccacattctccagctgctttgcctcgttgccatggagccgcccgcttccatgaaatcggaggcagtgcgcgacgaaaagctcaaggtactgcgctcgctgaagccaatcgataccagcaatgtcgaaaagctgacggtacgcggccagtaccgcgccggcgcttccgcaggcggccccgtcaagggttatctggaagagctggaaggcggcgtttccaacaccgaaaccttcgtcgccatcaaggctgaaatcgccaactggcgctgggccggcgttcccttctacatccgcaccggcaaacgcctcgcgacccgtgtttcggaaatcgtcgtcaccttcaagcagatcccgcactcgatcttcgacgatgcggctggcaagatcgaagccaacaagctggtcattcgcctgcagccggatgaaggcgtcaagcagtcgctcctcatcaaggatcccggtccaggcggcatgcgcctgcgtcaggtctcgctggacatgagctttgccgaagccttcaacgtgcgcagccccgatgcctatgagcggctgttgatggacaccattcgttccaaccagacattgttcatgcgccgcgacgaggtcgaggccgcgtgggactggatcgaccccatcttgaagagctgggaagagctgggacagagcgtacagggttacactgccggcacctggggcccgagcggttcgatcgcactgatcgagcgcgacggccgcacctggcacgatgccgactga

SEQ ID NO: 1979 - protein, 491 aa, Agrobacterium tumefaciens str. C58
MSSQIIPVEPFDCVVFGGTGDLAERKLLPALYHRQVEGQFTEPTRIIGASRSVMTHEEYRKFAQDALKEHLKAGEYDDAQVTLFLNRLFYVPVDAKSGNGWDVLKKLLDEGKERIRAFYLAVAPGIFGDIADKIREHKLITRSTRIVVEKPIGRDLASAQELNDTIGHVFKEEQIFRIDHYLGKETVQNLMALRFANALYEPLWNSAHIDHVQITVAEAVGLEGRAGYYDKAGALRDMVQNHILQLLCLVAMEPPASMKSEAVRDEKLKVLRSLKPIDTSNVEKLTVRGQYRAGASAGGPVKGYLEELEGGVSNTETFVAIKAEIANWRWAGVPFYIRTGKRLATRVSEIVVTFKQIPHSIFDDAAGKIEANKLVIRLQPDEGVKQSLLIKDPGPGGMRLRQVSLDMSFAEAFNVRSPDAYERLLMDTIRSNQTLFMRRDEVEAAWDWIDPILKSWEELGQSVQGYTAGTWGPSGSIALIERDGRTWHDAD

SEQ ID NO: 1980 - DNA, 1476 bp, Brucella melitensis 16M
  CDS (1)..(1476): transl_table=11
atgaccagtcagacaattccggtagatcccttcgactgcatcgtttttggtggcaccggcgatcttgccgagcgcaagcttattccggcgctttatcagcgccagcgcgcaggccagctttccgaccccacacgcatcatcggcgcctcgcgcagccagatgaccgacgacgaatatcgcaccttcgccggcaatgcgatcaaggaacatgtgaaaccggaagaggtggatcaggccgaagttgaaatcttcctcaagcggctgcactatgtggcggtggacgccaagtccgacgagggctgggatgcgctgaagaccctgatcggcaagaagccggaaaagatccgagccttttatctggccgtcagcccgaccctgttcggcgatatcgccacgcggctcaaggcgcatggcctcatcacgcgcgatacgcgcatcgtcgtggaaaagccgattggccgcgatctcgattccgccaaggcgctcaacgacacgctgggcagtgtgttccgcgaagaccagattttccgcatagaccactatctcggcaaggaaacggtgcagaacctgatggcgctgcgctttgccaatgcgctctacgagccgctgtggaactccgcccatatcgaccatgtgcagatcacggtggcggaagccgtgggccttgaaggccgcgcaggctattacgacaaggcgggcgcgctgcgcgacatggtgcagaaccacattctccagcttctctgccttgttgccatggaaccgccatcctcgattgaggccgacgccgtacacgacgagaaggtaaaggttctgcgctccctgcagccgatctccacgcataatgtcgaggaactgacggtccgcggacaatatcgcgcgggcgcttccgcaggcgggccggtcaagggctatctggaagaccttgaaagcgacaccagcaatacggaaacattcgtggcgctgaaggcggaaatcgccaactggcgctgggcgggtgtgccgttctatctgcgcaccggcaagcgccttgccacgcgtgtttcggaaatcgtcatcacgttcaagcccattccgcattccatctttggcgaaagcgcgggcaaggtgattgccaatcagcttgtcatccgcctgcaaccggacgaaggcgtgaagcaatggctgatgatcaaggatcccggtccgggtggaatgcgcctgcgccacatgccgctcgacatgagctttgcggaatccttcgaggatcgcaacccggatgcctatgagcgcctcatcatggatgtggtgcgcggcaaccagaccctgttcatgcgccgcgacgaagtggaagcggcctggcgctggatcgacccgatccttcaggcatgggagttcaacagccagcccgtgcagggctatacggctggcacatgggggccttcgtcctccatcgcgctcattgagcgcgatggccgcacctggcacgaaagcctctaa

SEQ ID NO: 1981 - protein, 491 aa, Brucella melitensis 16M
MTSQTIPVDPFDCIVFGGTGDLAERKLIPALYQRQRAGQLSDPTRIIGASRSQMTDDEYRTFAGNAIKEHVKPEEVDQAEVEIFLKRLHYVAVDAKSDEGWDALKTLIGKKPEKIRAFYLAVSPTLFGDIATRLKAHGLITRDTRIVVEKPIGRDLDSAKALNDTLGSVFREDQIFRIDHYLGKETVQNLMALRFANALYEPLWNSAHIDHVQITVAEAVGLEGRAGYYDKAGALRDMVQNHILQLLCLVAMEPPSSIEADAVHDEKVKVLRSLQPISTHNVEELTVRGQYRAGASAGGPVKGYLEDLESDTSNTETFVALKAEIANWRWAGVPFYLRTGKRLATRVSEIVITFKPIPHSIFGESAGKVIANQLVIRLQPDEGVKQWLMIKDPGPGGMRLRHMPLDMSFAESFEDRNPDAYERLIMDVVRGNQTLFMRRDEVEAAWRWIDPILQAWEFNSQPVQGYTAGTWGPSSSIALIERDGRTWHESL

SEQ ID NO: 1982 - DNA, 1428 bp, Schizosaccharomyces pombe 972h-
  CDS (1)..(1428)
atgctatccatcattgttttcggtgcatccggcgatctcgctaccaaaatgactttcccggccttgtttgccctttacgtccgcaaaattattcccgaggactttcaaatcatcggctatgcccgttccaaattgtcccaagaggccgctaacaaaatcgtcaccgcccatattcccattgacgatactgtcggtgcttctcaaaaggccttaaacacctttgtcgagcattacaagtatgtccccggtacttatgataagcccgagtcttttgagatgctaaacagcattattgctgaaaaggagactgctcccgcctccgaatgcacacgtatcttttacttggttctgcctcctcatctctttgctcccgtttccgagctaatcaagagtaaggctcatcccaatggtatggtcactcgtcttattgttgagaagcccatcggcttcgactacaagtctgccgatgccattctcagcgatctcagcaagcactggtctgccaaggatactttcaaagtcgaccatttccttggcgaggatatgattgatggattcactgcaattcgctttgcaaactccatgttcgagcccatctggaatcgtgaacacattgaaagtgttcgtgtcgactttcgtgaagactttggttgtgagggacgtggaggttattttgagggcgctggtatccttcgcgatgtcgttcaaaatcatcttttgcaactacttaccttactttgcatcgaagagccaaagtctcaagatgccgaagatatcatcaaatgcaaggttgacttcttgaaatcccttcatcccgtttccaaggaggacatcgtctatggacagtacactaaaagtgcaaatggaaaggtccccggttatcgtgaactggatggtgttgctgatgacagtgaagtttctacattctgtgctcttcaacttcgctctgaagcacctcgttggaagggtattcccatcatcatttctgccggtaaaggtttggaccgcgattactttgaagctcgtatcacttttaagcgtagggaaggaggtatgttccctaccgttgatagcagcaatgttctagtccttcgtgtttatcccaaggaattcattgccctcaagggacacattaaacaacctggtttctctcgtcaaattgttcctgtgactttggacgttaagtatcccgaagctttccctgatacatggatccataaggcctatgaagtggttattgccgatgccattaatggaaagcatacacactttattagtgatgatgaggttcgtacctcttggaaaatctttgatgatgtccttgacactacaggcgatttgtcacctcttccttatgcttttggttcccaccatggtccagatgccacactcgaatttttcaagaagcgtaatttagagtgggattaa

SEQ ID NO: 1983 - protein, 475 aa, Schizosaccharomyces pombe 972h-
MLSIIVFGASGDLATKMTFPALFALYVRKIIPEDFQIIGYARSKLSQEAANKIVTAHIPIDDTVGASQKALNTFVEHYKYVPGTYDKPESFEMLNSIIAEKETAPASECTRIFYLVLPPHLFAPVSELIKSKAHPNGMVTRLIVEKPIGFDYKSADAILSDLSKHWSAKDTFKVDHFLGEDMIDGFTAIRFANSMFEPIWNREHIESVRVDFREDFGCEGRGGYFEGAGILRDVVQNHLLQLLTLLCIEEPKSQDAEDIIKCKVDFLKSLHPVSKEDIVYGQYTKSANGKVPGYRELDGVADDSEVSTFCALQLRSEAPRWKGIPIIISAGKGLDRDYFEARITFKRREGGMFPTVDSSNVLVLRVYPKEFIALKGHIKQPGFSRQIVPVTLDVKYPEAFPDTWIHKAYEVVIADAINGKHTHFISDDEVRTSWKIFDDVLDTTGDLSPLPYAFGSHHGPDATLEFFKKRNLEWD

SEQ ID NO: 1984 - DNA, 1422 bp, Schizosaccharomyces pombe 972h-
  CDS (1)..(1422)
atggttacttttatggtatttggtgcatcaggcaacctcgccaacaaaaagacattccctgccctgttccatctcttcaaacgaaacctggtagatcgttcttccttttacgtacttggatatgctagaagtaagatacctatcggtgaattcagggaaagtattcgtgaatctgtgaagccagatactgaaagcaaacaggtgtttcaggacttcattgaccgagtatcttacttcagtggtcagtatgatcagagcagttcttatgtggaatttcgaaaacacctagaatcagttgaaaaaaaagcagactcttcgaaagcacttcgtatcttttatatcgccttaccaccatctgtttacgtgacagtcagttctcatatatatgagaatttatatttaccaggaaaatcgcggttagttattgaaaaaccgtttggtaaaaactatcaatcggctgttaaactcaaagaagaagttcataagcattggaaagaggaagaaatttatcggattgatcattatacagccaaagatatggttaacaattttttcacccttcgttttgcaaactcttcgtccattgacgcagttttaaatcgccattctattcaatccgtcgaaatacacatgtatgaaacgggaggctgtgaaggccgtattggttactatgatgcgaatggagtcgttcgcgacgtcgtacagaatcatttaactcaaattttttgtattgctgctatgaatgaaccgaagtctgcttctgcgagtgatgttcgtgctgaaaaggtcaatttgttgaaagctaccagaccagcatctttgaaagaaagtatgcttggtcagtatacaactagcgaagacggtaaaataccgggctacttagacttggagggagtccctaaagatagtaaagccaccacatttgctgcatccactcttcatgttgataatgatcgatggaagggcgtacccttcgtatttgtctctggtaagcggatgaaaaaaggtgaagtatatatcaagtactatttccgtctaaaagactccggaattttctccgacgtaaaacgacgtcggtacttgattcttcatgttcagccggaggagtttgtcaatttgacatgtactattaataaacccatgactactgaccttcaaccgattgacgcctatgcttcgctcaattataatgagcaatttaaagatctgatgaaggaaaaacgagatggctatgaaattttattcgaagatgcaattcgcggtgatcccactaagttcattcgttatgatgaggttgagtatgcttggaagatatgggacgaaatcctcgattctcccaaaaaacctattccctatccagctggttcagatggtcctgagggtttggaagcttatatgaaaaggcatctaggccatgaatag

SEQ ID NO: 1985 - protein, 473 aa, Schizosaccharomyces pombe 972h-
MVTFMVFGASGNLANKKTFPALFHLFKRNLVDRSSFYVLGYARSKIPIGEFRESIRESVKPDTESKQVFQDFIDRVSYFSGQYDQSSSYVEFRKHLESVEKKADSSKALRIFYIALPPSVYVTVSSHIYENLYLPGKSRLVIEKPFGKNYQSAVKLKEEVHKHWKEEEIYRIDHYTAKDMVNNFFTLRFANSSSIDAVLNRHSIQSVEIHMYETGGCEGRIGYYDANGVVRDVVQNHLTQIFCIAAMNEPKSASASDVRAEKVNLLKATRPASLKESMLGQYTTSEDGKIPGYLDLEGVPKDSKATTFAASTLHVDNDRWKGVPFVFVSGKRMKKGEVYIKYYFRLKDSGIFSDVKRRRYLILHVQPEEFVNLTCTINKPMTTDLQPIDAYASLNYNEQFKDLMKEKRDGYEILFEDAIRGDPTKFIRYDEVEYAWKIWDEILDSPKKPIPYPAGSDGPEGLEAYMKRHLGHE

SEQ ID NO: 1986 - DNA, 1305 bp, Encephalitozoon cuniculi GB-M1
  CDS (1)..(1305)
atgaaggtcgttatcttcgggtccagtggcgatcttgcaaaaagaaagctttttcctgcactctctcggattgacttggagggtgtcggggtggttggctatgcaaggaccaagtacaacatcgagttttcggaagttcttcaggaggtcgggaactactcgccggaatttctttcgaaggtcacctacattccagggccctacgatgacctttcgaagcttaaagaggtctcagactcggagactgtgctgtacttttcagttccatcctctgtgtacacttgtttattcagagagatatcgaagcttgactacaaggtgattggagtcgagaagccatatggagatagcattgagtcgtttatggagataaaggggtttgatctggggaagaccaggtttattgaccactatcttctgaagccgcttgtggtggctatgcctgggattataagggagacgggggcgattcgagaggtgatgagcaacagatatgtgaagagtgttgagatagtctcgaaggaagttcttgggggagagggaagacactacttcgataagaacggaattataagggacatggtcctgagccacatgggcgagcttcttggggttgttgcgtctgacgtaacaaagccatcgaggattatggaagcattggcgagaatggaggttttcaaggcatgcaccgtcgacaccgagagatgcatttatgggcagtatgacgactatattaaggagattcacaaggactcgagtacggagacgttctgcatggttcccataagcatagggactccccgctggtctaaggttcccttcatcattgttgcagggaaggggatgaacgaaaagagaacagagataatacttgagtttcgaagagatgtatttgcgaagtgcattgagctgttttctatgccgaggcaatcttcgtgcaggattgttcacaccaacgaaatagaaacggttcgactggtctttaatatatatcctgaatgcgaagtatttctggaagttctcgtgggaggggagcctgtccggtatgttctgcatgacaagaaagagattgatggcctgatgcatgacagttatggaggataccatgactatgagatcatctttgacagtcttgtaagaggcaaggactttagcagcgtgagctctcaggaggcagagcttctgtggaaggtgtttaaccccatactatctattagcaaagaggacatgctgttctactattctaagggaattgacatgcctaaggaagctgaagaaatgatcagggaaattaaagaccattag

SEQ ID NO: 1987 - protein, 434 aa, Encephalitozoon cuniculi GB-M1
MKVVIFGSSGDLAKRKLFPALSRIDLEGVGVVGYARTKYNIEFSEVLQEVGNYSPEFLSKVTYIPGPYDDLSKLKEVSDSETVLYFSVPSSVYTCLFREISKLDYKVIGVEKPYGDSIESFMEIKGFDLGKTRFIDHYLLKPLVVAMPGIIRETGAIREVMSNRYVKSVEIVSKEVLGGEGRHYFDKNGIIRDMVLSHMGELLGVVASDVTKPSRIMEALARMEVFKACTVDTERCIYGQYDDYIKEIHKDSSTETFCMVPISIGTPRWSKVPFIIVAGKGMNEKRTEIILEFRRDVFAKCIELFSMPRQSSCRIVHTNEIETVRLVFNIYPECEVFLEVLVGGEPVRYVLHDKKEIDGLMHDSYGGYHDYEIIFDSLVRGKDFSSVSSQEAELLWKVFNPILSISKEDMLFYYSKGIDMPKEAEEMIREIKDH

SEQ ID NO: 1988 - DNA, 1545 bp, Corynebacterium glutamicum ATCC 13032
  CDS (1)..(1545): transl_table=11
gtgagcacaaacacgaccccctccagctggacaaacccactgcgcgacccgcaggataaacgactcccccgcatcgctggcccttccggcatggtgatcttcggtgtcactggcgacttggctcgaaagaagctgctccccgccatttatgatctagcaaaccgcggattgctgcccccaggattctcgttggtaggttacggccgccgcgaatggtccaaagaagactttgaaaaatacgtacgcgatgccgcaagtgctggtgctcgtacggaattccgtgaaaatgtttgggagcgcctcgccgagggtatggaatttgttcgcggcaactttgatgatgatgcagctttcgacaacctcgctgcaacactcaagcgcatcgacaaaacccgcggcaccgccggcaactgggcttactacctgtccattccaccagattccttcacagcggtctgccaccagctggagcgttccggcatggctgaatccaccgaagaagcatggcgccgcgtgatcatcgagaagcctttcggccacaacctcgaatccgcacacgagctcaaccagctggtcaacgcagtcttcccagaatcttctgtgttccgcatcgaccactatttgggcaaggaaacagttcaaaacatcctggctctgcgttttgctaaccagctgtttgagccactgtggaactccaactacgttgaccacgtccagatcaccatggctgaagatattggcttgggtggacgtgctggttactacgacggcatcggcgcagcccgcgacgtcatccagaaccacctgatccagctcttggctctggttgccatggaagaaccaatttctttcgtgccagcgcagctgcaggcagaaaagatcaaggtgctctctgcgacaaagccgtgctacccattggataaaacctccgctcgtggtcagtacgctgccggttggcagggctctgagttagtcaagggacttcgcgaagaagatggcttcaaccctgagtccaccactgagacttttgcggcttgtaccttagagatcacgtctcgtcgctgggctggtgtgccgttctacctgcgcaccggtaagcgtcttggtcgccgtgttactgagattgccgtggtgtttaaagacgcaccacaccagcctttcgacggcgacatgactgtatcccttggccaaaacgccatcgtgattcgcgtgcagcctgatgaaggtgtgctcatccgcttcggttccaaggttccaggttctgccatggaagtccgtgacgtcaacatggacttctcctactcagaatccttcactgaagaatcacctgaagcatacgagcgcctcattttggatgcgctgttagatgaatccagcctcttccctaccaacgaggaagtggaactgagctggaagattctggatccaattcttgaagcatgggatgccgatggagaaccagaggattacccagcgggtacgtggggtccaaagagcgctgatgaaatgctttcccgcaacggtcacacctggcgcaggccataa

SEQ ID NO: 1989 - protein, 514 aa, Corynebacterium glutamicum ATCC 13032
MSTNTTPSSWTNPLRDPQDKRLPRIAGPSGMVIFGVTGDLARKKLLPAIYDLANRGLLPPGFSLVGYGRREWSKEDFEKYVRDAASAGARTEFRENVWERLAEGMEFVRGNFDDDAAFDNLAATLKRIDKTRGTAGNWAYYLSIPPDSFTAVCHQLERSGMAESTEEAWRRVIIEKPFGHNLESAHELNQLVNAVFPESSVFRIDHYLGKETVQNILALRFANQLFEPLWNSNYVDHVQITMAEDIGLGGRAGYYDGIGAARDVIQNHLIQLLALVAMEEPISFVPAQLQAEKIKVLSATKPCYPLDKTSARGQYAAGWQGSELVKGLREEDGFNPESTTETFAACTLEITSRRWAGVPFYLRTGKRLGRRVTEIAVVFKDAPHQPFDGDMTVSLGQNAIVIRVQPDEGVLIRFGSKVPGSAMEVRDVNMDFSYSESFTEESPEAYERLILDALLDESSLFPTNEEVELSWKILDPILEAWDADGEPEDYPAGTWGPKSADEMLSRNGHTWRRP

SEQ ID NO: 1990 - DNA, 1458 bp, Thermoanaerobacter tengcongensis MB4
  CDS (1)..(1458): transl_table=11
atgaaagataaagacctttcaaacgtgatggtcatattcggtggaacaggagatttaacccataaaaaattgatgccggccctttacaacttaagatatcaaaatatcctgcctgaaaattttgctgtagttgctatagggagaagagacaagactgaagaggaatatagaaatgagatgctggagtctgttaaaacttattctagatttgacattgacgaaaaaatctggcaagatttaagtagcaggatattctacaaaagatttgattttaactatgacaacggatatatggaacttagttactttttagatgaactggataggaaatacaatacacagggcaacagggtatattatcttgcagttgcaccggaatattttggcatcattgtggaaaagttatacagacacggaatggtaagtaatgaaacttcatggcagagagtagttatagaaaagccttttggagaaaatttagaatctgcccggaaactaaataaaatgataacagatgtctttacagaaagaaatacttatagaattgatcactatttaggaaaagagatgctacagaatataatggtcatcagatttgccaatgtgttttttgagccagtttggaacagaagatatatagacaatgtgcaaatttcttctaatgagacggtagggatagaaaatagaggaggatactacgagaaagcaggagctttgagggacatggttcaaaaccacatgatgcagcttctgaccttgacggcgatggaaccacctgtaaatttggatacagaatctataagggatgagaaggtgaaggttttaaaatccttagagattatgactcctgagcttgtagagaaaaatgtggtgagagggcagtatgtgggatataggcaggaggaaaaagtatctccaacttccaatacagagacttttgtggcattaaaagtgcacatagaaaatttcagatgggcaggagttcctttttacatcaggactggaaaaaggatgccggaaaaatccacacagattgtcatccaatttaagcctctgccaggtattttgtatttcaaagagtataaaaatttgcttcccaatttgcttgtaataaaaattcagccggaggaaggagtaaaacttcagtttaatgccaaagtgccgggagcaggagatataactatagagcctgtaaatatggatttttgtcagaactgccagatatccaataattctccagaggcatatgaaagacttctttttgatgtgatgagaggagattctactttatttactcgctgggatgaggtagaatattcttggaggtttgtagatgctattgctaaagcatgggcagaaaaaacacccgattttcctaattactatccagggacctggggtcctagtgaggcagaagagcttttgagaagagatggaagaatgtggtggaatgtatag

SEQ ID NO: 1991 - protein, 485 aa, Thermoanaerobacter tengcongensis MB4
MKDKDLSNVMVIFGGTGDLTHKKLMPALYNLRYQNILPENFAVVAIGRRDKTEEEYRNEMLESVKTYSRFDIDEKIWQDLSSRIFYKRFDFNYDNGYMELSYFLDELDRKYNTQGNRVYYLAVAPEYFGIIVEKLYRHGMVSNETSWQRVVIEKPFGENLESARKLNKMITDVFTERNTYRIDHYLGKEMLQNIMVIRFANVFFEPVWNRRYIDNVQISSNETVGIENRGGYYEKAGALRDMVQNHMMQLLTLTAMEPPVNLDTESIRDEKVKVLKSLEIMTPELVEKNVVRGQYVGYRQEEKVSPTSNTETFVALKVHIENFRWAGVPFYIRTGKRMPEKSTQIVIQFKPLPGILYFKEYKNLLPNLLVIKIQPEEGVKLQFNAKVPGAGDITIEPVNMDFCQNCQISNNSPEAYERLLFDVMRGDSTLFTRWDEVEYSWRFVDAIAKAWAEKTPDFPNYYPGTWGPSEAEELLRRDGRMWWNV

SEQ ID NO: 1992 - DNA, 1524 bp, Streptomyces coelicolor A3(2)
  CDS (1)..(1524): transl_table=11
ttgtcaagcagcaatccgctgcgtgaccccgcagaccgacggctcccgcgcatcgcggggccgtcgggtctggtcatcttcggcgtcaccggcgatctgtcccgcaagaagctcatgcccgccgtgtacgacctcgccaaccggggtctgctgccgccgggcttctcgctcgtcgggttcgcccgccgggactgggagcacgaggacttcgcccaggtcgtgcacgacgccgtcaaggagcactcccgcacgccgttccgcgaggaggtctggcagcagctcatccaggggatgcgcttcgtgcagggcaccttcgacgacgacgacgccttcgagcggctgcgcggcaccatcgaggagctggacaaggcacagggcacgggcggcaacttcgccttctacctgtcggtgccgccgaagtccttcccggtggtcatccagcagctcaagaagcacggactggccgaccagacgaacggctcctggcggcgggcggtgatcgagaagcccttcggccacgacctgaagtcggccgaggagctgaacgccatcgtccacgaggtcttcggctccgaccaggtcttccgcatcgaccactacctgggcaaggagaccgtccagaacatcctggcgctgcgcttcgccaacacgatgttcgagccgatctggaaccggtcctacgtcgaccacatccagatcaccatggccgaggacatcggcatcggcggccgggccggctactacgacgggatcggcgcggcgcgtgacgtcatccagaaccacctgctccagctgctcgcgctgaccgcgatggaggagcccgcctccttcgacgcggacgcgctggcggcggagaagaccaaggtgctcggcgcggtccgcctccccaaggacctgggccgggacaccgtgcgcggccagtacgcggcggggtggcagggcggcgccaaggccgtcggttacctcgaagaggacggcatcgaccccaagtcgaagaccgacacctacgccgcgatcaaggtgggcatcgacaaccgccgctgggcgggtgtccccttctacctgcgcaccggcaagcggctgggccgccgggtcacggagatcgcggtcgtcttccagcgggccccgcactcccccttcgacacgacggccaccgaggaactcggctcgaacgcgatcgtcatccgcgtccagcccgacgagggcgtcaccgtccgcttcggttccaaggtgccgggcacgtcgatggagatccgggacgtgtcgatggacttcgcctacggcgagtccttcaccgagtccagcccggaggcgtacgagcgcctgatcctggacgtcctgctcggcgacgccaacctcttcccgcgcaccgaggaggtcgagctgtcctggaagatcctcgacccgatcgaggagtactgggacgagcacggcaccccggcccagtacccggccggcacctgggggcccgtcgaggcggacgacatgctggaacgagacggacggagctggcgccggccatga

SEQ ID NO: 1993 - protein, 507 aa, Streptomyces coelicolor A3(2)
MSSSNPLRDPADRRLPRIAGPSGLVIFGVTGDLSRKKLMPAVYDLANRGLLPPGFSLVGFARRDWEHEDFAQVVHDAVKEHSRTPFREEVWQQLIQGMRFVQGTFDDDDAFERLRGTIEELDKAQGTGGNFAFYLSVPPKSFPVVIQQLKKHGLADQTNGSWRRAVIEKPFGHDLKSAEELNAIVHEVFGSDQVFRIDHYLGKETVQNILALRFANTMFEPIWNRSYVDHIQITMAEDIGIGGRAGYYDGIGAARDVIQNHLLQLLALTAMEEPASFDADALAAEKTKVLGAVRLPKDLGRDTVRGQYAAGWQGGAKAVGYLEEDGIDPKSKTDTYAAIKVGIDNRRWAGVPFYLRTGKRLGRRVTEIAVVFQRAPHSPFDTTATEELGSNAIVIRVQPDEGVTVRFGSKVPGTSMEIRDVSMDFAYGESFTESSPEAYERLILDVLLGDANLFPRTEEVELSWKILDPIEEYWDEHGTPAQYPAGTWGPVEADDMLERDGRSWRRP

SEQ ID NO: 1994 - DNA, 1779 bp, Streptomyces coelicolor A3(2)
  CDS (1)..(1779): transl_table=11
atgagcgaggagcttcccgctggggcgccccaggagaccaaggcgacgaaggaagccaaggagacccggacggcccaggaggcggcggggccgctgcacgcggaggaggccgaggaggcccgcgccgccgaggcggcgaaggcgtccggccgggcgaaggctccccgcggcgcgaagaagtccgcgacgaaccgcgccgccaaggaggcgaagggcaagggcgcggccggggagggcgtcgagccggtggcaccgctcgactggagcaacccgctgcgcgatccccaggaccgccgtctcccccgcatcgcgggcccgtccgggctggtcatcttcggcgtcaccggcgacctgtcccgcaagaagctgatgcccgccgtgtacgacctggccaaccgcggcctgctgccgcccggcttctcgctggtcggcttcgcccgccgggactgggaggaccaggacttcgccgaggtcgtgcacgacgccgtcagggagcacgcgcgcacgccgttccgcgaggaggtctggcagcagctctccgagggcatgcgcttcatccccggcgacttcgacgacgacaacgcgttcgaacagctgcgcaaggccgtcgaggagctggacgcgtcccgcggcaccagcggcaactacgccttctacctctccgtgccgccgaagttcttcccgaaggtcgtccagcagctcaagaagcacgggctgaccgacgcgcccgcgggctcctggcgccgtgcggtgatcgagaagccgttcggccacgacctggacagcgcccgcgacctgaacgcgctggtgcacgaggtgttcgacccggagcaggtcttccgcatcgaccactacctgggcaaggagacggtccagaacatcctggcgctgcgcttcgccaaccagatgtacgagccgatctggaaccggtcctacgtggaccacgtgcagatcacgatggccgaggacatcggcatcggcggccgggccggctactacgacggcatcggcgccgcccgcgacgtcatccagaaccacctgctccagctgatggcgctgaccgccatggaggagccggccgccttcgacgcgcggtcgctgctcaccgagaagctgaaggtgctgcgggcggtgcggctgcccgacgacctgggcgagcacaccgtgcgcgggcagtacgcgggcggctggcagggcggcgcgcaggtgcccggctacctggaggaggagggcatcgacccggcctccaccaccgacacctacgcggcgatcaagctcggcatcgacaaccgccgctgggccggggtgcccttctacctgcgcaccggcaagcgcctgggccgccgggtcaccgagatcgcggtcgtcttccagcgggccccgcactcccccttcgactccacggcgacggaggagctgggcgagaacgccatcgtcatccgcgtccagcccgacgagggcatgacggtgcgcttcggctccaaggtgccgggcacgtcgatggagatccgggacgtgtcgatggacttcgcgtacggcgagtccttcaccgagtccagcccggaggcgtacgaacggctgatcctggacgtccttctgggtgacgccaacctgttcccgcgccaccaggaggtggaagagtcctggcggatcctcgacccgatcgaggagtactgggcctcgcacgacaagcccgcgcagtacgcgtcgggcggctggggaccgcgggaagcggacgagatgctcgcacgagacggacggagctggcgcaggccatga

SEQ ID NO: 1995 - protein, 592 aa, Streptomyces coelicolor A3(2)
MSEELPAGAPQETKATKEAKETRTAQEAAGPLHAEEAEEARAAEAAKASGRAKAPRGAKKSATNRAAKEAKGKGAAGEGVEPVAPLDWSNPLRDPQDRRLPRIAGPSGLVIFGVTGDLSRKKLMPAVYDLANRGLLPPGFSLVGFARRDWEDQDFAEVVHDAVREHARTPFREEVWQQLSEGMRFIPGDFDDDNAFEQLRKAVEELDASRGTSGNYAFYLSVPPKFFPKVVQQLKKHGLTDAPAGSWRRAVIEKPFGHDLDSARDLNALVHEVFDPEQVFRIDHYLGKETVQNILALRFANQMYEPIWNRSYVDHVQITMAEDIGIGGRAGYYDGIGAARDVIQNHLLQLMALTAMEEPAAFDARSLLTEKLKVLRAVRLPDDLGEHTVRGQYAGGWQGGAQVPGYLEEEGIDPASTTDTYAAIKLGIDNRRWAGVPFYLRTGKRLGRRVTEIAVVFQRAPHSPFDSTATEELGENAIVIRVQPDEGMTVRFGSKVPGTSMEIRDVSMDFAYGESFTESSPEAYERLILDVLLGDANLFPRHQEVEESWRILDPIEEYWASHDKPAQYASGGWGPREADEMLARDGRSWRRP

SEQ ID NO: 1996 - DNA, 1431 bp, Xanthomonas campestris pv. campestris str. ATCC 33913
  CDS (1)..(1431): transl_table=11
atgcacaacaccctgatcctgttcggcgccaccggcgatctcgcccagcgctatctctttccatccctgctgcgcctgtttgtcgacggcctgttgccggaggacttccgcatccgtgcgttggccctgtcgcagcacgacaccgacgccttccgcgaggtactgcgcccgcgcctggcccaggcgctgccgattgccaccgccgcgcagatcgatgcgctgctgcagcgcatcgactaccgctcggcggacctgcgcaatgccgaatcggtggccgaggccgtgcgcgaactggccagccgccagtgcgtaagctatctggcgattccaccgggcctgtacatcagtacctgccagggcctggccctgggcggcgcgctggctgcaccgcaccggttgatgctggaaaaaccgatcggccacgattcggacagcgcccgcgagatcctgcagtcgatcggcgcactgatcgacgaagaccgcgtgttccgtctcgaccactacctgggcaaggccgcggtgcagaacctggtggcgctgcgcttcggcaacaccttgctggaagcggtgtggaaccggacctacatcgaatcggtacagatcctggtggccgagagcgaaggcgtggacggccgcgatgcctactacgcccgctccggcgcgctgcgcgacatggtgcagagccatatcctgcagttgctgtgcctggtggccatggagccgccggcctcgctggaagccgaccgcatccgcgacgagaaggtcaaggtgctgcgcgccttgcgcccgatgaccgccgagcacgccgcgcaagacagcgtgcgtggccgctacaccgccggcagcatcaacggcgagccggcgcaggcctaccacccgccggaaggcagcgatgtggaaaccttcgtcgcggtcaccgcgcacatcgacaactggcgctgggctggcgtgccgttccacctgtgcaccggcaagcgcctggctgagcgctccacgcgcatcgtggtcacgctcaagccggtgacgcattggttgttcgagcgtccggaccgccagaacgcggtgcccaaccgcctgaccttccagctgcagccgctggaaaacatcgagctgggcctgatgagcagcctggccggcccggaatggggtgcgatcgaactgcagccgctggaactggagctgtccgtgcccaccggcctgcaccgccgtatcgcgtatgaacgcttgttcgtggatgccttcaacggcaacccggcgctgttcgtgcgcgatgacgaggtcaaggccgcctgggcctggatcgacagcgtcagcgatgcctggtcggacgcacagctgccgctgcagccgtatccggccggtagctggggccccgagaccgccgcaccgttcctgcccccggccaccgacgcacagggaaacaacgcatga

SEQ ID NO: 1997 - protein, 476 aa, Xanthomonas campestris pv. campestris str. ATCC 33913
MHNTLILFGATGDLAQRYLFPSLLRLFVDGLLPEDFRIRALALSQHDTDAFREVLRPRLAQALPIATAAQIDALLQRIDYRSADLRNAESVAEAVRELASRQCVSYLAIPPGLYISTCQGLALGGALAAPHRLMLEKPIGHDSDSAREILQSIGALIDEDRVFRLDHYLGKAAVQNLVALRFGNTLLEAVWNRTYIESVQILVAESEGVDGRDAYYARSGALRDMVQSHILQLLCLVAMEPPASLEADRIRDEKVKVLRALRPMTAEHAAQDSVRGRYTAGSINGEPAQAYHPPEGSDVETFVAVTAHIDNWRWAGVPFHLCTGKRLAERSTRIVVTLKPVTHWLFERPDRQNAVPNRLTFQLQPLENIELGLMSSLAGPEWGAIELQPLELELSVPTGLHRRIAYERLFVDAFNGNPALFVRDDEVKAAWAWIDSVSDAWSDAQLPLQPYPAGSWGPETAAPFLPPATDAQGNNA

SEQ ID NO: 1998 - DNA, 1923 bp, Xanthomonas campestris pv. campestris str. ATCC 33913
  CDS (1)..(1923): transl_table=11
gtgcaacgacgtgggcctgctcgccgaagagtacgacccgcgcagcaaacgcatgcttggcaacttcccgcaagggtattcccacgtggccctggtcaatgcggcattgcgcctgcatggacgcatgggcgagaaggagacgcatccatgagtgagcaagtgaccaccccgccgtgcatcatcgtggtgttcggtgcgcgcggtgacctgacccggcgcctggtgatgccggcgctgtacaacctgcgccgcgccggtgcacttggcgaggaattcgccattgtcggcatggaccacggcgacatcaccgagcgtgcctggcgcaccaacatgggcaaggcgatgaccgagctgctgagcagccgcgatgccgagttccaggccgatggattcgataccgacacctgggactggttgcgcgagcgcatgcattacgtgcgcggcgacttcaccgacctgcgtgcctatcagtcgctggacggcgtgctggaaaaactgcacaagcgctatggcacccgcggtaatgtgctgttctatctggccaccgccgcgcgcttcttcgagccggtgctgctgaatctgggcgaggccgggctggtcaagcagcgcgagggcgccggctggcgccgggtgatcgtggaaaagccgttcggccacgacctgcccagcgccaagcatctcaatgccacggttgcgcgcgtgctgcacgaagaccaggtgttccgcatcgaccatttcctgggcaaggaaaccgtgcagaacatcctggcgttccgcttcgccaatggcctgttcgagccggtgtggaaccgcgaccggatcgaccacgtgcagatcactgccgccgaaaccatcggtgtggaagggcgcgggcgtttctacgatcccaccggctgcctgcgcgacatggtgcccaaccatctgttccagctgctggcgatgattgcgatggagccgccggccgcgttcaccaccgaggcgatgcatcgccgccgcgccgaagtgatcgaagcggtgcgcccgatcaaacctgaagacgtggtgcgtgggcagtacgcgtccggtgcggtcaatcgcagcgccgtgccgggataccgcgaagaagacacggtaccggacgagtcggaaaccgaaaccttcgtggcgatgaagttgcaggtcgacacctggcgctgggccggcgtgccgttctatctgcgcaccggcaagcgcctgcgcgaacgcaccaccgagattgcgatccgcttcaagcctgcaccgttggcgccattccgcagcaccgaagtgggcggctacggccccgactggctggtgctgcatatccagcccgacgaaggcatctcgctgcagttcgacgtcaagcgcccgggcgcgcaagtggcgttggcgccggtgcggatggacttccgctaccgcgactggttcccgaaggaatacaccgttggctacgagcgcttgctgcaggactgcatgaatggcgaggccggtctgttccaggatgcagcgatggtggaaggcgcgtggcgcatcgtgcagccgatcctggatgcgtggaagcaaccgcccagtgactttcccaattacgcggctggcagtgccggcccgtcggcggccgatgcgttgctggcgatgaacggcgggcacgcctggcgtgcgctcactccgggccgcaaaccgccgccgcgtcgcccgcctgaagcgcgtgcgggtgcggcggcaccggcgaagaagagcgccaagaaggcggtcaaaaaggctgcgaaaaaagtcgccaaggcgcctgccaagcgcagcgctgcggttgccgggaaatctgcagcggcggcgtcgccgagcaaggcggcaagcaaggcggtcaccaagcgcgccaccaaaaaggcgacgaagccggcaaccaaagtcgtcaagaagagcgcttcgtag

SEQ ID NO: 1999 - protein, 640 aa, Xanthomonas campestris pv. campestris str. ATCC 33913
MQRRGPARRRVRPAQQTHAWQLPARVFPRGPGQCGIAPAWTHGREGDASMSEQVTTPPCIIVVFGARGDLTRRLVMPALYNLRRAGALGEEFAIVGMDHGDITERAWRTNMGKAMTELLSSRDAEFQADGFDTDTWDWLRERMHYVRGDFTDLRAYQSLDGVLEKLHKRYGTRGNVLFYLATAARFFEPVLLNLGEAGLVKQREGAGWRRVIVEKPFGHDLPSAKHLNATVARVLHEDQVFRIDHFLGKETVQNILAFRFANGLFEPVWNRDRIDHVQITAAETIGVEGRGRFYDPTGCLRDMVPNHLFQLLAMIAMEPPAAFTTEAMHRRRAEVIEAVRPIKPEDVVRGQYASGAVNRSAVPGYREEDTVPDESETETFVAMKLQVDTWRWAGVPFYLRTGKRLRERTTEIAIRFKPAPLAPFRSTEVGGYGPDWLVLHIQPDEGISLQFDVKRPGAQVALAPVRMDFRYRDWFPKEYTVGYERLLQDCMNGEAGLFQDAAMVEGAWRIVQPILDAWKQPPSDFPNYAAGSAGPSAADALLAMNGGHAWRALTPGRKPPPRRPPEARAGAAAPAKKSAKKAVKKAAKKVAKAPAKRSAAVAGKSAAAASPSKAASKAVTKRATKKATKPATKVVKKSAS

SEQ ID NO: 2000 - DNA, 1431 bp, Xanthomonas axonopodis pv. citri str. 306
  CDS (1)..(1431): transl_table=11
atgcacaacaccctgatcctgttcggcgccaccggcgatcttgcccagcgctatctctttccttccctgctgcgtctgttcatcgacggtctgttgccggaggacttccgcatccgtgcgctggcgctgtcgccgcacgacaccgatgcatttcgcgacgtgctgcggccgcgcctgaccgaagcgctgccgatcgcgaccgccgaacagatcgacacgctgctacaacgggtcgactatcgctcggtggatctgcgcaatgccgattcggtggccgacgcggtccgcgaactggccagccgtcggtgtgtgagctatctggcgatcccgccgggcctgtacatcagcacctgccagggcctggcgctgggtggcgccctggcggcaccgcatcgcttgatgctggaaaaaccgatcggccacgactcggacagcgcccgcgacatcctgcagtcgatcggcgcgctgatcgacgaagaccgcgtgttccgcctggaccattacttgggcaaggcagcggtgcagaacctgatcgcgctgcgcttcggcaacacgctgctggaggcggtctggaaccggacctacatcgagtcggtgcagatcctggtcgccgaaagcgaaggcgtcgacgggcgcgatgcctactacgcccgctccggcgccctgcgcgacatggtgcagagccatatcctgcagctgttgtgcctggtggcaatggagccgccggcctcgctggaagccgaccgcatccgcgatgagaaggtcaaggtgctgcgcgccctgcgcccgatgaccgccgagcacgccgcgcacgactgcgtgcgcggccgctacaccgccggcagcatcaacggccagccggcgcaggcctaccacccgccggaaggcagcgacgtggaaacctttgtcgccgtcaccgcgcatatcgataactggcgctgggccggcgtgccgttccacctgtgcaccggcaagcgtctggccgagcgctccacccgcatcgtggtgacgctcaagccggtgacgcactggctgttcgaacgccccgaccgccagaacgcggtgccgaaccgcctgaccttccagttgcagccgcaggaaaacatcgagctcggcctgatgagcagcctggctggcccggaatggggtgcgatcgaactgcagccgctggaactggaactgtcggtgccgaccggcctgcaccgtcgtatcgcctacgaacgtctgttcgtcgacgccttcaacggtaaccccgcgctgttcgtgcgcgacgacgaggtcaaggcggcgtggtcgtggatcgacagcgtgagcgacgcctggaaagacgccgcgctgccgctgcagccctacccggccggcagctggggtcccgaatcggccgcccacttcctgcccccggccaccgacgcacagggaaacaacgcatga

SEQ ID NO: 2001 - protein, 476 aa, Xanthomonas axonopodis pv. citri str. 306
MHNTLILFGATGDLAQRYLFPSLLRLFIDGLLPEDFRIRALALSPHDTDAFRDVLRPRLTEALPIATAEQIDTLLQRVDYRSVDLRNADSVADAVRELASRRCVSYLAIPPGLYISTCQGLALGGALAAPHRLMLEKPIGHDSDSARDILQSIGALIDEDRVFRLDHYLGKAAVQNLIALRFGNTLLEAVWNRTYIESVQILVAESEGVDGRDAYYARSGALRDMVQSHILQLLCLVAMEPPASLEADRIRDEKVKVLRALRPMTAEHAAHDCVRGRYTAGSINGQPAQAYHPPEGSDVETFVAVTAHIDNWRWAGVPFHLCTGKRLAERSTRIVVTLKPVTHWLFERPDRQNAVPNRLTFQLQPQENIELGLMSSLAGPEWGAIELQPLELELSVPTGLHRRIAYERLFVDAFNGNPALFVRDDEVKAAWSWIDSVSDAWKDAALPLQPYPAGSWGPESAAHFLPPATDAQGNNA

SEQ ID NO: 2002 - DNA, 1839 bp, Xanthomonas axonopodis pv. citri str. 306
  CDS (1)..(1839): transl_table=11
atgagtgagcaagcaaccacaccgccgtgcatcatcgtggtgttcggcgcacgcggcgatctgaccaagcgcctggtcatgccggcgctgtacaacctgcgccgttccggtgcgctgggcgatgatttcgccattgtcggcatggaccatggcgacatcagcgagcgcgcctggcggaccaacatggggcagtcgatgacgcagctgctcagcagccgcgatgccgaattccagaccgacgaattcgacaccgccacctgggactggctgcgcgaacgcatgcattacctgcgcggcgacttcaccgatcagggagcctatcgatcgctgggcggcgtgctggacaagctgcacaagcgctacggcacgcagggcaatgtgctgttctatctggccaccgccgcgcgcttcttcgagccggtattgctcaacctgggcgaggctggcctggtcaagcagcgcgaaggcgaaggctggcgccgggtcatcgtggaaaaacccttcggctacgatctgcccagcgcccagcacctcaatgccacggtcgccaaggtgctgcacgaggatcaggtgttccgcatcgatcatttcctgggcaaggaaaccgtgcagaacattctcgcgttccgcttcgccaatggcttgttcgaaccggtgtggaaccgcgaccgcatcgaccatgtgcagatcaccgcggccgaaaccatcggagtggaagggcgcggacggttctacgaccccaccggctgcctgcgcgacatggtgccgaaccatctgttccagctgctggcgatgattgcgatggagccgccagcggccttcaccaccgaggcgatgcatcgccgtcgcgccgaagtgatcgaagcggtgcgcccgatcaaacccgaagacgtggtgcgcgggcaatacgcctccggtgcggtcaatcgcaatgcggtgccgggttatcgcgaagaagacaccgtgcccgacgattcggacaccgaaacctatgtggcgatgaagctacaggtggacacctggcgctgggccggcgtgccgttctacctgcgcaccggtaagcgcctgcgcgaacgcacgaccgagatcgccattcgcttcaagccggcaccgctggcgcccttccgcagtaccgaggtgggcggctacggccccgactggctggtgctgcatatccagccggacgagggcatctcgctgcagttcgacgtcaagcgtccgggcgcgcaggtggcactggcaccggtgcgcatggacttccgttaccgcgactggttccccaaggaatacacggtgggctacgagcgcctgctgcaggactgcatgaacggcgaagccggcttgttccaggatgcggccatggtggaaggcgcatggcgcatcgtgcaaccgatcctggatgcatggaaacaacccccaagcgacttccccaattacgccgccggcagcgccggcccttcggctgccgatgcactactggcaatgaatggcggacacgcctggcgcgcactcaccccagggcgcaagccgccaccgcgccggccgccggaagcgcgtgctggcgctgccgcgccgattaagaaaaccaccggcaaatctgccaagaaggccgccaaggcgccggccgagaaggtcaccaaggcgccagccagacgcgcatctgcggcttcagcaagaccatcgcaggatgcggctacgtcgcctagcagcgcggccaggaaggccgtgagcaaacgcgtaaccggcaaggtcgcaaaggccgccggcaaaaccgcggcaggcaagggcgcagcgaagaagtcggccagcaagaccgtggcgcgcacgccacgccgctga

SEQ ID NO: 2003 - protein, 612 aa, Xanthomonas axonopodis pv. citri str. 306
MSEQATTPPCIIVVFGARGDLTKRLVMPALYNLRRSGALGDDFAIVGMDHGDISERAWRTNMGQSMTQLLSSRDAEFQTDEFDTATWDWLRERMHYLRGDFTDQGAYRSLGGVLDKLHKRYGTQGNVLFYLATAARFFEPVLLNLGEAGLVKQREGEGWRRVIVEKPFGYDLPSAQHLNATVAKVLHEDQVFRIDHFLGKETVQNILAFRFANGLFEPVWNRDRIDHVQITAAETIGVEGRGRFYDPTGCLRDMVPNHLFQLLAMIAMEPPAAFTTEAMHRRRAEVIEAVRPIKPEDVVRGQYASGAVNRNAVPGYREEDTVPDDSDTETYVAMKLQVDTWRWAGVPFYLRTGKRLRERTTEIAIRFKPAPLAPFRSTEVGGYGPDWLVLHIQPDEGISLQFDVKRPGAQVALAPVRMDFRYRDWFPKEYTVGYERLLQDCMNGEAGLFQDAAMVEGAWRIVQPILDAWKQPPSDFPNYAAGSAGPSAADALLAMNGGHAWRALTPGRKPPPRRPPEARAGAAAPIKKTTGKSAKKAAKAPAEKVTKAPARRASAASARPSQDAATSPSSAARKAVSKRVTGKVAKAAGKTAAGKGAAKKSASKTVARTPRR

SEQ ID NO: 2004 - DNA, 1719 bp, Drosophila melanogaster
  CDS (1)..(1719)
atgcaatatctatcactaatcttttttaaattacaactatttattcttggccaaaatttgacgttaccttgctttcttttattctctcaaaattatacttcaattaaattacccgaaatgatttccatggacccccacaatgaggaggcgtattccatcgtggtcttcggagcctcaggcggattggccaaaaagaaggtgtttccggcgctttgggctctcttccgggagaatcggctgccccagggcaccaaaatatttactttcacccggtccccgctgcagacgaagacgtaccggttgcagattcttccctatatggagctggacaagcatcgggaccccaagaagtacaacctcttttggacgaccgtgcactgtgtgcagggcgagtacgacaagccggagaactacgtggcactcacggaggcgatggtacaccaggagacaaagcacaatcaggtgcgcgcgaatcgaatcttctacctggcgctgccaccgatcgttttcgatcaggtgaccctcaatgtcagtcgaaaatgcagctcgaccacgggatggaaccgcataatagtggagaagcccttcgcgcgggacgacatctcctacaaggcctttcaaacctcgctgtgcaactgcttccgggagtcgcagatttacctgatggaccacctcctcagccggcaggtgatgcagaacttctttgcgctgcgctactcaaaccacttgtgggccgagaccctgaaccaccgccacgtggcggcggtgatgatatccataaagtgtgagctgccggtgtcggtgaatcgggcagactactttaatcagtttggcattattcgcgacctgatgaccaaccacatgatccagatgctggccatgctggctatggatcagccgtacgccaacactgctgacgacctgcgtgccgaacggctgaaggttcttcgccaggtgctaactcccaacataggcgacgtcgtcttggctcaataccgcaacaaccggcgggagactgaccccgcgaagtgcggctacacggagcacacctacatcccgaaggactcctttacgcccacattcgctctggtggtgctgcacatcaacaaccgccgttggaccggggtacccttcattctcagagcgggaaaagccttgaacgacaccaagtcggaggtgcgtatccagtacaagccggtggactgcgacaccttccacagcgacagtactgacattcgtaacgagctagtcctgagatccttccccacggaagaggtctttatgcgcatgcgcctcaagcggcagggcgaggatatctgccttcgggagagcgagatcaacctgcgagtggatgatcggggaccgaagggactccaaggactgcccggctacctgctcaacgtgtttcaaggcgaccagacgctcttcatgcgctccgatgagcagtgcgagatttggcgcatattctcccccgttctcgccaccatcgattcggatcgtccccgcccgttgcactatgactttggatcacggggtcctttgctggcctatcgcaaggccgagcgcgctggcttcgtattcttcgccacggacgagtggcatcagagcgaagagacgttagaatacacggtcaagaatagcaagcagctaatcggaccccataccgccctcaagccagtaagagatcctcggtccaagaggtcgaattccaatccttag

SEQ ID NO: 2005 - protein, 572 aa, Drosophila melanogaster
MQYLSLIFFKLQLFILGQNLTLPCFLLFSQNYTSIKLPEMISMDPHNEEAYSIVVFGASGGLAKKKVFPALWALFRENRLPQGTKIFTFTRSPLQTKTYRLQILPYMELDKHRDPKKYNLFWTTVHCVQGEYDKPENYVALTEAMVHQETKHNQVRANRIFYLALPPIVFDQVTLNVSRKCSSTTGWNRIIVEKPFARDDISYKAFQTSLCNCFRESQIYLMDHLLSRQVMQNFFALRYSNHLWAETLNHRHVAAVMISIKCELPVSVNRADYFNQFGIIRDLMTNHMIQMLAMLAMDQPYANTADDLRAERLKVLRQVLTPNIGDVVLAQYRNNRRETDPAKCGYTEHTYIPKDSFTPTFALVVLHINNRRWTGVPFILRAGKALNDTKSEVRIQYKPVDCDTFHSDSTDIRNELVLRSFPTEEVFMRMRLKRQGEDICLRESEINLRVDDRGPKGLQGLPGYLLNVFQGDQTLFMRSDEQCEIWRIFSPVLATIDSDRPRPLHYDFGSRGPLLAYRKAERAGFVFFATDEWHQSEETLEYTVKNSKQLIGPHTALKPVRDPRSKRSNSNP

SEQ ID NO: 2006 - DNA, 1440 bp, Chlorobium tepidum TLS
  CDS (1)..(1440): transl_table=11
atgagcggcactctcgacaacttcaccatcgtcatcttcggcgcgagcagcgacctggcttcgcgcaagctttttccgtcgattttccagctcgcgcggtgggggcacatgcctgagagcttccggctgattggcgtcgggcggcaggagcaaagccacgaggagttccgcgcgttcgtccgcagtcgcctgctggagcactcgcccgaagccgccggtgacgccgcgcggctcgacgccttctgcctccgcctcttttatgcccgcgtcgatctggacgatccggcgagctacgaagtgctgcgcgacgagatcatgcgcgaggaaaaagtgggagggagcacttgccgcaacctgatgttctatctgtcgataccgccgagccttgcgcctgccgtggtgcgcaatctcggcaaggccgggctgggtggacgtgaacagtcgtgcaccgggtggcgcaagctcatcgccgaaaagccctacggccacgatctcgaaagcgcccgcgagctgaaccgcgttatcaacgaggtgttcgaggagaaccaggtctatcgcatcgaccactacctcggcaaggagccggtgcagaacatcatggtgttccgcttctcgaacggtattttcgagccgctctggaaccggcagtatatcgcgcaggtgcagatcaccatcgccgaggatttcggcatccgggatcgcggcgcgtactacgaggagtcgggacttttgcgtgacatcatccagaaccacggcttgcagttgctcacggccatcgcgatggagccgccggtcgatctcagcgccgattcgatccgcgacgagaaagcgaaagttctgcgttcggtgcggcacttcactcctgattcggttcgggagtcggtggtgatcggccaatacgaggggtaccgcaacgagaaaaatgtcgcgccggactcgaaagtcgagaccttcgctgccgtgaagtttcacgtggataactggcgttggtcgggtgtgccgttctacatgaaagcgggcaagaatctcgccaagcgcgtgaccgaaatcgtcatcaccttccgctgcccgccgcagaattattacggcccatccggcggggcggcgtgctgtacgccgaaccaggtggtactcggcatccagcccgacgaaacggttgccatccgctttggcgccaagcgccccggcgagcagatgattaccgatccggtgttcatgaagttcgactaccgcgatacttttcagggcgaaggtcttacgccgtaccaccgcctcctgctcgatgccatcgagggcaaccagatgaacttcatccgcaaagacagcgtggagtactcgtgggaaattatcgacagcctgaaaaattcaatcgacggccaggttccggagcaatatccagttcatagctgggggccggaatcgtcgaggatttacgggtga

SEQ ID NO: 2007 - protein, 479 aa, Chlorobium tepidum TLS
MSGTLDNFTIVIFGASSDLASRKLFPSIFQLARWGHMPESFRLIGVGRQEQSHEEFRAFVRSRLLEHSPEAAGDAARLDAFCLRLFYARVDLDDPASYEVLRDEIMREEKVGGSTCRNLMFYLSIPPSLAPAVVRNLGKAGLGGREQSCTGWRKLIAEKPYGHDLESARELNRVINEVFEENQVYRIDHYLGKEPVQNIMVFRFSNGIFEPLWNRQYIAQVQITIAEDFGIRDRGAYYEESGLLRDIIQNHGLQLLTAIAMEPPVDLSADSIRDEKAKVLRSVRHFTPDSVRESVVIGQYEGYRNEKNVAPDSKVETFAAVKFHVDNWRWSGVPFYMKAGKNLAKRVTEIVITFRCPPQNYYGPSGGAACCTPNQVVLGIQPDETVAIRFGAKRPGEQMITDPVFMKFDYRDTFQGEGLTPYHRLLLDAIEGNQMNFIRKDSVEYSWEIIDSLKNSIDGQVPEQYPVHSWGPESSRIYG

SEQ ID NO: 2008 - DNA, 1530 bp, Thermosynechococcus elongatus BP-1
  CDS (1)..(1530): transl_table=11
atggtaaccctatttgaaaatcccctgcgggttggactacgccaagagcgaaccccagagccgctgattttagtcatttttggtgccagtggcgaccttactcagcgcaagctgattccctcgatttatcaactgagactcgaacgccgtctgccccccgaactgaccattgttggcgtggcgcggcgcaactggagtcatgactattttcgcaagcacctccgtcaaggggtcgaggagtttggtggcggcattcaggcggaacccctgtggcaggaatttgcccaaggtttgttttattgctctggcaatatcgatgatcccgccgcctacacccagctgaaaacactgctagctgagctagatgaaaaacgccaaactcgcagcaatcgcgtcttttaccttgcggtctcaccgagctttttcgttgaggccattcagcaactgggggcagcggggctattgagtgatccccaaaaacatcgtcttgtgattgaaaagccctttggccgtgatctcacctctgcccaagccctcaatgaggtggtgcagtcggtgtgcaaggaggagcaagtttaccgcattgaccactacctcggtaaagagacggtgcaaaacctgatggtgtttcgctttgccaatgccatttttgaacccctctggaaccgccagtacgtggatcatgtgcagattactgttgctgaaaccgtcggggtggaagatcgcgcgggctactatgaaactgcgggtgccctgcgggacatggtgcaaaaccacattctccagttgctggctctgaccgcgatggaaccccccaatgccctcgatgccgatagtctgcgtagcgaaaaggtgaaagtcctccaagctacccgtttagcggatcttgataatctcgatgcctgtgctgtccgcggccaataccgagccggctggatgaagggcaaacctgttgtgggctatcgtcaggagccgggggtgagtcctacctccaccactcccacctatgcggccctaaaactagggattgataactggcggtggcagggggtgcccttctatgtgcgcacgggtaaacgcttggcaaaaaaggtcacagaaatctcaattcagtttcgtggggtgcctttactgattttccagtcggccgcccgccaaaccaatcccaatatcctgacgatgcgcattcaacccaatgaagggattgctctgcgctttgaggcaaaaatgccgggtgcagatctgcgcacacgcacggtggaaatggactttagctacggctcctcctttggaatggccacagcggatgcctatgcgcggttattactggactgcatgttgggggaccaaaccctgtttacgcgcgcagatgaggtagaggcggcttggcgggtggtgatgccggttttaacggcttgggacgcccccacagatccagaggccatacccacctatgacgcggggacttgggggcccgatgcggcagaagtgatgattaatgccgatggccggcgctggcggcgactttga

SEQ ID NO: 2009 - protein, 509 aa, Thermosynechococcus elongatus BP-1
MVTLFENPLRVGLRQERTPEPLILVIFGASGDLTQRKLIPSIYQLRLERRLPPELTIVGVARRNWSHDYFRKHLRQGVEEFGGGIQAEPLWQEFAQGLFYCSGNIDDPAAYTQLKTLLAELDEKRQTRSNRVFYLAVSPSFFVEAIQQLGAAGLLSDPQKHRLVIEKPFGRDLTSAQALNEVVQSVCKEEQVYRIDHYLGKETVQNLMVFRFANAIFEPLWNRQYVDHVQITVAETVGVEDRAGYYETAGALRDMVQNHILQLLALTAMEPPNALDADSLRSEKVKVLQATRLADLDNLDACAVRGQYRAGWMKGKPVVGYRQEPGVSPTSTTPTYAALKLGIDNWRWQGVPFYVRTGKRLAKKVTEISIQFRGVPLLIFQSAARQTNPNILTMRIQPNEGIALRFEAKMPGADLRTRTVEMDFSYGSSFGMATADAYARLLLDCMLGDQTLFTRADEVEAAWRVVMPVLTAWDAPTDPEAIPTYDAGTWGPDAAEVMINADGRRWRRL

SEQ ID NO: 2010 - DNA, 1476 bp, Oceanobacillus iheyensis HTE831
  CDS (1)..(1476): transl_table=11
atggaacaaactatacagccaagagccgttattgtaatcttcggagcaactggagatttagcaaagcgtaaattattcccttccatttatcgtttgtaccgaagcggaaaattagatgagcattttgcagtaattggtttagcacgtcgtccttggacagatgaagtacttagagaaaatgtggaaaattccatacaagatgctctttctccggatgaggatttatccgaatttatttcccatttctattataaatcttttgatgtgacggaaaaagaatcgtatcaaggacttaatgaaatcattcaaaaccttgaaggtcaataccaaacagaaggaaatagactattttatctggcaatggctccagatttctttggtgctattgcaaatcaactcaatgattatggattaaagaacacgagtggttggactagacttgtgatcgaaaaaccatttggacatgatttaccttctgctaaaaagttaaaccatgaattacaagccgcatttcgtgaagatcaaatttatcgtatcgaccactatctaggtaaagagatggtgcaaaatattgaagtaatccgttttgccaacggtatttttgaacatttgtggaataatcgctttatctcaaacatccaaattacgagtagcgaaacgcttggagtagaggaacgagcacgttattatgacacttctggtgctacgcgggatatggttcaaaatcatatgttacaaatggttgctctactggcgatggaacctccgattagtttaacaacagaggaagtacgctctgaaaaaattaaagtattgcgtgccttaagaatgatggagacaaatgaaatagatgattatttcattcgcggtcaatacggtgctggtacagttaaaggtaattctgttattggttatcaagacgaagatgaacaactagaaaattctcgtactgaaacatttgtagctggaaaacttctcattgacaattaccgatgggcaggcgttcctttctatattcgtacaggaaagcgcatgacagaaaaatccacaaaaattgtaattgagttcaaagacattccaatgaatctttattaccaaaaagatgatcaaaggaatccaaatttattggttattaatattcaaccaaatgaaggaattacgctttgcttgaatgcacgtaaatcaggtgaaggtgcactagcagagccaattcaattagcataccaccaaaatgctgtatctggaatcaatacaccagaagcatatgaaaaactaatttacgatagtatgcttggtgatgcgactaactttacccattgggatgaagttgctttatcttggcaatttgtcgataagattttggaaaactggtcagaaaatcaaccagcattccctaattatcgttctggatcgatgggaccagaagcatctgatgaactgttgaaaaaagatggtttccattggtggccaatctaa

SEQ ID NO: 2011 - protein, 491 aa, Oceanobacillus iheyensis HTE831
MEQTIQPRAVIVIFGATGDLAKRKLFPSIYRLYRSGKLDEHFAVIGLARRPWTDEVLRENVENSIQDALSPDEDLSEFISHFYYKSFDVTEKESYQGLNEIIQNLEGQYQTEGNRLFYLAMAPDFFGAIANQLNDYGLKNTSGWTRLVIEKPFGHDLPSAKKLNHELQAAFREDQIYRIDHYLGKEMVQNIEVIRFANGIFEHLWNNRFISNIQITSSETLGVEERARYYDTSGATRDMVQNHMLQMVALLAMEPPISLTTEEVRSEKIKVLRALRMMETNEIDDYFIRGQYGAGTVKGNSVIGYQDEDEQLENSRTETFVAGKLLIDNYRWAGVPFYIRTGKRMTEKSTKIVIEFKDIPMNLYYQKDDQRNPNLLVINIQPNEGITLCLNARKSGEGALAEPIQLAYHQNAVSGINTPEAYEKLIYDSMLGDATNFTHWDEVALSWQFVDKILENWSENQPAFPNYRSGSMGPEASDELLKKDGFHWWPI

SEQ ID NO: 2012 - DNA, 1668 bp, Bifidobacterium longum NCC2705
  CDS (1)..(1668): transl_table=11
ttgcgtacacgtttgcgtacgcgattggcccaacgcacggcacagcacacgcaatgtggcccaaatcgcagcccaaatcgcatatcgcctctagcgatagatagccgccggcgactacccttgtacattatgagtgaatcccccaattggagcaatcccctgcgcgactcgcgcgacctcagactgccccgtatcgccggcccatgcagcctcgtcattttcggtgtcacgggcgatctggcacaaaagaaactgctgccagccgtctacgacctggcgaaccgtggcctactgccgccgagcttcggtctgaccggcttcgcccgccgcgactggacacaggaacggttcatcgaattcgtcaaggccgccgtccaggcgcattgccgtacgccgttcaaggagtcgacttggcgcaatctggccgccggcatccgcttcgtgcagggtacgttcgacgacccggaggccttcgagcgcctgagcgccaccgtgcaggagcttgaccgcgaccgcggcacgcagggtaaccatgccttctacatgtcggtgccgccgcgcgcattcccacaggtcgccaagcagctggccgcctccggcctgtcgcgctcgtccgagggcgcatggcgccgcgtgatcatcgagaagccgttcggccatgatctggccagcgccaaggaactcgacagcgtggtatccgaagtgttcgacccgagctccgtgttccgcatcgaccactacctcggcaaggaaaccgtgcagaacctgctggccctgcgtttcgccaacgccatgtacgagccgatctggaacgccaactatgtggaccacgtgcagatcacgatggccgaggacatcggcatcggcggccgcgccggctattacgacggcatcggcgccgcacgcgacgtcatccagaaccacctgcttcagctcatggctctgaccgccatggaggagccggtgagcttcaccgccaaggacctgaccgccgaaaagaccaaggtgctttccgccgtgcgcctgcccaaggacctcgccgccaacaccgcgcgcggccagtacgccaagggctggcagggctcgcacgaagtggtcggctacttggaggaaaaaggcatcgaccccaagagcaccactgaaacgtacgccgccatccgcctcgatatcgacacccgccgctgggctggcgtgccgttctacctgcgttgcggcaagcgcctcggcaagcgtgtaaccgaaatcgccgtggtgttcaagcgcgccccgcatctgccgttcgagcagaccgccgtgcgcgaactcggcaagaacgccatcgtgattcgcgtgcagcccgacgagggcgtcaccatgcgcttcggagccaaggtgccgggcggctccaccatggaggtccgtgacgtgaacatggacttcagctacggccgctccttcaccgagaactcgccggaagcctatgagcgactgattctggacgtgctgctcggtgatccgccgttgttcccgaccaccgaagaggtgaacctcagctgggagatcctcgatccgattgaacaattctggtccacgcttggccagccgcaggcctaccgcgccggtacgtggggtccggcacaggccgacgaaatgctggcgcgcgacggccgccactggaggatgccatga

SEQ ID NO: 2013 - protein, 555 aa, Bifidobacterium longum NCC2705
MRTRLRTRLAQRTAQHTQCGPNRSPNRISPLAIDSRRRLPLYIMSESPNWSNPLRDSRDLRLPRIAGPCSLVIFGVTGDLAQKKLLPAVYDLANRGLLPPSFGLTGFARRDWTQERFIEFVKAAVQAHCRTPFKESTWRNLAAGIRFVQGTFDDPEAFERLSATVQELDRDRGTQGNHAFYMSVPPRAFPQVAKQLAASGLSRSSEGAWRRVIIEKPFGHDLASAKELDSVVSEVFDPSSVFRIDHYLGKETVQNLLALRFANAMYEPIWNANYVDHVQITMAEDIGIGGRAGYYDGIGAARDVIQNHLLQLMALTAMEEPVSFTAKDLTAEKTKVLSAVRLPKDLAANTARGQYAKGWQGSHEVVGYLEEKGIDPKSTTETYAAIRLDIDTRRWAGVPFYLRCGKRLGKRVTEIAVVFKRAPHLPFEQTAVRELGKNAIVIRVQPDEGVTMRFGAKVPGGSTMEVRDVNMDFSYGRSFTENSPEAYERLILDVLLGDPPLFPTTEEVNLSWEILDPIEQFWSTLGQPQAYRAGTWGPAQADEMLARDGRHWRMP

SEQ ID NO: 2014 - DNA, 1476 bp, Brucella suis 1330
  CDS (1)..(1476): transl_table=11
atgaccagtcagacaattccggtagatcccttcgactgcatcgtttttggtggcaccggcgatcttgccgagcgcaagcttattccggcgctttatcagcgccagcgcgcaggccagctttccgaccccacacgcatcatcggcgcctcgcgcagccagatgaccgacgacaaatatcgcaccttcgccggcaatgcgatcaaggaacatgtgaaaccggaagaggtggatcaggccgaagttgaaatcttcctcaagcggctgcactatgtggcggtggacgccaagtccgacgagggctgggatgcgctgaagaccctgatcggcaagaagccggaaaagatccgagccttttatctggccgtcagcccgaccctgttcggcgatatcgccacgcggctcaaggcgcatggcctcatcacgcgcgatacgcgcatcgtcgtggaaaagccgattggccgcgatctcgattccgccaaggcgctcaacgacacgctgggcagtgtgttccgcgaagaccagattttccgcatagaccactatctcggcaaggaaacggtgcagaacctgatggcgctgcgctttgccaatgcgctctacgagccgctgtggaactccgcccatatcgaccatgtgcagatcacggtggcggaagccgtgggccttgaaggccgcgcaggctattacgacaaggcgggcgcgctgcgcgacatggtgcagaaccacattctccagcttctctgccttgttgccatggaaccgccatcctcgattgaggccgacgccgtacacgacgagaaggtaaaggttctgcgctccctgcagccgatctccacgcataatgtcgaggaactgacggtccgcggacaatatcgcgcgggcgcttccgcaggcgggccggtcaagggctatctggaagaccttgaaagcgacaccagcaatacggaaacattcgtggcgctgaaggcggaaatcgccaactggcgctgggcgggtgtgccgttctatctgcgcaccggcaagcgccttgccacgcgtgtttcggaaatcgtcgtcacgttcaagcccattccgcattccatctttggcgaaagcgcgggcaaggtgattgccaatcagcttgtcatccgcctgcaaccggacgaaggcgtgaagcaatggctgatgatcaaggatcccggtccgggtggaatgcgcctgcgccacatgccgctcgacatgagctttgcggaatccttcgaggatcgcaacccggatgcctatgagcgcctcatcatggatgtggtgcgcggcaaccagaccctgttcatgcgccgcgacgaagtggaagcggcctggcgctggatcgacccgatccttcaggcatgggagttcaacagccagcccgtgcagggctatacggctggcacatgggggccttcgtcctccatcgcgctcattgagcgcgatggccgcacctggcacgaaagcctctaa

SEQ ID NO: 2015 - protein, 491 aa, Brucella suis 1330
MTSQTIPVDPFDCIVFGGTGDLAERKLIPALYQRQRAGQLSDPTRIIGASRSQMTDDKYRTFAGNAIKEHVKPEEVDQAEVEIFLKRLHYVAVDAKSDEGWDALKTLIGKKPEKIRAFYLAVSPTLFGDIATRLKAHGLITRDTRIVVEKPIGRDLDSAKALNDTLGSVFREDQIFRIDHYLGKETVQNLMALRFANALYEPLWNSAHIDHVQITVAEAVGLEGRAGYYDKAGALRDMVQNHILQLLCLVAMEPPSSIEADAVHDEKVKVLRSLQPISTHNVEELTVRGQYRAGASAGGPVKGYLEDLESDTSNTETFVALKAEIANWRWAGVPFYLRTGKRLATRVSEIVVTFKPIPHSIFGESAGKVIANQLVIRLQPDEGVKQWLMIKDPGPGGMRLRHMPLDMSFAESFEDRNPDAYERLIMDVVRGNQTLFMRRDEVEAAWRWIDPILQAWEFNSQPVQGYTAGTWGPSSSIALIERDGRTWHESL

SEQ ID NO: 2016 - DNA, 1509 bp, Drosophila melanogaster
  CDS (1)..(1509)
atggtctgcgagggaacccactttgacggcaagattccgcacacgttcgtcatctttggggcgtcgggcgatctggccaagaagaagatctaccccacgctctggtggctctaccgcgatgacctgctgcccaagccgaccaagttctgcggctatgcccgttccatgctgaccgtcgatagcatcaaggagcagtgtctgccgtacatgaaggtccagccgcacgagcagaagaagtacgaggagttctgggccctcaatgagtacgtgtccggcagatatgacggacgcactggcttcgagctgcttaaccagcagctggagattatggagaacaagaacaaggccaaccgcatcttctatctggccctgccgcccagcgtcttcgaggaggtgactgtcaacatcaagcagatctgcatgtcggtctgcggttggaaccgcgtgattatcgagaagcctttcggccgggatgacgcctcctcgcaggcgctgagcgaccatctggccggtctgttccaggaggatcagctgtaccgcatcgatcactacctgggcaaggagatggtgcagaacctgatgaccatacgcttcggcaacaagatcctcagctcgacgtggaaccgcgagaacatcgcctccgtgctgatcacgttcaaggagcccttcggcacgcagggtcgtggcggctacttcgacgagttcggcatcatacgcgacgtgatgcagaaccatctgctgcagatcctctcgctggtggccatggagaagccggtgagctgccacccggacgacattcgtgacgagaaggtcaaggtgctgaagagcatcgaggccctgacgctggatgacatggtgctgggccagtacctgggcaatccgcagggtacaaacgatgatgcgcgcacgggctacgtggaggaccccaccgttagcaacgattcgaacacgcccacctacgccctcggcgtgctcaagatcaacaacgagcgctggcagggagtgcccttcatcctgcgctgcggcaaggcgctgaacgagcgcaaggcggaggtgcgtatccagtaccaggacgtgcccggcgacatcttcgagggcaatacgaagcgcaacgagctggtcatccgcgtccagccgggcgaggccctgtactttaagatgatgaccaagagccccggcatcacgttcgacatcgaggagacggagctggacctcacctacgagcaccgctacaaggactcctacctgccggacgcgtacgagcgtctcatcctcgacgtcttctgcggctcccagatgcacttcgtccgctcggacgagctgcgcgaggcgtggcgcatatttacgcccattctgcaccagatcgagaaggagcacattcggccaatcacctaccagtacggatcgcgcggtcccaaggaggcggaccgcaagtgcgaggagaacaatttcaagtactccggctcctacaagtggcacggcggcaaggcggccacgtccaatcactga

SEQ ID NO: 2017 - protein, 502 aa, Drosophila melanogaster
MVCEGTHFDGKIPHTFVIFGASGDLAKKKIYPTLWWLYRDDLLPKPTKFCGYARSMLTVDSIKEQCLPYMKVQPHEQKKYEEFWALNEYVSGRYDGRTGFELLNQQLEIMENKNKANRIFYLALPPSVFEEVTVNIKQICMSVCGWNRVIIEKPFGRDDASSQALSDHLAGLFQEDQLYRIDHYLGKEMVQNLMTIRFGNKILSSTWNRENIASVLITFKEPFGTQGRGGYFDEFGIIRDVMQNHLLQILSLVAMEKPVSCHPDDIRDEKVKVLKSIEALTLDDMVLGQYLGNPQGTNDDARTGYVEDPTVSNDSNTPTYALGVLKINNERWQGVPFILRCGKALNERKAEVRIQYQDVPGDIFEGNTKRNELVIRVQPGEALYFKMMTKSPGITFDIEETELDLTYEHRYKDSYLPDAYERLILDVFCGSQMHFVRSDELREAWRIFTPILHQIEKEHIRPITYQYGSRGPKEADRKCEENNFKYSGSYKWHGGKAATSNH

SEQ ID NO: 2018 - DNA, 1545 bp, Corynebacterium efficiens YS-314
  CDS (1)..(1545): transl_table=11
gtgagctcccacacgaatcccaccacctggattaatcccctgcgtgatccccaggacaaacgactgccccgcatcgcgggaccgtccggcctggtcatcttcggtgtcaccggtgacctcgcccgcaagaagctcctccccgcgatctatgatctggccaaccgtggtctgctccccccgggtttcgccctggtgggttacggacgccgtgactggagcaaggaggacttcgagaactacgtgcgcgaggccgtggaggccggcgcccgtaccgaattccgcggaaacgtgtgggaacgcctcgccgagggcatggaatttgtcaagggcaacttcgacgacgattccgccttcgacaatctcgcggacacgcttaagcgtctcgacgagaccaggggcaccgccggcaactgggccttctacctatccatcccgccggattccttcgcggcggtctgccaccagttggagcgctcaggtatggcggcatccacagacgaatcctggcgacgggtgatcatcgagaagcccttcggcaatgatctcaagaccgcgcatgaactcaatgagacggtcaacgctgtcttccccgaggaatcggtcttccgcatcgaccattacctgggcaaggaaaccgtccagaacattctggccctgcgtttcgccaaccagctgttcgagccgttgtggaactccaattatgtcgatcatgtgcagatcaccatggcggaggacatcggattggggggacgcgccggttattatgacggcatcggtgccgcccgtgatgtcatccagaaccacctgatccagctgctggccctggtggccatggaggagcccatctccttcacccccacccagctgcaggcagagaagatcaaggtgcttcgtgccaccaagccgagcctgccgatcgcggagaactccgcgcgtggccagtattccgccggctggcaggggtctgaatatgtcaagggtctgcgggaggaggatggtttcgatccggaatccaccaccgagacctatgccgcctgcaccctggagatcacctcccgcaggtgggcgggtgtgccgttctacctgcgcaccggcaaacgcctgggtcgtcgtgtcaccgagatcgccgtggtgttcaaggatgccccccaccagcccttcgatcccggcatgaccgcggcactcggtaacaacgccatcgtgatccgtgtgcagcccgacgagggtgtgctcatccgtttcggatccaaggtgcccggatctgccatggaggtccgtgatgtgaatatggacttctcctattccgagtccttcaccgaggaatcccccgaggcgtatgagcgtctcatcctggatgcgcttctcgatgagtccagcctcttccccaccaatgaggaagtggaactgagctggaagatcctggatccgatcctggagatctgggaggagaatggccaaccggaggagtatcccgccggcacatggggaccgaagagcgccgatgagatgctggcacgcaacggccaccagtggcgcaggccgtag

SEQ ID NO: 2019 - protein, 514 aa, Corynebacterium efficiens YS-314
MSSHTNPTTWINPLRDPQDKRLPRIAGPSGLVIFGVTGDLARKKLLPAIYDLANRGLLPPGFALVGYGRRDWSKEDFENYVREAVEAGARTEFRGNVWERLAEGMEFVKGNFDDDSAFDNLADTLKRLDETRGTAGNWAFYLSIPPDSFAAVCHQLERSGMAASTDESWRRVIIEKPFGNDLKTAHELNETVNAVFPEESVFRIDHYLGKETVQNILALRFANQLFEPLWNSNYVDHVQITMAEDIGLGGRAGYYDGIGAARDVIQNHLIQLLALVAMEEPISFTPTQLQAEKIKVLRATKPSLPIAENSARGQYSAGWQGSEYVKGLREEDGFDPESTTETYAACTLEITSRRWAGVPFYLRTGKRLGRRVTEIAVVFKDAPHQPFDPGMTAALGNNAIVIRVQPDEGVLIRFGSKVPGSAMEVRDVNMDFSYSESFTEESPEAYERLILDALLDESSLFPTNEEVELSWKILDPILEIWEENGQPEEYPAGTWGPKSADEMLARNGHQWRRP

SEQ ID NO: 2020 - DNA, 1470 bp, Pseudomonas putida KT2440
  CDS (1)..(1470): transl_table=11
atggccgcaatcagtgtcgaaccttgcacctttgccctgtttggcgccctcggcgacctggcattgcgcaagctgtttcctgcgctctaccagctcgaccgggccaacctgttgcacccggacacccgcctgctggccctcgcccgtgaggtcggcagtgcgcaggagcacctggacagcatcgaagcccacctgcgccggcacgtgcccgaggcagatatcgagcctgctgcgctggggcgcttccttgcccgcctgaattaccagcacctggacttccttcagcccgagggctatcaggccctggccgagcagctgccgggcgagctgccgctgatcgcctacttcgccacggcggcggcggtgtatggggccatctgcgaaaacctcgacaaggtcgggctggctgcgcgcacccgggtagtgctcgagaaacctattggccacgacctggagtcgtcgcgccgggtcaacgacgccgtggcgcggttcttccctgaaagccgggtttaccgcattgaccattacctgggcaaagagacggtgcagaacctgattgccctgcgcttcgccaatagcctgttcgaaacccagtggaaccagaattccatctcccatgtggagattaccgtcgcggaaaaggtcggtatcgagggccgttggggttatttcgacaaggccggccaactgcgcgacatgatccagaatcacctgctgcagttgctgtgcctgatcgccatggacccgcccagcgaactgtccgccgatgccatccgcgacgagaaggtgaaagtgctcaaagccctggcaccgatcactggcgacggcctgagcaccagcgtggtgcgcggccagtacattgccggctacagcgaaggcaagccggtgccgggttacctggaagaagacaacgccaacgcccagagcgacaccgaaaccttcgtcgccctgcgcgccgacatccgtaactggcgctggtcgggcgtgccgttctacctgcgaaccggcaagcgcatgccgcaaaaactgtcgcagatcgtcattcacttcaaggaaacgccgcactacatcttcgccccggaacagcgtttgcagatcggtaacaagctgatcatccgcctgcaaccggacgaaggcatttctttacgggtgatgaccaaggagcagggcctggacaagggcatgcaactgcgcagtggcccattgcagctgaatttttccgatgcctggcgcagtgcacgaattccggatgcctacgagcggctgttgctcgaagtgatgcgcggcaaccagaacctgttcgtgcgcaaggacgaaatcgagtatgcctggaagtggtgcgaccagttgatcgccggctggcgtaatgcgggcgatgcgcccaagccatacgcggcgggctcctgggggccgatgagctcgattgcactgatcacacgcgatgggagggcgtggtatggggatatctga

SEQ ID NO: 2021 - protein, 489 aa, Pseudomonas putida KT2440
MAAISVEPCTFALFGALGDLALRKLFPALYQLDRANLLHPDTRLLALAREVGSAQEHLDSIEAHLRRHVPEADIEPAALGRFLARLNYQHLDFLQPEGYQALAEQLPGELPLIAYFATAAAVYGAICENLDKVGLAARTRVVLEKPIGHDLESSRRVNDAVARFFPESRVYRIDHYLGKETVQNLIALRFANSLFETQWNQNSISHVEITVAEKVGIEGRWGYFDKAGQLRDMIQNHLLQLLCLIAMDPPSELSADAIRDEKVKVLKALAPITGDGLSTSVVRGQYIAGYSEGKPVPGYLEEDNANAQSDTETFVALRADIRNWRWSGVPFYLRTGKRMPQKLSQIVIHFKETPHYIFAPEQRLQIGNKLIIRLQPDEGISLRVMTKEQGLDKGMQLRSGPLQLNFSDAWRSARIPDAYERLLLEVMRGNQNLFVRKDEIEYAWKWCDQLIAGWRNAGDAPKPYAAGSWGPMSSIALITRDGRAWYGDI

SEQ ID NO: 2022 - DNA, 1506 bp, Pseudomonas putida KT2440
  CDS (1)..(1506): transl_table=11
atgactaaacagacccttgcggccgcccccccttgtaccctgttcctgttcggcgccaatggcgacctggtcaagcgcctgctgatgcccgcgctgtacaacctcagccgtgacggtttgctggaccgtaacctgcgcatcgtcggcgttgaccataacccggccagcgccgaggatttcgccgcgcgcctgcacgcgttcatggtcgagcgtgacaaaggcggcgagggcagcgccaagtgcctggacgagaagctatgggcccgcctggccaagcgcctcgattaccagacgggcgactttctcgatccggccacctaccaggccctggccaggcgcatcgacaagacccgccacggcaatgccattttctatctggccacgtcgccgcgcttcttccccgaggtggcgcagcgcctggggcaggccggcttgctggacgagtctgccggcggctttcgccgggtggtggttgaaaaaccgttcggcaccgacctggccagcgccgaggcgctcaacgcctgcctgctgaaggtgatgggcgagcggcagatctaccgcatcgaccattacctgggcaaagagacggttcagaatattctggtcagccgcttttccaacggcttgttcgaatcgttctggaacaatcactacatcgaccacgtgcagatcaccgcagcggaaaccgtcggtgtcgagacccgtggtgcgttctatgacagcaccggcgccctgcgcgacatggtgcccaaccacctgttccagttgctggcgatggtggccatggagccgccggccgcgttcggcgccgatgcggtgcgcggtgaaaaggccaaggtggtcggcgctattcgcccatggtcggcaaaaatggcccagaagaattccgtacgaggccagtacagagccggcaagcaggggcgcaagccgttgccaggctaccggcaggagcccaacgtcgcgccggatagccagaccgagacctacgtggcgctgaaggtgatgatcgacaactggcgctgggccggcgtgccgttctacctgcgcaccggcaagcgcatgagcgtgcgtgacaccgagattgccatctgcttcaagcccgcaccgtatgcgcagtttcgcgagtcggagctggaacggcccaaacccaactacctgaaaatccagatccagcccaatgaaggcatgtggttcgacctgcaagccaaacggcccgggccagagctggtgatggagaatgtcgagttgggttttgcctacaaggacttcttcaagatgaccccggccactggctacgagacgctgatctatgactgcctgaccggtgaccagaccctgttccagcgggctgacaacatcgaaaacggttggcgagcggtgcagccgtttctcgatgcctgggcccagggcggcgaagtgcatgagtactcggctggcgaagatgggcctgaggccggcaatgaattgctgacccgcgacaagcgggagtggcaccggttggggtga

SEQ ID NO: 2023 - protein, 501 aa, Pseudomonas putida KT2440
MTKQTLAAAPPCTLFLFGANGDLVKRLLMPALYNLSRDGLLDRNLRIVGVDHNPASAEDFAARLHAFMVERDKGGEGSAKCLDEKLWARLAKRLDYQTGDFLDPATYQALARRIDKTRHGNAIFYLATSPRFFPEVAQRLGQAGLLDESAGGFRRVVVEKPFGTDLASAEALNACLLKVMGERQIYRIDHYLGKETVQNILVSRFSNGLFESFWNNHYIDHVQITAAETVGVETRGAFYDSTGALRDMVPNHLFQLLAMVAMEPPAAFGADAVRGEKAKVVGAIRPWSAKMAQKNSVRGQYRAGKQGRKPLPGYRQEPNVAPDSQTETYVALKVMIDNWRWAGVPFYLRTGKRMSVRDTEIAICFKPAPYAQFRESELERPKPNYLKIQIQPNEGMWFDLQAKRPGPELVMENVELGFAYKDFFKMTPATGYETLIYDCLTGDQTLFQRADNIENGWRAVQPFLDAWAQGGEVHEYSAGEDGPEAGNELLTRDKREWHRLG

SEQ ID NO: 2024 - DNA, 1458 bp, Pseudomonas putida KT2440
  CDS (1)..(1458): transl_table=11
gtggagagtggtggtttgactattccttgcgacattctggtcttcggcggcaccggtgatctggccctgcacaaattgcttccggcgctctaccacctgtttcgcgaggcccgtctgaaccctgccgtgcgggtcatcgcactggccaggcgcaacctgccacgcatcgactatctgaagctcgccgaacgccattgtcgggcgcagattgcccgcagcgacttcgacgaagaggtgtggcagcggttttccgcacgggtcgactacttcccgatggatgcttcacagagcgccgacttcggccgcctggcacgctacctgggcgaacccggtggactgacacgcatcttctacctggccaccgctcccaacctgttcgtgccgattgccaaccacctgcgcattgccggactggccgacaccgaagcgcgcatcgtgctggaaaaaccgatcggccattcgctggaatcggccactgccatcaatgaagcgattggcacggtgttcgaagaaagacaggtgttccgcatcgaccactacctgggcaaggaaaccgtgcagaacctgatggccctgcgttttgccaatgccctgctggagccggtgtggcgcaacaaccaggtcgaccatgtccagatcagcgtttgcgagacactgggcgtagaaaaccgcggtgcctactacgatcgcgccggggctattcgcgacatgctgcagaaccacctgctgcagctgctgtgcctggtggccatggagccacccgcgcaattcgaggcagaggcggtacgcgacgaaaaggtgaaaatcctgcgcgccctcaagccgatcaccggccaggatgtgcaggacaagacggtacgcggccaatatggggccgggcgtatcggcggccaggaagtgccggcctactactttgaaaaggacgtcgacaacgacagcgataccgaaactttcgtggccatcgaggcgcatatcgacaactggcgctgggcgggcgtgcctttctatctgcgcaccggcaaacgcatggcgcggcgcgcttcgcagatcgtcatccagttcaagccagtgcctcacgaactgttcagcggcggccaggtcaaccagttgctgatacagctgcaaccggacgaacgcatcagcctgcgcatgatgaccaagagcccaggcaagggcatgcgcctggaacccgtggacctggaccttaatctggcccaggtgttcagccagactcgccgctgggaagcctacgagcgtctgctgctggatgtgctcgaaggtgattcgacactgttcatgcgccgcgatgaagtggaagcagcctgggcttgggtagatccaatcatcaagggctgtgaagagcacttccaggcgccccgcccctacccggctggcagtttcgggcccgaacaagccaacagcctgctcgccaggcatggcaggcactggcatggctga

SEQ ID NO: 2025 - protein, 485 aa, Pseudomonas putida KT2440
MESGGLTIPCDILVFGGTGDLALHKLLPALYHLFREARLNPAVRVIALARRNLPRIDYLKLAERHCRAQIARSDFDEEVWQRFSARVDYFPMDASQSADFGRLARYLGEPGGLTRIFYLATAPNLFVPIANHLRIAGLADTEARIVLEKPIGHSLESATAINEAIGTVFEERQVFRIDHYLGKETVQNLMALRFANALLEPVWRNNQVDHVQISVCETLGVENRGAYYDRAGAIRDMLQNHLLQLLCLVAMEPPAQFEAEAVRDEKVKILRALKPITGQDVQDKTVRGQYGAGRIGGQEVPAYYFEKDVDNDSDTETFVAIEAHIDNWRWAGVPFYLRTGKRMARRASQIVIQFKPVPHELFSGGQVNQLLIQLQPDERISLRMMTKSPGKGMRLEPVDLDLNLAQVFSQTRRWEAYERLLLDVLEGDSTLFMRRDEVEAAWAWVDPIIKGCEEHFQAPRPYPAGSFGPEQANSLLARHGRHWHG

SEQ ID NO: 2026 - DNA, 1512 bp, Bradyrhizobium japonicum USDA 110
  CDS (1)..(1512): transl_table=11
gtgacaaaagacccgcaagccaagcgcaagccggaaaattgcgccttcgtcatctttggcgtgaccggagaccttactcatcgccttgtgatgccctcgctctacaatctcgcggccgagcacctgttaccggaaaagttctgtgtcgtcggcgtggcccgcaagggccaatcggatgacgagctgcgcagcagcctgttgaagggcctgcgccagttcgcgacgcgacccgtggacgacgatatcgcccagaagctgctgcaatgcctgaccttcgtcgaggccgacccgaaggactcgccgtccttcgaccgcttgcgcgagcatctggattcgctggaatgcgcgcaggacaccggcggcaaccggctgttctatctggcaacgccgcccgccgcgttcgcgccgaccgcgcgcgagctcggccgcaccggcatgatggaggagaacggcgcctggcgacgcctcgtgatcgaaaagccgttcggcaccgatctcgcctcggcacgcgcgctgaacgccgagctcctgaagatcatggacgagcaccagatctaccggatcgatcactatctcggcaaggagacggtgcagaacattttggtgctgcgctttgccaacggcatgttcgagccgatctggaatcgcaaccacatcgaccacatccagatcacggtggaagagaagctcggcgtcggccatcgcggcggcttctacgacgccaccggcgcgctgcgcgacatggtaccgaaccatctgttccagctgatgtcgctggtcgcgatggagccccccgcccgcttcgacgcgcattccgtgcgctccgagaaggccgacgtgctcacctcgatccagcagcccagccgggaagaggcgctgaagaattcagtgcgcgcgcaatatctcgccggccgcatcggcgacgaggagatcacggactatcgcaagaccgaggacgtcaagcccggcagcaccaccgagacctttgtcgcgctcaagctgatgatcgacaattggcgctgggccggcgtccccttctacttgcgcaccggcaaggcgctgggtcacaagcgcaccgaagtcgcgatcaagttcaagcaggcgccgctgtcgatgttttcgggcacggacgtcgaccgcctgtcgcagaacttccttaccatcggcatcgcgccgaccgagaccatcgagcttcagttcaacgccaagattccgggcccgagcatcaccatcgacggcgtcgagatgaagttccgctatggcgactatttccgcgtcgatccctcgaccggctacgagacgctgatctacgactgcatgatcggcgacaacatactgttccagcgcgccgacggcatcgaggccggatggcaggcggtgcagccgttcctggacgcctggaagagcgagggcaccaacggcatcgagacctatgaagccggcagcgacggccccgcctgcgcggacgagctgctccggcgcgacggacgaagctggcggaagttttcgtga

SEQ ID NO: 2027 - protein, 503 aa, Bradyrhizobium japonicum USDA 110
MTKDPQAKRKPENCAFVIFGVTGDLTHRLVMPSLYNLAAEHLLPEKFCVVGVARKGQSDDELRSSLLKGLRQFATRPVDDDIAQKLLQCLTFVEADPKDSPSFDRLREHLDSLECAQDTGGNRLFYLATPPAAFAPTARELGRTGMMEENGAWRRLVIEKPFGTDLASARALNAELLKIMDEHQIYRIDHYLGKETVQNILVLRFANGMFEPIWNRNHIDHIQITVEEKLGVGHRGGFYDATGALRDMVPNHLFQLMSLVAMEPPARFDAHSVRSEKADVLTSIQQPSREEALKNSVRAQYLAGRIGDEEITDYRKTEDVKPGSTTETFVALKLMIDNWRWAGVPFYLRTGKALGHKRTEVAIKFKQAPLSMFSGTDVDRLSQNFLTIGIAPTETIELQFNAKIPGPSITIDGVEMKFRYGDYFRVDPSTGYETLIYDCMIGDNILFQRADGIEAGWQAVQPFLDAWKSEGTNGIETYEAGSDGPACADELLRRDGRSWRKFS

SEQ ID NO: 2028 - DNA, 1485 bp, Lactobacillus plantarum WCFS1
  CDS (1)..(1485): transl_table=11
atgagtaacgaaaaaattgccttattcaccatctttggcggtactggtgacctcgcacagcgtaaactgtacccgtcactatttaagctctatcaaaagggctatctcaaggaccactttgccgttattgggacggctcggcgtccttggactgatgatcactatcatgaagttattagtgactccctagctgatctgaatgctgatcaggaaacggtgacgcaatttgcgagccatttttattatcaatcgcatgacgttactgatgctgaacattaccgaactttgaaaaaattatcagaaaagctggacgcccaatatggtttacaaggcaaccggatcttctacttagcaatggcaccaaacttcttcggtacgattgcccaacacttacgttccgaaaatattctgacagataacggttttaaccgcgtcattatcgaaaagccttttggtcatgattatgaaagtgccaaggaacttaacgaccaattaacggctacttttaacgaaaatcagatttatcgaattgaccactaccttggtaaagaaatgattcaaaatatcacggccattcgttttggcaataatatttgggaatcattatggaacaaccgttacatcgacaatgtccaaattacgttaagtgaaaaactgggtgtcgaagaacgggccgtttactatgataacagcggtgccttgcgggatatggtccaaaatcacattttgcaaattttgagtctgttaacaatggatcaaccagttgaattcactgaaaatgatatcgacgtggaaaaggtcaaggctttacggagcttacgaccacttaaaccagaagaagtcgcaaccaactttgtccgtggtcaatacggtgccggcgatgatgctaaagcttaccgcgacgaagataagatttcatcagattctaacaccgatactttcgtcgctggtaaagtcatgatcgataattatcggtggtccggagtgccgttttacatccggactgggaaacgcttagccgataagttcacgcgaatcgacgtggtgttcaaacggccagtcgtcaatatcttcaatcatgaagacgtccgagctaatgacgacgcagcaaccagtctcgatccaaacatcttgacaatcaacgttgaaccgactgaaggcttcgagctccgcatgaatgctaaagcaatcggccaaggcttcgcaaccaccccggtcaagttgaattattctcacgatgctgaagccacggctggtagcccagaagcttacgaacgtttgcttcacgatgccttaaatggcgacgcaaccaactttacccactggcaagaggttgccgattcgtggaaattcgttgacgtcattcaaaaatactgggatgaacatcaacccgaatttccaaactaccgccctggtacaatgggaccagatgcggccgatgaattattacgtcaagatggtcaccgctgggtctaccgcaactag

SEQ ID NO: 2029 - protein, 494 aa, Lactobacillus plantarum WCFS1
MSNEKIALFTIFGGTGDLAQRKLYPSLFKLYQKGYLKDHFAVIGTARRPWTDDHYHEVISDSLADLNADQETVTQFASHFYYQSHDVTDAEHYRTLKKLSEKLDAQYGLQGNRIFYLAMAPNFFGTIAQHLRSENILTDNGFNRVIIEKPFGHDYESAKELNDQLTATFNENQIYRIDHYLGKEMIQNITAIRFGNNIWESLWNNRYIDNVQITLSEKLGVEERAVYYDNSGALRDMVQNHILQILSLLTMDQPVEFTENDIDVEKVKALRSLRPLKPEEVATNFVRGQYGAGDDAKAYRDEDKISSDSNTDTFVAGKVMIDNYRWSGVPFYIRTGKRLADKFTRIDVVFKRPVVNIFNHEDVRANDDAATSLDPNILTINVEPTEGFELRMNAKAIGQGFATTPVKLNYSHDAEATAGSPEAYERLLHDALNGDATNFTHWQEVADSWKFVDVIQKYWDEHQPEFPNYRPGTMGPDAADELLRQDGHRWVYRN

SEQ ID NO: 2030 - DNA, 1464 bp, Tropheryma whipplei TW08/27
  CDS (1)..(1464): transl_table=11
atgccaaaggtgaattgcgcaacacagcagattgccctgcctggggcgcttgctatattcggggcaacgggtgacctgagctccaaaaaactattgccagcggtgtacgacttgtttcataactctcttctatcaaatgggttcgttttaattgctctgaatagagacttctcggcgcaagattttatctgtcacttccgccattgcgttaagtctttctctaggacgggatggtcagagtctgtttttcttgatctccaaaaaagggtacatcatgtaagtggcgacttttccgaccccgagacatatattgagctctctgagaaattagaaaccaccaaagaggaaactgggggtaattgtgttttttatctctcagttccgccaaatgtatttactcccatcatgaaaaacttgtctgctagtgggctgtctagaggatgtttgcataaaattgctgttgaaaaaccctttggtaatgaccttaaaagtgcaatacagcttaattcagtgcttaggtcagctttccctgagcgtgctatctttcgggttgatcactatcttggtaaagagaccattcaaaatattcttacttttcgttttggaaaccaaatctttgaccctatttggaataggaaacatgttgatcatgtgcagattacgatgtctgaagatataggggttgagggtcgcagtaagtactatgacggaatcggtgctgcacgtgatgtattacaaaatcatcttttgcagcttatggctctaattacgatggagagaccctcgaatttgaataacgcgagtgatataaggcacgagaagcagagagttttggaatgtgtgagtcttccgaaaaatatagctcaaaatgctgttcgtggccaatactcatccggctatctacgggatgagagggttgtatcttttttgcaagaagatggggttaatccatcttcaagaactgaaacattcgcggcgataaagctaaatgccgataatgaacgttggtatggtgtacctttctacgttagaactgggaaacggatggcaaaacgtagtgcatatataagtcttgtattcaagccaactgatatgagtattttgcaaaatgtgattgttataaggttgcaaccagacgagggtgtgtctatttggtttgcgtcgaaagtgcccggttatcgttctgatattcgacaggtgaattttgatttttcgtataaaagctcatttactgaatcaagtccagaggcttatgaacgcttaattctggatgcaatgaggggtgaggcctccttgtttccgcagcaaagagaagtggagttgtgttggggcataatagacccccttgaggaggtttgggaaaacgacaataccctgataccccaatacactccaggaagttgggggccagatacttcaaacgaccttttgctcagaacgtccaggcactggagaaattactga

SEQ ID NO: 2031 - protein, 487 aa, Tropheryma whipplei TW08/27
MPKVNCATQQIALPGALAIFGATGDLSSKKLLPAVYDLFHNSLLSNGFVLIALNRDFSAQDFICHFRHCVKSFSRTGWSESVFLDLQKRVHHVSGDFSDPETYIELSEKLETTKEETGGNCVFYLSVPPNVFTPIMKNLSASGLSRGCLHKIAVEKPFGNDLKSAIQLNSVLRSAFPERAIFRVDHYLGKETIQNILTFRFGNQIFDPIWNRKHVDHVQITMSEDIGVEGRSKYYDGIGAARDVLQNHLLQLMALITMERPSNLNNASDIRHEKQRVLECVSLPKNIAQNAVRGQYSSGYLRDERVVSFLQEDGVNPSSRTETFAAIKLNADNERWYGVPFYVRTGKRMAKRSAYISLVFKPTDMSILQNVIVIRLQPDEGVSIWFASKVPGYRSDIRQVNFDFSYKSSFTESSPEAYERLILDAMRGEASLFPQQREVELCWGIIDPLEEVWENDNTLIPQYTPGSWGPDTSNDLLLRTSRHWRNY

SEQ ID NO: 2032 - DNA, 1497 bp, Bacteroides thetaiotaomicron VPI-5482
  CDS (1)..(1497): transl_table=11
atggataaatttgcaatgattatttttggtgcttcgggcgacttgactaaacgcaagttgatgcccgcattgtactctctgtatcgggataaacggctgacggggagttttactgttctgggaattgggcgtactgtctattctgatgaagattaccgttcatatatacttggggagttgcagcagtttgtaaaggctgaagagcagaatttggagctgatgtcttcttttgtgtctcatttgtattatttgccgatggatcctgcgaaagtggagggatattcgcagttgcgggagcgtttggtagagcttacgaaggaggtcgatccggataatttgttgttctatctggctactccgccttcgctgtatggggtggtgcctttgcatttgaaggcggccgggctgaatactcctcattctcgtattattgttgagaagccgttcgggtatgatctggagtcggcgcttgagttgaataagatttactcttctgtgtttgatgagcatcagatttatcgtatcgatcattttctgggcaaggagacggcgcagaatgtgcttgctttccgtttcgccaatggtatttttgagccgttatggaatcgtaattatattgattatgtggagattactgctgtagagaatctgggtattgagcagcgcggaggtttttacgagacggcgggggctttgcgggatatggtgcagaatcacctgattcagctcgtagctcttacggctatggagccgccggcggtattcaatgcggataatttccggaatgaggtagtgaaggtttatgagtcgctgactccgcttacggagacggacttgaatgaacatatcgttcgcggacaatatacggcttcgggcaataagaaggggtatcgtgaggaaaagggagtggctcccgactcgcgtacggagacttatattgcgatgaagctgggcatcagtaactggcgttggagcggggtaccgttctacatccgcaccggtaagcagatgccgacgaaggtgacggaaattgtcgttcacttccgcgagacgccccatcagatgttccgctgttccggcggtaactgtccgagggctaataagttgatccttcgtttgcaaccaaacgagggtattgtgttgaagatcggaatgaaggttccgggtgcaggtttcgaagtccgtcaggtgacgatggatttcagttacgcacagttgggcggcgtgccgagcggtgacgcttatgcccgtctgattgacgactgcattcagggagatccgaccttatttactcgaagtgatgctgtagaggcttcctggaacttctttgatccggtcttacgttattggaaagataatccggacgcacctttgtacggctatccggcaggtacgtggggacctctcgaaagtgaagctatgatgcacgagcatggggcagactggaccaatccgtgtaagaatttaacaaatacagaccaatattgcgaactatga

SEQ ID NO: 2033 - protein, 498 aa, Bacteroides thetaiotaomicron VPI-5482
MDKFAMIIFGASGDLTKRKLMPALYSLYRDKRLTGSFTVLGIGRTVYSDEDYRSYILGELQQFVKAEEQNLELMSSFVSHLYYLPMDPAKVEGYSQLRERLVELTKEVDPDNLLFYLATPPSLYGVVPLHLKAAGLNTPHSRIIVEKPFGYDLESALELNKIYSSVFDEHQIYRIDHFLGKETAQNVLAFRFANGIFEPLWNRNYIDYVEITAVENLGIEQRGGFYETAGALRDMVQNHLIQLVALTAMEPPAVFNADNFRNEVVKVYESLTPLTETDLNEHIVRGQYTASGNKKGYREEKGVAPDSRTETYIAMKLGISNWRWSGVPFYIRTGKQMPTKVTEIVVHFRETPHQMFRCSGGNCPRANKLILRLQPNEGIVLKIGMKVPGAGFEVRQVTMDFSYAQLGGVPSGDAYARLIDDCIQGDPTLFTRSDAVEASWNFFDPVLRYWKDNPDAPLYGYPAGTWGPLESEAMMHEHGADWTNPCKNLTNTDQYCEL

SEQ ID NO: 2034 - DNA, 1524 bp, Enterococcus faecalis V583
  CDS (1)..(1524): transl_table=11
atgaatgaaaaagtagcattatttactattttcggggggacaggtgatcttgccaaacgtaaattgtatccttccctgttccgcttatataaaaaaggattattagctgagcgttttgcggtgattggtaccgcacgtcgggaatggacagacgaatactatcgtgaaatcgtccgtgaaaccattcaagacttaaatcccacggccgaagaggcaactgaattttctagtcatttctattaccaatcacataatgtgaatgatacggaacattataataccttaaaagaattatctgatcgcctaaatgaacaataccacttagaaggcaatcatgtttactatttagctatggcccctcaattctttggaaccattgttaatcacttgaaatcacaacatattatttcggaagaaggctttgatcgtctaattatcgaaaagccatttggttctgattatgaatctgcctacgaattaaatgaagaaattcgtgctgcatttcctgaacaagatattttccgaattgaccattacttaggcaaagaaatgatccaaaatatttcagccattcgttttgccaataatatttttgaatcacaatggaacaatcgttacattgataatgtccaaatcaccttcgctgaaagcttaggtgtcgaggatcgtggcggctattatgaccacagtggcgcactaaaagatatggttcaaaatcatattttacaagtcgttgcattgctttctatggagcctcctgttgccttttctgaaaaagaaattcggactgaaaaagtaaaagctttacgtgccatccgcctttattctgaagaagaagcccttcaaaatttcgtgcgtggacaatacggcgaaggtcagctagctgatcaaacatttgcagcctatcgtgatgaaccaaatgtggcagaaacttcatccactgaaacttttgttgctggtaaatttttaattgataatttccgttggtctggcgtccctttctatgttcgcacaggtaaacgattaactgaaaaaggcacacgcattaacatcgtctttaaacaagtacctattaatgtcttcaaagatgatacgtgtgaagaatgcgataaaaccgatttaccaccgaatgttttaactatctatatccaaccaactgaaggattttcattaaccttaaatggaaaagaaatcggtcaagggttcaatacaactccagtgaaacttgatttccgtcaaagtgctgaaatgactgaaaatagtccagaagcatacgaaaaacttctattagactgcctaaatggcgatagtacaaacttctctcattgggacgaagttgcccaatcttggcgcattgttgacattattcgacatgcttgggataaaacagacgtttctttccctaattatgccgctggcacaatgggcccgcaagctgccttcgacttattagaaaaagatggctttacttgggaatggcaaccagataactggtaccgtgaccgcggtcaacttgatcaataa

SEQ ID NO: 2035 - protein, 507 aa, Enterococcus faecalis V583
MNEKVALFTIFGGTGDLAKRKLYPSLFRLYKKGLLAERFAVIGTARREWTDEYYREIVRETIQDLNPTAEEATEFSSHFYYQSHNVNDTEHYNTLKELSDRLNEQYHLEGNHVYYLAMAPQFFGTIVNHLKSQHIISEEGFDRLIIEKPFGSDYESAYELNEEIRAAFPEQDIFRIDHYLGKEMIQNISAIRFANNIFESQWNNRYIDNVQITFAESLGVEDRGGYYDHSGALKDMVQNHILQVVALLSMEPPVAFSEKEIRTEKVKALRAIRLYSEEEALQNFVRGQYGEGQLADQTFAAYRDEPNVAETSSTETFVAGKFLIDNFRWSGVPFYVRTGKRLTEKGTRINIVFKQVPINVFKDDTCEECDKTDLPPNVLTIYIQPTEGFSLTLNGKEIGQGFNTTPVKLDFRQSAEMTENSPEAYEKLLLDCLNGDSTNFSHWDEVAQSWRIVDIIRHAWDKTDVSFPNYAAGTMGPQAAFDLLEKDGFTWEWQPDNWYRDRGQLDQ

SEQ ID NO: 2036 - DNA, 1647 bp, Streptomyces avermitilis MA-4680
  CDS (1)..(1647): transl_table=11
atgagcaagactccttcgaccgggacgccgggcaccgagaagcctgtcaccgggacgccggccaccgagacgcctgtcacggaggctccggtcaccgaggctccggtcaccgaggcgtcggccgtcgactgggccaaccccctgcgcgacccccgggaccgccgtctcccccgtatcgcgggcccctcgggcctcgtcatcttcggggtcaccggcgacctgtcccgcaagaagctgatgccggccatctacgacctggccaaccgcggtctgctcccgccgggcttctcgctcctcgggttcgcccgccgggactgggaggaccaggacttcgcgcaggtggtgcacgactcggtgcgcgagcacgcccgcacggagttccgcgaggaggtctggcagcagctcgccgagggcatgcggttcatcccgggcgacttcgacgacgacatggcgttcaagcaactgcgcgcgtccgtcgacgagctggacgcctcccgcggcaccagcggcaactacgccttctatctctcggtaccgccgaagttcttcccgaaggtcgtccagcagctcaagaagcacgggctcgcggacgcgccggagggctcctggcggcgtgcggtcatcgagaagccgttcggccacgacctggccagcgcgcgtgagctgaacgcgatcgtgcacgaggtgttcgacccggaccaggtgttccgcatcgaccactacctgggtaaggagaccgtccagaacatcctggcgctccgcttcgccaaccagatgtacgagccggtctggaaccggtcgtacgtcgaccacgtacagatcaccatggccgaggacatcggcatcggcggccgtgcggggtactacgacggcatcggttcggcccgtgacgtcatccagaaccacctcctccagctgatggcgctgaccgccatggaggagccggccgccttcgacgccgagtcgctgctcgccgagaagctgaaggtcctcaagtccgtgaagctgccggggaacctgggcgagcacaccgtgcgcggtcagtacacggcgagctggcagggcggcgagcgggtgcgcggctacctccaggaggacggcatcgaccccaggtcgacgacggacacctacgcggccgtgaagctggaggtcgacaaccgccgctgggcgggcgtccccttctatctgcgcaccggcaagcgtctgggccgccgggtgaccgagatcgcggtggtcttccagcgcgcgccccactcccccttcgactcgaccgccaccgaggagttgggcgccaacgcgatcgtcgtccgtgtccagcccgacgagggcatgaccgtgcgcttcggttcgaaggtgccgggtacgtcgatggagatccgggacgtctcgatggacttcgcgtacggcgagtcgttcaccgagtccagcccggaggcgtacgaacggctgatcctggatgtcctgctcggcgacgccaatctcttcccccgccatcaggaggtggaagagtcctggaagatcctcgacccgatcgaggggtactgggacacgcacggcaagcccgcgcagtacccctcgggatcctggggtcccgaggaagccgacgagatgctcgcacgagacggacggagctggcgcaggccatga

SEQ ID NO: 2037 - protein, 548 aa, Streptomyces avermitilis MA-4680
MSKTPSTGTPGTEKPVTGTPATETPVTEAPVTEAPVTEASAVDWANPLRDPRDRRLPRIAGPSGLVIFGVTGDLSRKKLMPAIYDLANRGLLPPGFSLLGFARRDWEDQDFAQVVHDSVREHARTEFREEVWQQLAEGMRFIPGDFDDDMAFKQLRASVDELDASRGTSGNYAFYLSVPPKFFPKVVQQLKKHGLADAPEGSWRRAVIEKPFGHDLASARELNAIVHEVFDPDQVFRIDHYLGKETVQNILALRFANQMYEPVWNRSYVDHVQITMAEDIGIGGRAGYYDGIGSARDVIQNHLLQLMALTAMEEPAAFDAESLLAEKLKVLKSVKLPGNLGEHTVRGQYTASWQGGERVRGYLQEDGIDPRSTTDTYAAVKLEVDNRRWAGVPFYLRTGKRLGRRVTEIAVVFQRAPHSPFDSTATEELGANAIVVRVQPDEGMTVRFGSKVPGTSMEIRDVSMDFAYGESFTESSPEAYERLILDVLLGDANLFPRHQEVEESWKILDPIEGYWDTHGKPAQYPSGSWGPEEADEMLARDGRSWRRP

SEQ ID NO: 2038 - DNA, 1536 bp, Chlamydophila caviae GPIC
  CDS (1)..(1536): transl_table=11
atgacaagtaatgaaaataaagatggcgggaaaaccttgctcccatgtcctccctgtgtgatggtaatcttcggagctaccggagatcttacagcgcgcaagttattcccagcattgtatcatcttattaaagagggtaggctgtctgaaaactttgtctgcgtaggttttgctagaagaaagaaaagccatgaggaatttcgtgaagaaatgaaacaggcaatacaaaacttttcacgtgctcaagagcttgatatccgcatttgggaagagtttgaatcacgtatattttatcacgaatccaacttctcttctcccgagggctacgcctcattaaaagagagacttgaggatattgataagaaatataagacacaagggaatcggctattttacttatcaacgcctccagagtatttccccgagattatcgaaaatattaataagcataagcttttttatcatgatcaaagcgaaggcaagccatggtctcgagtgattatagaaaaaccctttggtgtggatctacaaagcgctaaagaactacaaaagtacatagatgataatctagatgaagattctgtctatcgtatcgatcattatctggggaaagaaactgtacagaatattcttacgatacgttttgcaaatactctatttgagtcttgttggaattctcaatacattgatcatgtgcaaattagcgtgagtgaatctataggcataggcacacgagggaacttctttgaaaaatctggaatgcttcgtgatatggtgcaaaaccatatgatgcagcttttatgtctattaactatggaacctccttcagtattcaattctgaagaaattaaaaaagaaaagatcaatattcttaagaaaatccgtccatttgctaaagaagatattattcgtggacaatatggtccgggagaagtacaagatgtgtctgttcttggctatcgtgaagaagacaatgtagctccagattctaatgtggagacttatgtagcgttaaagatgtttattgataacccacgttggttgggagtgcctttttatcttcgagccggtaaacgtctttctaaacgctctacagatatctctatcattttcaaaaagtctttgcccagcttatttacagcggaatcttgtcccgtatgtcctttagaaaatgatctgctaattatccgtatacaaccggatgaaggcgtggccttgaaatttaactgtaaagttcctggaatgaataatatcgtacgtcctgtgaaaatggattttcgctacgatacgtatttcaagacaacggcgccggaagcttacgagagattgctttgtgactgtattctaggcgataggattctatttacctgtagtgatgaagttatggattcttgggagctctttacaccgattttaaagcgatgggagcaagattcctcagatgcgcatttccctaattatgttgctggatcttcaggtcctaaggaagcagaggaattactacaagctgatggaagaagttggcgtcccctgtaa

SEQ ID NO: 2039 - protein, 511 aa, Chlamydophila caviae GPIC
MTSNENKDGGKTLLPCPPCVMVIFGATGDLTARKLFPALYHLIKEGRLSENFVCVGFARRKKSHEEFREEMKQAIQNFSRAQELDIRIWEEFESRIFYHESNFSSPEGYASLKERLEDIDKKYKTQGNRLFYLSTPPEYFPEIIENINKHKLFYHDQSEGKPWSRVIIEKPFGVDLQSAKELQKYIDDNLDEDSVYRIDHYLGKETVQNILTIRFANTLFESCWNSQYIDHVQISVSESIGIGTRGNFFEKSGMLRDMVQNHMMQLLCLLTMEPPSVFNSEEIKKEKINILKKIRPFAKEDIIRGQYGPGEVQDVSVLGYREEDNVAPDSNVETYVALKMFIDNPRWLGVPFYLRAGKRLSKRSTDISIIFKKSLPSLFTAESCPVCPLENDLLIIRIQPDEGVALKFNCKVPGMNNIVRPVKMDFRYDTYFKTTAPEAYERLLCDCILGDRILFTCSDEVMDSWELFTPILKRWEQDSSDAHFPNYVAGSSGPKEAEELLQADGRSWRPL

SEQ ID NO: 2040 - DNA, 1476 bp, Shigella flexneri 2a str. 2457T
  CDS (1)..(1476): transl_table=11
atggcggtaacgcaaacagcccaggcctgtgacctggtcattttcggcgcgaaaggcgaccttgcgcgtcgtaaattgctgccttccctgtatcaactggaaaaagtcggtcagctcaacccggacacccggattatcggcgtagggcgtgctgactgggataaagcggcatataccaaagttgtccgcgaggcgctcgaaactttcatgaaagaaaccattgatgaaggtttatgggacaccctgagtgcacgtctggatttttgtaatctcgatgtcaatgacactgctgcattcaaccgtctcggcgcgatgctggatcaaaaaaatcgtatcactattaactactttgccatgccgcccagcacttttggcgcaatttgcaaagggcttggcgaggcaaaactgaatgctaaaccggcacgcgtagtcatggagaaaccgctggggacgtcgctggcgacctcgcaggaaatcaatgatcaggttggcgaatacttcgaggagtgccaggtttaccgtatcgaccactatcttggtaaagaaacggtgctgaacctgttggcgctgcgttttgctaactccctgtttgtgaataactgggacaatcgcaccattgatcatgttgagattaccgtggcagaagaagtggggatcgaagggcgctggggctattttgataaagccggtcagatgcgtgacatgattcagaaccacctgctacaaattctctgcatgattgcgatgtctccgccatctgacctgagcgcagacagcatccgcgatgaaaaagtgaaagtactgaagtccctgcgccgcatcgaccgctccaacgtacgcgaaaaaaccgtacgcgggcaatatactgcgggcttcgcccagggcaaaaaagtgccgggatatctggaagaagagggcgcgaacaaaagcagcaatacagaaaccttcgtggcgatccgcgtcgacattgataactggcgctgggccggtgtgccattctacctgcgtactggtaaacgtctgccgaccaaatgttctgaagtcgtggtctatttcaaaacacctgaactgaatctgtttaaagagtcgtggcaggatctgccgcagaataaactgactatccgtctgcaacctgatgaaggcgtggatatccaggtactgaataaagttcctggccttgaccacaaacataacctgcaaatcaccaagctggatctgagctattcagaaacctttaatcagacgcatctggcggatgcctatgaacgtttgctgctggaaaccatgcgtggtattcaggcactgtttgtacgtcgcgacgaagtggaagaagcctggaaatgggtagactccattactgaggcgtgggcgatggacaatgatgcgccgaaaccgtatcaggccggaacctggggacccgttgcctcggtggcgatgattacccgtgatggtcgttcctggaatgagtttgagtaa

SEQ ID NO: 2041 - protein, 491 aa, Shigella flexneri 2a str. 2457T
MAVTQTAQACDLVIFGAKGDLARRKLLPSLYQLEKVGQLNPDTRIIGVGRADWDKAAYTKVVREALETFMKETIDEGLWDTLSARLDFCNLDVNDTAAFNRLGAMLDQKNRITINYFAMPPSTFGAICKGLGEAKLNAKPARVVMEKPLGTSLATSQEINDQVGEYFEECQVYRIDHYLGKETVLNLLALRFANSLFVNNWDNRTIDHVEITVAEEVGIEGRWGYFDKAGQMRDMIQNHLLQILCMIAMSPPSDLSADSIRDEKVKVLKSLRRIDRSNVREKTVRGQYTAGFAQGKKVPGYLEEEGANKSSNTETFVAIRVDIDNWRWAGVPFYLRTGKRLPTKCSEVVVYFKTPELNLFKESWQDLPQNKLTIRLQPDEGVDIQVLNKVPGLDHKHNLQITKLDLSYSETFNQTHLADAYERLLLETMRGIQALFVRRDEVEEAWKWVDSITEAWAMDNDAPKPYQAGTWGPVASVAMITRDGRSWNEFE

SEQ ID NO: 2042 - DNA, 1491 bp, Nitrosomonas europaea ATCC 19718
  CDS (1)..(1491): transl_table=11
atgaatgatgcaaaaatgagccagactgaaaagctgccctgcctgtttgtcatttttggtgcaactggagatctcgcctcaaacaagttgctgcccgcgttatttgagttggaaaatgctggccgcctggcagataatttttccatcgttgctttctcgcgccgcgagtggacaactgacgattggctcgaacatctgcgtgaaatactgaagaataggattgatcaatcttttccggaaggagtgctggagcgtttttttgcacgtttccgttatcagcagggagatctcaacgatatcgaatcctatcgtgtgttagctgccggtctggcgcccggatcggcttgttctcgtacggtattttatcttgcgatcaggcctgctgatttcgttgcggtgatcaggaatctcaaagctgctggcctcaatgagccgcgaggaatgaaccgtgtagtgattgaaaaaccgtttggagaggatcttgaatcggcacaggtactgaatcgcttattgcatcagcattttgatgaagagcagatttatcgtatcgatcatttccttggtaaggaaaccgtacagaatctgcttgttttccggtttgccaatacgttgatcgagccactgtggaatcgtaattttattgatcatgtacaaattacggtggcggaatcgggtggtattgaaaaacgtgcagggtattatgatcgtgctggtgcgttgcgtgatatgttgcagaatcatttgatgcaattattgaccgtagttgccatggaaccgccacctgctcttgaggcagatgctttacgtgacgaaaaggtcaaagtactacgttcgattcgtcccattgccaagcgcgcgatacatgcccatgctgtgcgcgctcaatatactcacggtaatatcgatgggcaggtggtggcaggttatcagcaggaagataatgttgaacgggattcgattaccgaaacttttgtggcagccaagttctacattgataattggcgctggcggggagtgccgttttatctgcgtacaggtaagcgtatgccgaaacagaattcgatgatcgcaattcgtttcaagcatcctccccagcaacttttccgtgaaacaccattggaatggattgcaccaaactgggtgttgctttcgattcagcctgaagaatcgatgcacatggaaattcatgttaaacaacccggtctcgatatgaatacccgggtgatgcagatgaacgcaagttttctcaaaaccgatgaacaggcgctggatgcttatgaagcgctactgctcgacgtcattgaaggcgatcgctcacttttcattcgttttgatgaagttgaatgggcgtggcaagtgattgatcctattctgaaacattgggtggtagagcgcgaatatatcccgacttaccctgctggcagttgggggccggcagaggctaatcgcttgtttgacaacgatgatcagacctggcgcaacgagctttag

SEQ ID NO: 2043 - protein, 496 aa, Nitrosomonas europaea ATCC 19718
MNDAKMSQTEKLPCLFVIFGATGDLASNKLLPALFELENAGRLADNFSIVAFSRREWTTDDWLEHLREILKNRIDQSFPEGVLERFFARFRYQQGDLNDIESYRVLAAGLAPGSACSRTVFYLAIRPADFVAVIRNLKAAGLNEPRGMNRVVIEKPFGEDLESAQVLNRLLHQHFDEEQIYRIDHFLGKETVQNLLVFRFANTLIEPLWNRNFIDHVQITVAESGGIEKRAGYYDRAGALRDMLQNHLMQLLTVVAMEPPPALEADALRDEKVKVLRSIRPIAKRAIHAHAVRAQYTHGNIDGQVVAGYQQEDNVERDSITETFVAAKFYIDNWRWRGVPFYLRTGKRMPKQNSMIAIRFKHPPQQLFRETPLEWIAPNWVLLSIQPEESMHMEIHVKQPGLDMNTRVMQMNASFLKTDEQALDAYEALLLDVIEGDRSLFIRFDEVEWAWQVIDPILKHWVVEREYIPTYPAGSWGPAEANRLFDNDDQTWRNEL

SEQ ID NO: 2044 - DNA, 1488 bp, Haemophilus ducreyi 35000HP
  CDS (1)..(1488): transl_table=11
atgaatatagaaaatagttgtatcgtaatttttggtgcatcaggggacttaacattccgtaaacttatcccagcactatataatctttttaaagtaggtcggttaggcgaacatttttctgttttaggtgtttcacgatcagacctaactcacgattcttttagacaaaaaatgcgtgaagcattaatcaaatatgagcaagcaagcgggcagtttttagatgatttttgcaatcacttgtattatcaagcaatcaacaccgctgatccggacgattatgccaaactattaccttgtttagatgaattacacaataaatacggtagctgtggtaacactttatattacctttcaacaccgcctagtttatacggcattatccctgaatgcttggcggctcacggcttaaccactgaagaatatggttggaaacggattatcatcgaaaaaccatttggttacgatattaaaacagccaaacaactcgatgagaaaatacatcattattttgaagaacatcaaatttaccggatcgatcattatcttggtaaagaaaccgtgcaaaatttattagtactccgtttctcaaacggtttatttgaaccactttggaatcgtaattttattgaatatgtagaaattaccggtgcagaatcattaggtgttgaagatcgtggtggttattatgatggatctggtgcaatgcgtgatatgttccaaaaccatttactacaagtattagcaatggttgccatggaacctccggccattattaatgctaactcaatgcgtaatgaagtagcaaaagtcttatatagcttacgtccattaagcactgaagacgtcaaaaataatgtggtacttggtcaatatacctccggtgaaattgatgacttagttgtacccggttatactgaagaaaatggcgttcccaacgattcaaatacagaaacttatttagccgtaaaatgcgaaattgataactggcgttgggccggcgtgccattttatgtgcgaacaggtaagcgtttgcctactcgggtaactgaaatcgtaatccacttcaaaacgactccacatccagtctttagccaaaatgcgcctgaaaataaattaattatccgggtacaacctgatgaaggtatttctatgcggtttggtttgaaaaaacccggtgctggttttgaggcgaaagaagtctctatggattttcgctattctgatttaagctctgcttcaagtttattaaccgcttatgaacggttactattagatgcattaaaaggagatgcgaccctatttgcccgaaccgatgccgtacatgcctgttggcatttcgtacagccgattctagactataaggcagaacgtggccgagtgtatgaatatgaagcaagcagttgggggcctaaagaagctgataaactgattgcacgcaatggcaaagtatggcgtaaaccgtctggaatgatgaagaaaaaaatatag

SEQ ID NO: 2045 - protein, 495 aa, Haemophilus ducreyi 35000HP
MNIENSCIVIFGASGDLTFRKLIPALYNLFKVGRLGEHFSVLGVSRSDLTHDSFRQKMREALIKYEQASGQFLDDFCNHLYYQAINTADPDDYAKLLPCLDELHNKYGSCGNTLYYLSTPPSLYGIIPECLAAHGLTTEEYGWKRIIIEKPFGYDIKTAKQLDEKIHHYFEEHQIYRIDHYLGKETVQNLLVLRFSNGLFEPLWNRNFIEYVEITGAESLGVEDRGGYYDGSGAMRDMFQNHLLQVLAMVAMEPPAIINANSMRNEVAKVLYSLRPLSTEDVKNNVVLGQYTSGEIDDLVVPGYTEENGVPNDSNTETYLAVKCEIDNWRWAGVPFYVRTGKRLPTRVTEIVIHFKTTPHPVFSQNAPENKLIIRVQPDEGISMRFGLKKPGAGFEAKEVSMDFRYSDLSSASSLLTAYERLLLDALKGDATLFARTDAVHACWHFVQPILDYKAERGRVYEYEASSWGPKEADKLIARNGKVWRKPSGMMKKKI

SEQ ID NO: 2046 - DNA, 1497 bp, Candidatus Blochmannia floridanus
  CDS (1)..(1497): transl_table=11
atgcggtcaaaaacaactaccactcaagcttgtaatttcattatttttggagctaaaggagatttagctcgtaggaaattaattcctgcgctatatcaattagagaaaatcggttctatacatcctagaacttttatattaggagtaggtagagcggaatgggatttattaacatatattaaaattgtgcgttcttctttagagagatttatgaaagaatctattaatgaaaatatatggtgtcgtttttctaaaagatttgatttttgtaatttagatgttaatcaaacggaacaatttgtacatgtgctgaataaattaaaaaatttagatttattgacaataaattattttgcaatgcctcctcatacatttggatctatttgtaaaggattaagtttagtgggtttaaataaagaaagaaatagaatagtgatagaaaagccattaggaatgaactttgattctgctcgtgttattaattctcaagtatctaaatattttcatgaaactcaaatttatcgggtagatcattatttaggaaaagaagctattttaaatttgttggtattacgttttgcaaattctgtatttttttcaaattgggataacaataccattgatcatgtacaaattactgtttcagaagaggttggaattgaaggtcgttggggttattttgatgctatggggcaaatgcgtgatatggtacaaagtcatttattacaaattcttactatcattgctatgtctcctccttttgatttaagtgctgattgtattcgggacgaaaaagttaaagtgttacgttcattgcgtatgattaatactaatacgatacatgaaattgcggtacgaggtcaatatactgctggttttattaatggtcaaccagtaccaggatatttagaggaaataggttctaacaaggatagtaaaacggaaacatttgtatcgattaaagtgaatatagataattggaggtggtttggagtgcctttttatttacgtactggaaaaagattagcaatgaaatattctgaagttgttatatattttaaaaaaccaatattgaatttatttaaagattcttattcaattttacctaataataaattaattattcgattacaaccatatgaaggaatagatatgcagattctaagtaaaataccgggattaggtaataagaatcgtttaaaaattactaatttgaatttaaatttgaggaaaatattttccggagaatacatattagatgcttatgaacgattattattagaggtaatgcgtgggattcaagtattatttgtacgttatgacgaaatagaggattcatggaggtgggttgattctgttatagaggcatggtctttagttgatggtgttccaaaattatataaagctggtacatggggtccgagtgaatctacagaaatgattcgtaaaggaaatcatcattggaataaatgtacgttgaaatatacgaatatttga

SEQ ID NO: 2047 - protein, 498 aa, Candidatus Blochmannia floridanus
MRSKTTTTQACNFIIFGAKGDLARRKLIPALYQLEKIGSIHPRTFILGVGRAEWDLLTYIKIVRSSLERFMKESINENIWCRFSKRFDFCNLDVNQTEQFVHVLNKLKNLDLLTINYFAMPPHTFGSICKGLSLVGLNKERNRIVIEKPLGMNFDSARVINSQVSKYFHETQIYRVDHYLGKEAILNLLVLRFANSVFFSNWDNNTIDHVQITVSEEVGIEGRWGYFDAMGQMRDMVQSHLLQILTIIAMSPPFDLSADCIRDEKVKVLRSLRMINTNTIHEIAVRGQYTAGFINGQPVPGYLEEIGSNKDSKTETFVSIKVNIDNWRWFGVPFYLRTGKRLAMKYSEVVIYFKKPILNLFKDSYSILPNNKLIIRLQPYEGIDMQILSKIPGLGNKNRLKITNLNLNLRKIFSGEYILDAYERLLLEVMRGIQVLFVRYDEIEDSWRWVDSVIEAWSLVDGVPKLYKAGTWGPSESTEMIRKGNHHWNKCTLKYTNI

SEQ ID NO: 2048 - DNA, 1524 bp, Prochlorococcus marinus str. MIT 9313
  CDS (1)..(1524): transl_table=11
atgagcaccacgatcaccaaccctttacgggttggactacgtcaagagcgggttatcgctccgcagtgcctagtcatctttggtgcaagtggcgacctgacccaccgaaaattggttccagcccttttcgagctatacaaacaacggcggctaccgagtgaattcgccctacttggctgcgcgcgacgtccttggagcaacgaaatatttcgccaaaaaatggctgaagccctcggcgagactatcaacgaaaaccatcttgcttgggatcaattcgccgctggtcttttttacgaacctgtcgatctacagaagccagaagacctcatcaaactcagccatcggctggaagagattgatcgactccgcgccacccgcagcaatcgcaccttctatctttcggtgtcaccaaagttctacggcagtggctgcaaagctcttgctaatgccggtcttctaagtgatcccaaacgcagtcgagtggttatcgaaaaaccattcgggcgtgattacgccagtgctcagtctttaaatcaaatcgtccaaagctgtggccaagagaatcaaatcttccgcatcgaccactacctcggcaaagaaacagtccagaacatccttgtgctgcgattcgcaaataccatctttgaaccaatctggaaccggaattacatctccagcgttcaaatcacagccgctgaaaccgtaggggttgaagaacgagccaactactacgaatcgtcaggggccctgcgcgacatggtgcaaaaccatctcacccagatgctggccatcaccacgatggaaccgccagggcgctttgaccctgaggcaatccgcaatgaaaaagccaaggttttgctagcggctcgcctagcggatgagttggaaccttggaactgctgcatccgtggccagtacgcacctggcggcaccaaggaagctccgatagcaggctaccgacaggagccgggtgtcgatcccagcagcaccaccgagacctatgtagcgatgaaacttttcatcgacaactggcgctggcagggagtgcccttttacgttcgcactggcaaacgactggcaaagcgtcttagtgaagtggttctcacctttcgagaagcacccgtgcatcttttcgatgccgctgggggcagccctacagcgaaccaactcatcctgcgaatccaaccggatgaaggagccgagtggcgctttgaggtgaagtcacctggttcaggcatgcgcagccgaccagtagagatggaattctcctatgacgaatccttcggtgagccatccgatgagggatacgtccgacttttagccgatgccatgctcagtgacccaactttattcacccgcagtgatgaggttgaagcagcgtggcgcctttacacccctctcctggaactgattgaagacagcccatggcaattgcccattcatccctatgaatcacgtacctgggggcccgctgctgccgataccctgcttgccaatgacggattgctctggcgccgaccctga

SEQ ID NO: 2049 - protein, 507 aa, Prochlorococcus marinus str. MIT 9313
MSTTITNPLRVGLRQERVIAPQCLVIFGASGDLTHRKLVPALFELYKQRRLPSEFALLGCARRPWSNEIFRQKMAEALGETINENHLAWDQFAAGLFYEPVDLQKPEDLIKLSHRLEEIDRLRATRSNRTFYLSVSPKFYGSGCKALANAGLLSDPKRSRVVIEKPFGRDYASAQSLNQIVQSCGQENQIFRIDHYLGKETVQNILVLRFANTIFEPIWNRNYISSVQITAAETVGVEERANYYESSGALRDMVQNHLTQMLAITTMEPPGRFDPEAIRNEKAKVLLAARLADELEPWNCCIRGQYAPGGTKEAPIAGYRQEPGVDPSSTTETYVAMKLFIDNWRWQGVPFYVRTGKRLAKRLSEVVLTFREAPVHLFDAAGGSPTANQLILRIQPDEGAEWRFEVKSPGSGMRSRPVEMEFSYDESFGEPSDEGYVRLLADAMLSDPTLFTRSDEVEAAWRLYTPLLELIEDSPWQLPIHPYESRTWGPAAADTLLANDGLLWRRP

SEQ ID NO: 2050 - DNA, 1479 bp, Chromobacterium violaceum ATCC 12472
  CDS (1)..(1479): transl_table=11
atggagactcgttctacccctaccccggccttcgacatggtgctgttcggcggcgccggcgacctggtgatgcgcaagctgctgccttcattgtaccaggcgcataacgccggcctgctcaacgaacagggccgcatcctggcgctgggccgcaaggacctgagccgcgacgactacctggcttccgtcgaaaagcagtcccgcatccatatcaagtcccacttcgacgatgccgcctggcagagcttctgtagccgcatcgactacctgcgcgtcgacgcctcccaggccgccgactacccggcgctggccgagaaggtcggcgacgacgccggcaaggtggtggtgtgctaccttgccaccgcgcccaatctgttcgccggcatctgcgaaaacctggccgcggtcggcctgaaccgccccaatgtgcgggtggtgctggaaaagccgctgggcaccgacctcgactcgtccaacgagatcaacgacgacgtcgcccgcttcttcaaggaagagcagctgtaccggatcgaccactacctgggcaaggagtcggtgcagaacctgatggccatccgcttcgccaacgcgctgttcgagccgctgtggcgccgcgaatggatacacgacgtgcagatcaccatttcggaagaactgggcgtcggcagccgcggcgatttctacgacggcaccggcgcgctcagggacatggtgcagaaccacctgctgcagctgctgtgcatcgtggcgatggagccgccggccaacctggaagccgacgccgtccgcgacgagaagctgaaggtgctgaaggcgctgcgcccgttcaccgagcacgatgtcgccgccaagaccgtgcgcggccagtacaaggccggcgccagcggcggccagccggtggtcggctaccaggacgaggccggcattcccgccggcagccagaccgagaccttcgtcgccatcaaggccgagatcgacaactggcgctgggccggcgtgcccttcttcctgcgcaccggcaagcggatgcaggaacgcctggccgagatcgtcatcaacttccgcgatgtgccgcaccaggtgttcaccggcccgctgggcggcagccaccacgccaaccggctggtgatccgcctgcagcccgaggaaagcatccgcctgtacttcctggccaaggagccgggcgacaccatgcgcctgcagccggcctacctggacctggacttctacaaggcgttcaaggtgcgccgcgccgacgcctacgagcgcctgctcttggacgtgatccgcggcaagctggcgctgttcatgcgccgcgacgagctgatcgaggcctggcgctgggtcgagcccatcatggacacctgggccgccagcaccaacaacccgcccaagcaatacaccgccggcagctggggcccggccgcgtccagcgcgctgctgtcgcgcgacggcatcagctggcacgaggagtgttaa

SEQ ID NO: 2051 - protein, 492 aa, Chromobacterium violaceum ATCC 12472
METRSTPTPAFDMVLFGGAGDLVMRKLLPSLYQAHNAGLLNEQGRILALGRKDLSRDDYLASVEKQSRIHIKSHFDDAAWQSFCSRIDYLRVDASQAADYPALAEKVGDDAGKVVVCYLATAPNLFAGICENLAAVGLNRPNVRVVLEKPLGTDLDSSNEINDDVARFFKEEQLYRIDHYLGKESVQNLMAIRFANALFEPLWRREWIHDVQITISEELGVGSRGDFYDGTGALRDMVQNHLLQLLCIVAMEPPANLEADAVRDEKLKVLKALRPFTEHDVAAKTVRGQYKAGASGGQPVVGYQDEAGIPAGSQTETFVAIKAEIDNWRWAGVPFFLRTGKRMQERLAEIVINFRDVPHQVFTGPLGGSHHANRLVIRLQPEESIRLYFLAKEPGDTMRLQPAYLDLDFYKAFKVRRADAYERLLLDVIRGKLALFMRRDELIEAWRWVEPIMDTWAASTNNPPKQYTAGSWGPAASSALLSRDGISWHEEC

SEQ ID NO: 2052 - DNA, 1539 bp, Gloeobacter violaceus PCC 7421
  CDS (1)..(1539): transl_table=11
atggcaaccgattcgacgacgcccttcccaatcgccccaccggctggaccctgcgcgatggtcgtcttcggggcggctggagatcttaccggtcggctactggtgccggcgctctataacctggccgcgggcgggctattaggtgaaaaatttgtcttgatcgggctggcccgcgccccgctcaccgacacgaattttcggacacaactgggcgaggcgctgcagcgccatggcactgctgcagtcaatccggccgtctgggatgcccttgcgcagcgatttttttatctggaagccaacttcgaagctcccgatacctacgcccgcctgcggcagcggctggccgaggcggaagccgaattcaacacggacggcaacacgctattttatctggcgaccgcccctgagcacttcggcggcattgtcgagcagttgggctgggctgggctgtcccgcgaggagaccggtcactggcgacgcgtcgtcctcgaaaaacccttcggtcaggatctcgcctccgcccaagccctcaacgcccgcctccggcgcgacctctccgaaagccaggtctaccgcatcgatcactacctgggcaaagaaaccgtccagaacatcctggtcctgcgcttcgccaacggcctgttcgagcccctctggaaccgcaaccacatcgaccacgtgcagatcaccgtcgccgagagcgtcggggtcgaaaagcggggcggttactacgagcgggccggggcgctcagggacatggtgcccaaccatcttttccagttgctggccctcaccgcgatggagccgcccacctgcttcggggccgacgccgtgcgcaccgaaaagaccaagctgctggaagccgtccagaccctcaagcccgcccagatctccacccacgtcgtgcgcgctcagtacgccgcgggtacggtcggggagcgggcactgccggactaccgcgccgagccgcgggtggcgccggattcgaccaccgagacgttcgtcgccctcaaactcgccgtcgacaactggcggtgggcgggggtgcccttttatctgcgcaccggcaaggccctggccaggcgcagcaccgagatcgccatccgcttcaagcaggcgccctacgcgatgtttcgcgacacgccggtggagcgcctcacacccaactatctggtgctccacatccagccggaggagcgcatcagcctcgaattcggcgccaaagtgccgggaccggcggtgcgcatggccggcgtcggcatggacttttgctacaatcgccacttcggcggcgagcgggcgatcggctatgaaacgttgctctacgactgcatgatgggcgatgctaccctgtttcagcgctcggatacggtggaggcggcctggcaggtcgtcgaaccgatctttgctgcctggaacgattcaactgccgacctggtcacctatccggccggcagttggggtccgcagcaggcggaggagttgctcgggcgcgacggtcggcagtggcggagagcggaccatgattcttgcgggtga

SEQ ID NO: 2053 - protein, 512 aa, Gloeobacter violaceus PCC 7421
MATDSTTPFPIAPPAGPCAMVVFGAAGDLTGRLLVPALYNLAAGGLLGEKFVLIGLARAPLTDTNFRTQLGEALQRHGTAAVNPAVWDALAQRFFYLEANFEAPDTYARLRQRLAEAEAEFNTDGNTLFYLATAPEHFGGIVEQLGWAGLSREETGHWRRVVLEKPFGQDLASAQALNARLRRDLSESQVYRIDHYLGKETVQNILVLRFANGLFEPLWNRNHIDHVQITVAESVGVEKRGGYYERAGALRDMVPNHLFQLLALTAMEPPTCFGADAVRTEKTKLLEAVQTLKPAQISTHVVRAQYAAGTVGERALPDYRAEPRVAPDSTTETFVALKLAVDNWRWAGVPFYLRTGKALARRSTEIAIRFKQAPYAMFRDTPVERLTPNYLVLHIQPEERISLEFGAKVPGPAVRMAGVGMDFCYNRHFGGERAIGYETLLYDCMMGDATLFQRSDTVEAAWQVVEPIFAAWNDSTADLVTYPAGSWGPQQAEELLGRDGRQWRRADHDSCG

SEQ ID NO: 2054 - DNA, 1539 bp, Gloeobacter violaceus PCC 7421
  CDS (1)..(1539): transl_table=11
atgaccgcatcgttgactggaggattgagcgccaatccgttgcgccaggggctgcgcctggagcgcacgcccaagcctgccattttgactatcttcggggcctccggagatttgaccgtccgcaagctgatcccagccctttacgacctggcccgcgaccggcgattgccccctgaattcacggtcgtgggctatgcccgtcgcccctacagccacgaagaatttcgcgaaatgatgaaggaaggggtagccaagtattcgcgcagcaagctgggcaacctctgggaaagtttctccaagggcatctattacttccagggggacctcgacaatctccagaattttaaggacctcggcgaatttttgcagactctagatagcgagcgcggcaccctcggcaaccgggccttctacatggctaccgccccgagtttctttgcgcccatcatcgagaatctgggcggagcgggcctggcgggcgacgtgcgcaacacgcgcctggtgatcgaaaaacccttcggccacgacctggagtcggctcaaaatctcaacaaagtcgtccagcaagtctttcacgaaaagcaggtctaccgcatcgatcactacctgggcaaagagaccgttcagaatatcctggtcttccgctttgccaattcgatctgggaaccgctctggaacaaccgctacgtcgatcacgtgcagatcacggtagcagagacggtgggggtcgaaaaccgcgggccgtactacgacgaagccggcggcgcgctgcgcgacatgatccagaatcacctggtacagctgttggctctcaccgccatggagccgccctccgccttcgaggccgacaccgtgcgcgacgaaaaagtgaaagtcctgcgcgccacccaggtcggccaggggccgaacggccttgcggcagtccgcgcccagtacgccaacggctggatttcaggcgaaccggtgcacgcctaccgcgacgaaccccgggtcaaccccgacgttcagactgcgagctatattgccgccaaattcatgatcaacaattggcgctggaagggcgtgccgtttttgctgcgcaccggcaaacgcctcgccaagcgcgtcaccgaaattgccctgcaatttcgggaagtgccgcacctgctctttccgtcgagcagcgcgggccagctcagcccgaacatgctggtgctgcgcatccaaccggacgaaggcatttcgctgcgcttcgaggccaagcggccggtggccgacatcgccatgcgctcggtgaacatggactttcactacggcggcaccttcgaggtcgcctcgcccgaagcctacgagcggttgctgctcgattttctgctcggggatcagacgctgtttacccgcgcggacgaagtcgaggcggcctggaagatcgtcacaccgctcatcgagcgctgggaaatccagaaagccggcgatctcaattactacgacgccggttcctgggggccgagtgccgcgagtaagctgatggacaacggccgccgctggcggcgcctatag

SEQ ID NO: 2055 - protein, 512 aa, Gloeobacter violaceus PCC 7421
MTASLTGGLSANPLRQGLRLERTPKPAILTIFGASGDLTVRKLIPALYDLARDRRLPPEFTVVGYARRPYSHEEFREMMKEGVAKYSRSKLGNLWESFSKGIYYFQGDLDNLQNFKDLGEFLQTLDSERGTLGNRAFYMATAPSFFAPIIENLGGAGLAGDVRNTRLVIEKPFGHDLESAQNLNKVVQQVFHEKQVYRIDHYLGKETVQNILVFRFANSIWEPLWNNRYVDHVQITVAETVGVENRGPYYDEAGGALRDMIQNHLVQLLALTAMEPPSAFEADTVRDEKVKVLRATQVGQGPNGLAAVRAQYANGWISGEPVHAYRDEPRVNPDVQTASYIAAKFMINNWRWKGVPFLLRTGKRLAKRVTEIALQFREVPHLLFPSSSAGQLSPNMLVLRIQPDEGISLRFEAKRPVADIAMRSVNMDFHYGGTFEVASPEAYERLLLDFLLGDQTLFTRADEVEAAWKIVTPLIERWEIQKAGDLNYYDAGSWGPSAASKLMDNGRRWRRL

SEQ ID NO: 2056 - DNA, 1476 bp, Photorhabdus luminescens subsp. laumondii TTO1
  CDS (1)..(1476): transl_table=11
atggcggttacttctacagctcaggcttgtgatttagtcatttttggcgctaaaggggatttggcacgccggaaattattgccttccctttatcagcttgagaaagcgggttatatccacccagaaacccggattatcggtgttggccgggctgattgggataaaaaagcttataccaaggttgttgaagaagctttaaatacattcttgccagaaaaattagattcagaattatggaagatattgagtgagcgtttggcgttctgcaatctggatgttaatcaaaaagaagactttgccaaattgaaggcaattcttaagcaggataatcggcctgcaatccattattttgcgatgccacccagtacttttggttcggtttgtcacggattgggccttgcagggctaaataaagagccaaatcgagttgtgatggaaaagcctttagggaccgatcttgaatcatccaaagccatcaatgatgaagtagctaaatatttcaatgagcgtcaggtttatcgcatcgatcattatctgggtaaagaaaccgtattgaatctgttggcgctgcggtttgccaattccttgtttgtgaataattgggataaccggacaattgatcatgtacaaattacagtagctgaagaagtcggtattgaaggccgttggggttattttgaccaagctgggcagatgcgcgatatgattcagaatcacctgttgcaaatattgaccatgattgctatgtctcctccggcagatctgacgacagaccgtatccgtgatgaaaaagtaaaagtattgcgttctctgcgctgtattgatcatacgaatgtgcgggagaagacggtacgaggtcaatacactgctggttttgttcaggggcataaggtaccggggtatctggaagaagagggggcaaaccagtccagccggacggaaacttttgtctctatccgtgtcgatattgatgactggcgttgggccggggttcctttctacctgagaaccggtaaacgtctgccaacgaaatgttccgaggtggtagtttatttcaaaaagcctgcactgaacttgttttctgagtcttatcaacaactaccgcagaataagctaacgattcgtttgcagccggatgaaggtattgatattgaagtgctgaacaaagctccggggctggaacacaagcatcgtctgcaaaccactaagctagatctgagtttctctgaaacgtttaaccatattccgttggcggatgcttatgagaggttactgctggaggctatgcggggtattcaggcgctatttgttcgtcgtgatgaagtggaagaagcgtggaaatgggttgattctattatgaatgcatgggcggcggataatgatgcgcctaagccttatcaggcggggacgtgggggccggtcgcttctgttgcgatgatcactcgcgatggtcgttcgtggaatgagtttgagtaa

SEQ ID NO: 2057 - protein, 491 aa, Photorhabdus luminescens subsp. laumondii TTO1
MAVTSTAQACDLVIFGAKGDLARRKLLPSLYQLEKAGYIHPETRIIGVGRADWDKKAYTKVVEEALNTFLPEKLDSELWKILSERLAFCNLDVNQKEDFAKLKAILKQDNRPAIHYFAMPPSTFGSVCHGLGLAGLNKEPNRVVMEKPLGTDLESSKAINDEVAKYFNERQVYRIDHYLGKETVLNLLALRFANSLFVNNWDNRTIDHVQITVAEEVGIEGRWGYFDQAGQMRDMIQNHLLQILTMIAMSPPADLTTDRIRDEKVKVLRSLRCIDHTNVREKTVRGQYTAGFVQGHKVPGYLEEEGANQSSRTETFVSIRVDIDDWRWAGVPFYLRTGKRLPTKCSEVVVYFKKPALNLFSESYQQLPQNKLTIRLQPDEGIDIEVLNKAPGLEHKHRLQTTKLDLSFSETFNHIPLADAYERLLLEAMRGIQALFVRRDEVEEAWKWVDSIMNAWAADNDAPKPYQAGTWGPVASVAMITRDGRSWNEFE

SEQ ID NO: 2058 - DNA, 1581 bp, Vibrio vulnificus YJ016
  CDS (1)..(1581): transl_table=11
gtgtcactgatagggtgggctcatcctttaagccgtatccaggcacacaacaagtacctcgtttttaagggaaagatgatggtaataccagaaaacagcagcatcgtaatttttggtgcttcaggtgatttaacatatcgcaagttgatccctgctttataccacctctacgcaagtaagcagctaccagaaaactttgctattttaggtgtcagccgcactgaatacagcgatgaatcttatcgcgaaaagttaaagcgctctcttcaggaaatggagaaaacggaaccagctattctggattcatttatcgaccatcttcactatcaagccatcaacacgtcagacacacaagactacgcgaagttggttgtacgtttagacgaattggccgctcaataccagttcgaacaacgtaatacactgttttatcttgccacaccgccaagcctttacagtgtcattccttcaagccttgctcatcacggtcttaacagtgaagaggatggttggaaacggctgatcattgaaaaaccgtttggttatgatttggcttcggcacgtcagctcgacaaagaaatacacgattgcttccaagagcatcagatctatcgcatcgaccactaccttggaaaagagaccgtgcaaaacttacttgttttccgtttctctaacgccatgtttgaacctctgtggaaccgcaacttcattgattatgtggaaatcacaggtgccgaattccttggcgtggaagagcgtggcggttattacgacggctccggcgctgtgcgcgatatgttccaaaaccatctactgcaagtattggcaatggtgggcatggaaccgcctgcacaaattaatgccgattccatgcgtgatgaagtagtgaaagttctgcagtgtttaaaaccgcttgaggaagatgatctgcgtaacaacctagttttgggtcaatacacagcatcagacgtgcgcggacaacatctgcttggctaccgtgaagaaaacggcgtagcggacgattctcgtactgagacttacattggtcttaaagcgtacatcaataactggcgttggaatggcgtgccattctacgtgcgcacgggtaagcgtcttccaactcgcgtaacagaagtggttatccacttcaaacaaacaccgcatccggtatttggccaaaacgccccagaaaacaaactgatcattcgtattcagcctgatgaaggcattcaaatgagcttcggtttgaaagaacctggtgcaggctttaaagcgaaagaagtgaagatgaacttccattatgcttcgttgcaagagacgcaaatgctgaccgcctatgagcgtctgcttcttgatgcgttaaacggcgatgcaacgctgtttgctcgcagcgatgcggtcgaagcgtgttggaaatacgttcaacctatcctcgatttcaaacaagatccacaagcactctttggttatgcctgcggcacttgggggccaaaagagtcagacgatttgctgcagcgtgacgatcgcgcgtggcgtttcccatgcaaaaacctaacagatacggactactgcgaactatga

SEQ ID NO: 2059 - protein, 526 aa, Vibrio vulnificus YJ016
MSLIGWAHPLSRIQAHNKYLVFKGKMMVIPENSSIVIFGASGDLTYRKLIPALYHLYASKQLPENFAILGVSRTEYSDESYREKLKRSLQEMEKTEPAILDSFIDHLHYQAINTSDTQDYAKLVVRLDELAAQYQFEQRNTLFYLATPPSLYSVIPSSLAHHGLNSEEDGWKRLIIEKPFGYDLASARQLDKEIHDCFQEHQIYRIDHYLGKETVQNLLVFRFSNAMFEPLWNRNFIDYVEITGAEFLGVEERGGYYDGSGAVRDMFQNHLLQVLAMVGMEPPAQINADSMRDEVVKVLQCLKPLEEDDLRNNLVLGQYTASDVRGQHLLGYREENGVADDSRTETYIGLKAYINNWRWNGVPFYVRTGKRLPTRVTEVVIHFKQTPHPVFGQNAPENKLIIRIQPDEGIQMSFGLKEPGAGFKAKEVKMNFHYASLQETQMLTAYERLLLDALNGDATLFARSDAVEACWKYVQPILDFKQDPQALFGYACGTWGPKESDDLLQRDDRAWRFPCKNLTDTDYCEL

SEQ ID NO: 2060 - DNA, 1650 bp, Corynebacterium diphtheriae NCTC 13129
  CDS (1)..(1650): transl_table=11
ttgcccaacgtgagtaaaccagtggctaacggaaacaccgtagaaagtaacaatgctgaacttgctttcggcggtgttgatttttcctattctgatacacatgagaattcgtgtagtagaacgtcaagcaaatgggtcaatcccctaagggatgctgaggacaagcgcctcccccgcatcgcgggcccgtgcggaatggttatttttggtgtaactggtgatctcgctcggaaaaagctcctgccagcgatctatgatcttgcacacaggggcctattgcctgcaggtttcagtcttgtcggctacggtcgacgaggctggtctaaggccgactttgaaaattacgtcaagcaagcagttgttgccggtgcccgtaccgatttccgcgaaaatgtttgggcacgacttgccgaaggtatgcacttcgttcaaggcaatttcgatgatgatgcagcatttgatagtttggcatcgcttttggcggatcttgatcagacccgtggaactgccggtaactgggccttttatctctctgttccaccagattatttttcggatgtttgccatcaacttcagcgctcaggcatggctacagccgagggcaattcatggcgtcgcgtcattgtggaaaagccttttgggcatgatcaagaatcagcacgtcagctaaacaacttgatcaattcagtattccctgaaaagtcagtatttcgtatcgaccactacttgggtaaagagacagtgcaaaatattatggcactgcgctttgcaaaccagctatttgatccgctctggaattctcactatgttgaccatgtccaaatcaccatggctgaggatatcggtctaggcggtcgcgctggttactatgatggaatcggcgccgctagagacgttatccaaaaccaccttattcagctgttggcgctggtagctatggaggaacccgtagcttttaccccacaagagcttcaggctgaaaaaatcaaggttcttcgtgccactcgcccagtagaaccttttgctaaaacaacagcccgagggcaatattcgcgcggttggcagggatctgagctcgtccaaggtctacgagaagaagacggatttgatcctaattccggaactgaaacttatgctgcctgcacactcgagataaattcgcgtcgttgggccggtgtgcccttttatcttcggactggaaagcgtttaggacgccgggtgactgagatcgcccttgtattcaaggatgcgcctcatcagccatttagcgaaggtagccgtcattcccaaggccgcaacgtcgtagtgatccgagtccagcctgatgagggtatgctgatgcgttttggttccaaggttcctggtaacacgatggaagtacgcgacgtcaacatggacttctcgtactcagaggcatttaccgaagaatcaccggaagcctacgaacgactcattctcgatgcacttctcgacgaagcaagtctcttcccaacaaatgaagaagttgagcttagctggcagatcctagatccgatattgaacttctggtctgatcgtgggcaaccggaagaataccccgctggcacctggggcccagctggtgcagacaagatgctggagcgcgaaggtcgcgcttggcgtcgaccttaa

SEQ ID NO: 2061 - protein, 549 aa, Corynebacterium diphtheriae NCTC 13129
MPNVSKPVANGNTVESNNAELAFGGVDFSYSDTHENSCSRTSSKWVNPLRDAEDKRLPRIAGPCGMVIFGVTGDLARKKLLPAIYDLAHRGLLPAGFSLVGYGRRGWSKADFENYVKQAVVAGARTDFRENVWARLAEGMHFVQGNFDDDAAFDSLASLLADLDQTRGTAGNWAFYLSVPPDYFSDVCHQLQRSGMATAEGNSWRRVIVEKPFGHDQESARQLNNLINSVFPEKSVFRIDHYLGKETVQNIMALRFANQLFDPLWNSHYVDHVQITMAEDIGLGGRAGYYDGIGAARDVIQNHLIQLLALVAMEEPVAFTPQELQAEKIKVLRATRPVEPFAKTTARGQYSRGWQGSELVQGLREEDGFDPNSGTETYAACTLEINSRRWAGVPFYLRTGKRLGRRVTEIALVFKDAPHQPFSEGSRHSQGRNVVVIRVQPDEGMLMRFGSKVPGNTMEVRDVNMDFSYSEAFTEESPEAYERLILDALLDEASLFPTNEEVELSWQILDPILNFWSDRGQPEEYPAGTWGPAGADKMLEREGRAWRRP

SEQ ID NO: 2062 - DNA, 1515 bp, Rhodopseudomonas palustris CGA009
  CDS (1)..(1515): transl_table=11
gtgaccacgcaagccaacagcaatcaggtccccgaaggctgcgcgttcgtcatcttcggcgccaccggcgacctcacccatcggctggtgattccggcgctctacaacctcgccgaagccaacctgctgcctgaaaaattctgcgtcgtcggcgtcacccgcaaggagatgtccagcgacgatctgcgcgacagcctgatgcagggcctgcgcaaatacgcgacccgcccggtcgacgacaaggtcgctgatcagcttctgtactgcgtcaccgcggtcagcgccgatcccagcgagccggcctcgttcgagcggttgcgcgagcggctggagaagctcgaggccaatcgcaacaccggcggcaaccggctgttctatctcgccacgccgcctgatgcgttcgcgccgatcgccaccgagctcggccgcgccgggctgcttaaggagaccagcggcgcctggcgccggctggtggtggagaagccgttcggcaccgacctcgcctcggccaaggcgctgaacgatcatctgctcagcatcatctccgagcacgagctgtaccggatcgatcactacctcggcaaagagacggtgcagaacatcctggtgctgcggttctccaacggcatgttcgagccgatctggaacagagagcacatcgaccacatccagatcaccgtcgaggaaaagctcggcgtcggccatcgcggcagcttctacgacaagaccggcgcgctgcgcgacatggtgccgaaccatctgtttcaactgctgtcgctggtggcgatggagccgccggcgcatttcaacgcccacgcggtgcgttcggccaaggccgacgtgctcgcggcgatccagatccaaaccgaagaggaagcgctgcgcaattcggtgcgcggccaatacacttcgggcaagatcggcgacaccgacatcccggactatcgcagcgccaaggacgtcgcggccgacagcaccaccgagaccttcgcggcgctgacactgtcgatcgacaattggcgctgggccggcgtgccgttctatctgcgcaccggcaaggcgctgtcgggcaagcgcaccgaggtggcgatcaaattcaaggaggcgccattctcgatgtttcgctgcaccccggtgcaggaactgtcgcagaactttctggtcattgggatcgaaccggtcgaaggcatctcgctgcagttcaacaccaaggtgccgggaccgatgatcgccatcgacggcgtcgagatgaccttccgctacaaggactacttcaaggtggcgccgagcaacggctacgagacgctgctgcacgactgcatgatcggcgacaacatcctgttccaacgcgccgacggtgtcgaagccggctggcgcgcggtacaacccttcctcgacgcctggaagaaggccggcgcgcacggccttcagatctatcgcgccggcagcgatggcccggaagacgccgacgaactgctggggcgcgacggtcgcaattggcggaagccgacctga

SEQ ID NO: 2063 - protein, 504 aa, Rhodopseudomonas palustris CGA009
MTTQANSNQVPEGCAFVIFGATGDLTHRLVIPALYNLAEANLLPEKFCVVGVTRKEMSSDDLRDSLMQGLRKYATRPVDDKVADQLLYCVTAVSADPSEPASFERLRERLEKLEANRNTGGNRLFYLATPPDAFAPIATELGRAGLLKETSGAWRRLVVEKPFGTDLASAKALNDHLLSIISEHELYRIDHYLGKETVQNILVLRFSNGMFEPIWNREHIDHIQITVEEKLGVGHRGSFYDKTGALRDMVPNHLFQLLSLVAMEPPAHFNAHAVRSAKADVLAAIQIQTEEEALRNSVRGQYTSGKIGDTDIPDYRSAKDVAADSTTETFAALTLSIDNWRWAGVPFYLRTGKALSGKRTEVAIKFKEAPFSMFRCTPVQELSQNFLVIGIEPVEGISLQFNTKVPGPMIAIDGVEMTFRYKDYFKVAPSNGYETLLHDCMIGDNILFQRADGVEAGWRAVQPFLDAWKKAGAHGLQIYRAGSDGPEDADELLGRDGRNWRKPT

SEQ ID NO: 2064 - DNA, 1545 bp, Mycobacterium avium subsp. paratuberculosis K-10
  CDS (1)..(1545): transl_table=11
atgagcccggctcgcaccgcgcagcaatggcataacccgttacgcgacaagcgcgacaagcggctcccgcgcatcgccgggccgtgcggaatggtgatcttcggcgtcaccggcgatctggcccgcaagaaggtcatgcccgccatctacgacctggccaaccgcgggctgctgccgcccagcttctcgctggtcggcttcgcccgaagggattggagcacccaggatttcggcaaggtggtatatgaggccgtcaaggagcactgccgcaccccgttccggcaggagaactgggatcggctggccgagggattccgtttcgtgccaggcgctttcgacgacgacgaggcgttcggccggctcgccgagacgctggacaaactcgacgccgagcggggcaccggcggtaatcacgccttctacctggccatcccgcccaagtccttccccgtcgtgtgcgaacaactgcacaagtccgggctggcccgcccgcagggcgaccgctggagccgagttgtcatcgagaagccgttcggccacgacctggagagcgcgcagagcctgaacaaggccgtcaacgccgtctttcccgaggagtcggtcttccgcatcgaccactacctgggcaaggagacggtccgcaacatcctggcgctgcggttcgccaaccagttgttcgacccgatctggaactcgcactacgtcgaccacgtgcagatcaccatggccgaggacatcggcctgggcgggcgggccggctactacgacggcatcggcgccgcgcgcgacgtcatccagaaccacctgatgcagctgctggcgctgaccgcgatggaagagccggtcagcttcagcccgttggcgctccaggccgagaagatcaaggtactctcggccacccacctcgcccacccgctcgacgagaccaccagccgcggccagtacaccgcgggctggcagggcggcgagaaggtggtcgggctgctcgacgaggagggcttcgccaaggactcgatcaccgagacgttcgccgccatcaccctcgaggtggacacccgccgctgggcgggggtgccgttctacctgcggaccggaaaacgcttgggccgcagggtgaccgagatagccctggtgttcaagcgcgcgccgcatctgccgttcgacgcgacgatgaccgatgagctgggcgccaacgccatggtgatccgggtgcagcccgacgagggtgtcacgctgcggttcggttccaaggtgccgggcaccgcgatggaggtccgcgacgtcaacatggacttctcctacgggtcggcgttcgccgaggaatcaccggaggcctacgagcagttgatcctcgacgtgctgctgggtgagccgtccctgttcccggtcaacgccgaagtcgaattggcttggcacatcctcgatcccgtgctcgacaactgggcgagcggcggcaggcccgagccctacgaggccggcacctggggcccggattcggcgttcgagatgctgcaccggacgggccgcgaatggcggcggccatga

SEQ ID NO: 2065 - protein, 514 aa, Mycobacterium avium subsp. paratuberculosis K-10
MSPARTAQQWHNPLRDKRDKRLPRIAGPCGMVIFGVTGDLARKKVMPAIYDLANRGLLPPSFSLVGFARRDWSTQDFGKVVYEAVKEHCRTPFRQENWDRLAEGFRFVPGAFDDDEAFGRLAETLDKLDAERGTGGNHAFYLAIPPKSFPVVCEQLHKSGLARPQGDRWSRVVIEKPFGHDLESAQSLNKAVNAVFPEESVFRIDHYLGKETVRNILALRFANQLFDPIWNSHYVDHVQITMAEDIGLGGRAGYYDGIGAARDVIQNHLMQLLALTAMEEPVSFSPLALQAEKIKVLSATHLAHPLDETTSRGQYTAGWQGGEKVVGLLDEEGFAKDSITETFAAITLEVDTRRWAGVPFYLRTGKRLGRRVTEIALVFKRAPHLPFDATMTDELGANAMVIRVQPDEGVTLRFGSKVPGTAMEVRDVNMDFSYGSAFAEESPEAYEQLILDVLLGEPSLFPVNAEVELAWHILDPVLDNWASGGRPEPYEAGTWGPDSAFEMLHRTGREWRRP

SEQ ID NO: 2066 - DNA, 1449 bp, Lactobacillus johnsonii NCC 533
  CDS (1)..(1449): transl_table=11
atgaaaaatattccagttgttatgattatttttggtggctccggagatttagctcatagaaagctttatccagccttatttaatttgtatcaaaaaggtttaattcatgatcattttgctgtaattggtacagcgagaagaccttggagccatgaatatttgcaagaacaagtagttgaagcagttaaagaaagctgtgacaactttgatgaaaaagaagcaaaagaattcgcttcacatttttattaccagtctcacgatgtaactgatattggccactacattgccttgaaggaattagcagctaaacttgatgaaaaatatcaagcagaaggaaatcgaattttctacatggctatggcaccaagattttttggtacaattgctactcacattaatgatcaaaaattgcttggtagcggctttaaccgtttagtaattgaaaagccatttggtcatgatttagcttcagcagaaaagttaaaccgagaaattggcgaaagttttgatgaagagtcggtatatcgaattgaccactatcttggaaaagaaatggttcaaaatattatgcctctaagaatgactaatccaattgttaagaatatctggaataatgactatatcgcaaatatgcaagtaactttagcagaaagtctaggagtaggaactcgtggtggttactacgaaacatctggtgctttacgtgatatggttcaaaaccatatttttcaaattattacacttttagctatgcctgagcctaaaggacttgattcagaccatattcaccaagctaaacaagaattattagatagtctagtaattccaactccagaaatggttaaaaagcatttctcacgaggacaatatttagctgatgataatgaagtagagtatttaaaggcagatcaagttgcactagactctaaagtagaaacatttgtagctggagaagttaaattcaaaaagggtccagtagctgatgtgccaatttactttagaactggtaagaaaatgaaggataaggtttctcgcattgatattgttcttcaccatatgaataatttatacggtagcgcacattcaaataatatctcaattattattgatccaattagtgaaatttatttcacaattaatggaaagaagattacagctgaaggtttaagaagagaaaaccttagttataagttttctaaggaagaaatggagcaagttccagatggctacgaacgattgcttcacgatgtgtttgtagcagatagaactaactttactcactggtcagaattgaagcaatattggaagttcgttgatgcagttgaagatgtttggcaagatgaaaataaagatgttaagcagcttgaacaatatccaagtggtaagttcggtacggaatcaagtaatcatatttttgaaaaagatagcgagcactggatttaccgttaa

SEQ ID NO: 2067 - protein, 482 aa, Lactobacillus johnsonii NCC 533
MKNIPVVMIIFGGSGDLAHRKLYPALFNLYQKGLIHDHFAVIGTARRPWSHEYLQEQVVEAVKESCDNFDEKEAKEFASHFYYQSHDVTDIGHYIALKELAAKLDEKYQAEGNRIFYMAMAPRFFGTIATHINDQKLLGSGFNRLVIEKPFGHDLASAEKLNREIGESFDEESVYRIDHYLGKEMVQNIMPLRMTNPIVKNIWNNDYIANMQVTLAESLGVGTRGGYYETSGALRDMVQNHIFQIITLLAMPEPKGLDSDHIHQAKQELLDSLVIPTPEMVKKHFSRGQYLADDNEVEYLKADQVALDSKVETFVAGEVKFKKGPVADVPIYFRTGKKMKDKVSRIDIVLHHMNNLYGSAHSNNISIIIDPISEIYFTINGKKITAEGLRRENLSYKFSKEEMEQVPDGYERLLHDVFVADRTNFTHWSELKQYWKFVDAVEDVWQDENKDVKQLEQYPSGKFGTESSNHIFEKDSEHWIYR

SEQ ID NO: 2068 - DNA, 1590 bp, Yersinia pestis biovar Microtus str. 91001
  CDS (1)..(1590): transl_table=11
ttgaccttttttgacgcatttttatctgggtttactggctatagtcaaagagagtacattagtaatgtaagaaaattacaaatatcctgcaacgaggagaatagcatggcagtaatgaatacagtccaggtagcccaggcgtgtgacctggtgattttcggcgctaaaggtgatttggctcgccggaaactgctgccttctctttaccaattagaaaaagcgggtcatatccacccagatactcggataatcggtgttggccgtgctgagtgggataaagatgcgtacaccgctgtggtaaaggaagccctcgatacctttatgaaagagccgctggatgacgagctatggcaaaaactcagctcgcgcctcgacttctgcaatctggatgtgaatgacagtaagcatttcaccaaattaggtaaaatgctcgatcaaaaacatcgcaccacgattaactactttgctatgccgccgagtacatttggtgcgatttgtaaaggcctgggagaagccgggttaaacaaagagcctagccgagtggtaatggaaaaaccattgggaaccgatttagcgccctcaagggtaattaacgatcaggtagccgagtatttcaacgaatgtcaggtttaccgtattgaccactatttagggaaagaaacggtattaaacctgttggcgcttcgcttcgctaactcgttgttcgcctcaaactgggacaaccgcactatcgatcatgtgcaaattaccgtcgcagaagaggtcggaattgaagggcgttggggctattttgatcaggccggtcagatgcgtgacatgatccaaaaccatctgttgcaaatcctgacgatgatcgccatgtcaccccccgcagatctcagtacggatcgcatccgtgatgaaaaagtaaaagtactgcgttcgctgcgccgtattgatcacaccaatgtgcgcgaaactacagttcgtgggcaatatactgccggctttgtacagggcaataaagtgccgggttatctggaagaggaaggcgcgaataagaatagcaataccgaaacatttgtgtctattcgggtggatatcgatgactggcgttgggctggggtacctttctacctgagaaccggtaagcgcctacccagcaaatgctctgaagttgtggtttactttaagaaccccgcactgaatctcttccgcgaatcttatcaacaactgccacaaaacaaactgacaattcgtttgcaaccggacgaagggatcgaaattgaagtgctgaataaagtccccggattggaacataagcatcgtttacaaaccactaagcttgatctcagtttctccaaaaccttcaatgagcagcatattgctgatgcctatgaacgtctgctactggagaccatgcggggtattcaagcgctgtttgtgcgccgtgatgaggtcgaagaggcgtggaaatgggtcgattctattatgaatgcgtgggcggcagataatgaagcaccaaaaccataccagtccggtacatgggggcctgtggcatccgttgctatgatcacccgtgatggccggtcatggaatgagttcgagtaa

SEQ ID NO: 2069 - protein, 529 aa, Yersinia pestis biovar Microtus str. 91001
MTFFDAFLSGFTGYSQREYISNVRKLQISCNEENSMAVMNTVQVAQACDLVIFGAKGDLARRKLLPSLYQLEKAGHIHPDTRIIGVGRAEWDKDAYTAVVKEALDTFMKEPLDDELWQKLSSRLDFCNLDVNDSKHFTKLGKMLDQKHRTTINYFAMPPSTFGAICKGLGEAGLNKEPSRVVMEKPLGTDLAPSRVINDQVAEYFNECQVYRIDHYLGKETVLNLLALRFANSLFASNWDNRTIDHVQITVAEEVGIEGRWGYFDQAGQMRDMIQNHLLQILTMIAMSPPADLSTDRIRDEKVKVLRSLRRIDHTNVRETTVRGQYTAGFVQGNKVPGYLEEEGANKNSNTETFVSIRVDIDDWRWAGVPFYLRTGKRLPSKCSEVVVYFKNPALNLFRESYQQLPQNKLTIRLQPDEGIEIEVLNKVPGLEHKHRLQTTKLDLSFSKTFNEQHIADAYERLLLETMRGIQALFVRRDEVEEAWKWVDSIMNAWAADNEAPKPYQSGTWGPVASVAMITRDGRSWNEFE

SEQ ID NO: 2070 - DNA, 1557 bp, Apis mellifera
  CDS (1)..(1557)
atgatgaaaacgtccactgaagagagtttgcactttatcagacagtcgctgaaatcggaagaaatggatcatctcgaaggaattcattttgatcgaaattatcctcatgtgtttgtaacactcggagcttctggcgacttagcaaaaaaaaaaatctatccaacgctatggtggttgtttagggataatcttttaccaaaaactaccacattctttggttacgcacgtacaaatatgtccgtgaatcaattacgagcaaaatgtcatccatatatgaaagtaaaatcggatgaagaaaaaaagtatgaagaattttggaaattgaattactatatggctggccaatatgattcgcaaaaaggattcgaaatgttgaacaatgaattgaagaaatacgaggaaggatacaatattaccaatagactgttttacttggccttaccaccgaatgtatttgaaaatgtaaccgtgcacattaggaatgtttgtatgagtgataaaggatggaccagagtaattatagaaaaaccgttcggccgcgacgcgactacgtcacagattttgtccgatcatctcgcatccttattcagagaagatcagatttatcgtatcgatcattatttgggaaaagaaatggttcaaaatttaatgactctacgatttggtaatcgaatattcagtccaacgtggaatagggataatgtggcctctgtacaaattacatttaaagagccatttggtacgcaaggaagaggcggctatttcgatgaatttggtatcattagggacgtcatgcagaatcatttgttacaaattttatcattggttgcgatggagaagccagcgtcttgtcatccggatgatatacgagatgagaaggtaaaagtgttaaagtgcataaagactttgacgctggacgatgttgtattaggtcaatatattggtgatcctgaatccgatgatcctgatgctcgacttggctatttggatgatgctactgtaccttccggttcaattactcccacatattcccttgctgtgttgaaaattaataacgagcggtgggatggtgttccatttatcctcaaatgtggaaaagctttaaacgaacgaaaggcagaagttagaatacaatatcaagatgtacctggcgatatatttgatggaaaagcgaaaagaaatgaattggtaattagagtacaaccaggtgaagcattatatattaaaatgatgacgaaatcacctggtattacatttgaaatggaagaaacagaattagatcttacatatggttctaggtataaggatctaaaacttccggatgcatacgaacgattaattttggatgtattttgtggctcgcaaatgcatttcgtacgtaatgatgaactttcgcaagcatggagaatttttacgcccttgcttcatcaaatagaaaacgaaagaattaaaccaattccgtataaatatggttcacgaggacccaaagaagcagatgaaatggcaaaagaaaataatttcgcttactatggttcatacaaatgggtgaaaccataa

SEQ ID NO: 2071 - protein, 518 aa, Apis mellifera
MMKTSTEESLHFIRQSLKSEEMDHLEGIHFDRNYPHVFVTLGASGDLAKKKIYPTLWWLFRDNLLPKTTTFFGYARTNMSVNQLRAKCHPYMKVKSDEEKKYEEFWKLNYYMAGQYDSQKGFEMLNNELKKYEEGYNITNRLFYLALPPNVFENVTVHIRNVCMSDKGWTRVIIEKPFGRDATTSQILSDHLASLFREDQIYRIDHYLGKEMVQNLMTLRFGNRIFSPTWNRDNVASVQITFKEPFGTQGRGGYFDEFGIIRDVMQNHLLQILSLVAMEKPASCHPDDIRDEKVKVLKCIKTLTLDDVVLGQYIGDPESDDPDARLGYLDDATVPSGSITPTYSLAVLKINNERWDGVPFILKCGKALNERKAEVRIQYQDVPGDIFDGKAKRNELVIRVQPGEALYIKMMTKSPGITFEMEETELDLTYGSRYKDLKLPDAYERLILDVFCGSQMHFVRNDELSQAWRIFTPLLHQIENERIKPIPYKYGSRGPKEADEMAKENNFAYYGSYKWVKP

SEQ ID NO: 2072 - DNA, 1533 bp, Nasonia vitripennis
  CDS (1)..(1533)
atgactctcaaaagtgttctgatcctctgcttcttggccactgcagccttgactgaatgctctgccttcgtcccgcattcattgagtacacggaacaattcagtgcatcatacttttgttcttctcggggcttcgggtgacctcgcaaggcgtgaaatctatccagctctttggtacctctatcgcgatggacatttgctacgaaagacagaaatattcggttacgcccggagcgccctaacgatcgctgatatcagagacagagtcgcgcccttcatccaggtgaggccccaggaagaaaagctctacaacgagttctggtcgctaaaccggtacatcaacggcagcagagatgccgataccgattacgacaggattgacaggatcgtcagcgaatccgaagaaaatgaaaccgaggctaaccggatattctatttggcgctgccgcctgcaaccttccccagcaccgcgtcccagatcaagagagcttgcatggccaaaaaaggctctaccaaagtcgtggtggagaaacctttcggtcgcgattccgaaagctccgaagaactctcggaacatctcaaagcactcttcaccgaggaccagatttaccgcatggatcacttcctcggctacgagatggtgcagaacctcctcagtctcagattcgccaatcggatgttcagtccgtcttggaacaaggataatatcgccgcgatcgaggtcgacttcaaagaaaacttcggtatcgagggtcgtggtggatacttcgatagcaacggaatgatcagagatgttatgcagaaccacctgctgcagatcgtgtcactcgttgctatggagaaaccggtatccgttgatcccgatgatatcagagatgccaaggtggaactcttgaagaaaacaaggccgattgtcctagacgatgtcgtgatcggtcagtacgtagcaaatcccgaatcggcggatccccgcgagaggatcggctacagagatgacccgaccgtaaagaacgactcgatcaccgcgacgttcgccttgaccgtcctgaaaatcgacaacgagcgctggactggtgtccccttcatcattcgcgctggcaaaggactgaatataaaccgaaccgatgtgatcatccagtacaaaaacgttgaccacgatctcttcgacggccagagtcagaggaacgagttggtcattcgtcgcgtgggaaagaccgaagctttgcaggccaagctcacctctaaaactccaggtatcacgagcgatctcgagagaatcacgattgattttgactacactaaggcgtatcccgatctgcaaaatccaggagcttacgagcgtctgcttctcgacgttttccgcggcacccagttaaactttgtgcgctccgatgagctcagcgaagcttggcgaattttcacgcctgcgcttcacgaaattgaaaacaggaagatccggcctatcgagtataaatttggcacgactggtcctgtagaagccgatgaaatggagaaaaaaaacgattttttgtaa

SEQ ID NO: 2073 - protein, 510 aa, Nasonia vitripennis
MTLKSVLILCFLATAALTECSAFVPHSLSTRNNSVHHTFVLLGASGDLARREIYPALWYLYRDGHLLRKTEIFGYARSALTIADIRDRVAPFIQVRPQEEKLYNEFWSLNRYINGSRDADTDYDRIDRIVSESEENETEANRIFYLALPPATFPSTASQIKRACMAKKGSTKVVVEKPFGRDSESSEELSEHLKALFTEDQIYRMDHFLGYEMVQNLLSLRFANRMFSPSWNKDNIAAIEVDFKENFGIEGRGGYFDSNGMIRDVMQNHLLQIVSLVAMEKPVSVDPDDIRDAKVELLKKTRPIVLDDVVIGQYVANPESADPRERIGYRDDPTVKNDSITATFALTVLKIDNERWTGVPFIIRAGKGLNINRTDVIIQYKNVDHDLFDGQSQRNELVIRRVGKTEALQAKLTSKTPGITSDLERITIDFDYTKAYPDLQNPGAYERLLLDVFRGTQLNFVRSDELSEAWRIFTPALHEIENRKIRPIEYKFGTTGPVEADEMEKKNDFL

SEQ ID NO: 2074 - DNA, 1524 bp, Magnaporthe grisea 70-15
  CDS (1)..(1524)
atggccgcagaatcccatgccgctgctgagctggagctcaaggacaacacggtcattgtggtccttggtgcctccggcgatttggccaagaagaagacttatcccgcacttttcggactctaccggaaccaatttctccccaaggacatcaagattgttggatatgccaggacaaagatggaccacgaagagtacattaggagaatcaggtcgtacattaagacgcccaccaaggacatggagcagcagctcgatgatttctgctcgctctgcacctacgtcgcgggccagtatgacaaggacgagtctttctacaacctgaacgaccacctcgaggacctcgagaagaaccagagcgaggctcacaggcttttctacatggcgctcccgcccagcgtcttcacaattgtgtcacagcatctgaagaggtgctgctaccccaccagggggattgctcgcgtcattgtcgagaagccttttggcaaggacctggccagctcccgcgagctccagaagtctctggagccagactggaaggaggatgagttgttccgcatcgatcattacctgggcaaggagatggtcaagaacatcctcatccttcgctttggaaactccttcttgggcgcgacatggaatcgtcaccacatcgacaacgtacagatcacgttcaaggagccattcggcaccgaaggtcgcggtggctactttgacgagtttggcatcattcgtgacgtaatgcagaaccacttgctgcaggttctgacactgttggccatggagcggccaatttcattctcctctgaggacattcgtgacgagaaggtccgcgttctccgtgccattcctgccatcgagcccaagaatgtcatcatcggccagtacggaaggtcgcttgacggaagcaagccgtcgtataaggaggacgacacagtgcccaaggagtcgaggtgcccgaccttctgcgcattggtagcttacatcaagaacgagcgctgggatggcgtccccttcattatgaaggcaggaaaggccttgaacgagcagaagacggagattcgtatacagttcaaggatgtcacatccggtattttcaaggatatcccccgcaacgagctcgtcatgcgtatccagcccaacgagagtgtctacatcaagatgaactcgaagctgcccggactcagcatgcagacggtggttacggagctcgatctgacttaccgccgacgcttctctgatctgaagatccctgaggcttacgaatcattgattttggactgcttgaagggtgatcactccaacttcgttcgagacgacgagctcgacgccagctggagaatcttcacacccctgctgcactatcttgatgataacaaggagattgtgcccatggagtacccctacggctcacgaggacctgccgttctcgacgattttaccgcatcatatggctacaaattcagcgacgcggctggctaccagtggcctaccactagcgccgcgctgcacgctaacaagttctga

SEQ ID NO: 2075 - protein, 507 aa, Magnaporthe grisea 70-15
MAAESHAAAELELKDNTVIVVLGASGDLAKKKTYPALFGLYRNQFLPKDIKIVGYARTKMDHEEYIRRIRSYIKTPTKDMEQQLDDFCSLCTYVAGQYDKDESFYNLNDHLEDLEKNQSEAHRLFYMALPPSVFTIVSQHLKRCCYPTRGIARVIVEKPFGKDLASSRELQKSLEPDWKEDELFRIDHYLGKEMVKNILILRFGNSFLGATWNRHHIDNVQITFKEPFGTEGRGGYFDEFGIIRDVMQNHLLQVLTLLAMERPISFSSEDIRDEKVRVLRAIPAIEPKNVIIGQYGRSLDGSKPSYKEDDTVPKESRCPTFCALVAYIKNERWDGVPFIMKAGKALNEQKTEIRIQFKDVTSGIFKDIPRNELVMRIQPNESVYIKMNSKLPGLSMQTVVTELDLTYRRRFSDLKIPEAYESLILDCLKGDHSNFVRDDELDASWRIFTPLLHYLDDNKEIVPMEYPYGSRGPAVLDDFTASYGYKFSDAAGYQWPTTSAALHANKF

SEQ ID NO: 2076 - DNA, 1494 bp, Gibberella zeae PH-1
  CDS (1)..(1494)
atggagctcaagcagaacacgacaatcgtcgtgctcggtgcttctggtgatctggcgaaaaagaagacgtaccctgcgctttttggtctttaccgaaaccagttccttcccaaggatgtcaagattgtcggatatgcccgtactaagatggatcacgacgaatatattcgacgcatcaagtcatacataaagacccctacaaaggagattgagcaacaacttgaagacttcgccgcgctttgcacctatgtctctggtcagtacgacaaggacgagtccttccagggtctcgagcagcacctccaggaggttgaagcaagccgtcctgagaaccaccgtctcttctatatggcgctcccccccagtgttttcaccattgtttctcagcacctcaagaagatctgttaccccaagaacggcatcgcgcgtgtcattgtcgagaagcctttcggcaaggatcttgccagctcccgtgagcttcaaaagtccctcgagcctgattggaacgagcaggagctgttccgaattgaccattaccttggtaaggagatggtcaagaacatcctgatccttcgatttggtaactctttcctcggcgctacgtggaaccgacaccacatcgacaacgttcagatcacattcaaggagccatttggtaccgagggacgtggaggttactttgacgagtttggtatcgttcgtgatgttatgcagaaccatcttcttcaggttctcactctcctggctatggagcgacctatttccttcaacgccgaggatattcgtgacgagaaggtccgcgtccttcgcgccatccctgctatcgagcccaagaacgtcatcatcggccagtacggcaagtctctcgacggcagcaagcccgcctatcgcgaggatgacaccgttcctcaggattcacgatgcccgactttctgcgccctggtcgcatacatcaagaacgaacgttgggacggtgtgcctttcatcatgaaggccggaaaggctctcaacgagcagaagaccgagatccgcatccagttcaaggatgttacatcgggtatctttaaggatattccccgaaacgagcttgtcatgcgtattcagcccaacgagagtgtttatatcaagatgaactccaagttgcctggtctcagcatgcaaactgttgtcaccgagcttgatttgacctaccgaagacgattctccgacctcaagatccccgaggcttacgagtcacttgtccttgactgcctcaagggtgatcagtccaactttgtccgtgatgatgaacttgatgccagttggcgcatctttacacccctgctccactacctggacgacaacaaggagattatccctatggagtatccttatggctctcgcggccctgctgtccttgacgacttcacctcgtcttatggctacaagtttagtgatgctgctggctaccaatggccaactaccaacgctgctgctgcacccaacaagttgtaa

SEQ ID NO: 2077 - protein, 497 aa, Gibberella zeae PH-1
MELKQNTTIVVLGASGDLAKKKTYPALFGLYRNQFLPKDVKIVGYARTKMDHDEYIRRIKSYIKTPTKEIEQQLEDFAALCTYVSGQYDKDESFQGLEQHLQEVEASRPENHRLFYMALPPSVFTIVSQHLKKICYPKNGIARVIVEKPFGKDLASSRELQKSLEPDWNEQELFRIDHYLGKEMVKNILILRFGNSFLGATWNRHHIDNVQITFKEPFGTEGRGGYFDEFGIVRDVMQNHLLQVLTLLAMERPISFNAEDIRDEKVRVLRAIPAIEPKNVIIGQYGKSLDGSKPAYREDDTVPQDSRCPTFCALVAYIKNERWDGVPFIMKAGKALNEQKTEIRIQFKDVTSGIFKDIPRNELVMRIQPNESVYIKMNSKLPGLSMQTVVTELDLTYRRRFSDLKIPEAYESLVLDCLKGDQSNFVRDDELDASWRIFTPLLHYLDDNKEIIPMEYPYGSRGPAVLDDFTSSYGYKFSDAAGYQWPTTNAAAAPNKL

SEQ ID NO: 2078 - DNA, 1503 bp, Candida glabrata CBS 138
  CDS (1)..(1503)
atgtcagaacctgttaagtttgagaagaataccgttgttgtggtgtttggtgcttctggtgatttggccaagaagaagactttcccagctttgtttggtttgttcagagaaggatacctgcacgaatccaccaagattatcggttatgcgcgttccagtcttaccgttgaggaattgactgagcgtatcaagcctcacttgaagactccaaggggtaaggaggacgaggccaagattccacagttcttcaagctgctgacctatgtctccggtccttacgaccaggacgacggtttcatccgcttgcgtgagcagattgagaccttcgaaggtgccaagtgctccaccgtgccacacagactgttctacttcgctttgccaccaagcgtgttcttgccagtcgccaccaacattaagcgtctggtgtacgccgaaaacggtgtcactagactgatcgtggagaagccatttggtagagatctagagaccgctagaaagctacaagccgacttgagtccattgttcaaagaagaagaaatctacagaattgaccattacttgggtaaggaattggtcaagaacttgctagtcatgagattcggtaaccagttcttgaacagtgcttggaacagagacaacatccaatccattcagatctccttcaaagaacctttcggtaccgagggccgtggtggttacttcgataacatcggtatcataagagacgtcatgcaaaaccacttgttgcaagtgttgactttgttgaccatggagagacctgtctccttcgacccagaagccatccgtgacgagaaggttaaggtcctaaaagctatggctccattcgaccctaaggacatcttgatcggtcaatacggtaagtccgaagatggctctaagccagcttacttggatgacgaaaccgttaagccaggctccaagtgtgtcaccttcgccgccatcgccttccaaatcgaaaacgaacgttgggaaggtgttccaatcgttatgagagctggtaaagctcttaacgagggtaaagtagaaatcagactgcaatacaaggctgtcgcttccggtgtattcaagaacatcccacacaacgaattggttatcagaattcaaccaaatgaagccgtttacatgaaattcaacgccaagacaccaggtctgtcaaacgctactcaagtcactgacctagacttgacttactcttccagatacaaggacttctggatcccagaagcttacgaagctttgatcagagatgctctattgggtgaccactctaatttcgttagagatgatgagcttgatgtcagttggagtttattcacacctctattgaactacctagaaggaccagatgctcctcaaccagaaatatatccatacggttcaagaggtccaagcggtctaagggactacttgaagaagcacaattacatgatcgaggaaaagcacccatacacttggccagtcaccactccagatgaggattaa

SEQ ID NO: 2079 - protein, 500 aa, Candida glabrata CBS 138
MSEPVKFEKNTVVVVFGASGDLAKKKTFPALFGLFREGYLHESTKIIGYARSSLTVEELTERIKPHLKTPRGKEDEAKIPQFFKLLTYVSGPYDQDDGFIRLREQIETFEGAKCSTVPHRLFYFALPPSVFLPVATNIKRLVYAENGVTRLIVEKPFGRDLETARKLQADLSPLFKEEEIYRIDHYLGKELVKNLLVMRFGNQFLNSAWNRDNIQSIQISFKEPFGTEGRGGYFDNIGIIRDVMQNHLLQVLTLLTMERPVSFDPEAIRDEKVKVLKAMAPFDPKDILIGQYGKSEDGSKPAYLDDETVKPGSKCVTFAAIAFQIENERWEGVPIVMRAGKALNEGKVEIRLQYKAVASGVFKNIPHNELVIRIQPNEAVYMKFNAKTPGLSNATQVTDLDLTYSSRYKDFWIPEAYEALIRDALLGDHSNFVRDDELDVSWSLFTPLLNYLEGPDAPQPEIYPYGSRGPSGLRDYLKKHNYMIEEKHPYTWPVTTPDED

SEQ ID NO: 2080 - DNA, 1509 bp, Debaryomyces hansenii CBS767
  CDS (1)..(1509)
atgtcagtagaaccatttggtaaacacgttaccattgtcgtctttggggcctctggtgatttagctaagaagaagacgttcccagcattatttggattattccgtgaaggagaattgccatcaacgatcaaggtgattgggtatgcaagatcagaattatcagatgctgactttaaggaaagaatatcagccaatttcaagggcgttaatgatagtaacaagcataaggtcgacgaattcttgaacttgtgttcttatactcaaggtcaatacgattccgcagaaggttttaaaaagttgaatgaggagatggaaaagtatgaaaaagattccggtgttgacaaacctgaaagattgttctacttggctttacctccatcggtattcgtcactgttgcaagtcatataaaggaaaatgcctacaccaaaactggtgaggttagattaattgtcgaaaagccgtttggtaatgacttggaatcttctaggaagttgcaaaagagcttggccccattgttcacagaagaagaattgtatagaattgaccactacttaggaaaggaaatggttaagaacttggtatttttaagatttagtaatgaatttcttaacgcttcatggaacaaaaaccacatcaagtcgatccagatatctttcaaggaagcttttggtactgaaggtagaggtggttatttcgatgatattggaattgttagagatgtcatgcaaaaccatttgttgcaagttttgactttgttaactatggaaagaccagtctctattgaccctgaagctatcagagatgaaaaggtcaaggtcttgaaagcatttggtgaactcgaaactgatgacatcttattgggacaatatactaagtccgaagatggaaccaaaccaggttacttagatgatgacactgttaaaggtgactccaagtgtgttacatatgctgcacttggtatgcaaatccacaatgaaagatgggaaggtgttccaattgttatgagagctggtaaggctttgaaagaatctaaggttgaaattagaattcaattcaaggaagtggctaagggtatgttcaatgacattcaaagaaatgaattagttatgagaattcaaccaaatgaagccgtctatatgaaaatcaattctaagatcccaggtatttctgctgttccttctgttaccgacttggatttaacatactcatctagatactctaaggaattttggatcccagaggcttacgaatcattaattagagactgttacttaggtaaccatgctaatttcgtcagagacgatgaattggatctttcatggaagttgttcactccattgttacagcacatcgaatcaaaggatggcccaacacctgaaccttatccttatggttctaacggtccaaagaatttgagacctttcttatctgatcacggttataacttctacgatgaaggcacttatgaatggcctttaaccaccccaaatgttaagggtaaaatgtaa

SEQ ID NO: 2081 - protein, 502 aa, Debaryomyces hansenii CBS767
MSVEPFGKHVTIVVFGASGDLAKKKTFPALFGLFREGELPSTIKVIGYARSELSDADFKERISANFKGVNDSNKHKVDEFLNLCSYTQGQYDSAEGFKKLNEEMEKYEKDSGVDKPERLFYLALPPSVFVTVASHIKENAYTKTGEVRLIVEKPFGNDLESSRKLQKSLAPLFTEEELYRIDHYLGKEMVKNLVFLRFSNEFLNASWNKNHIKSIQISFKEAFGTEGRGGYFDDIGIVRDVMQNHLLQVLTLLTMERPVSIDPEAIRDEKVKVLKAFGELETDDILLGQYTKSEDGTKPGYLDDDTVKGDSKCVTYAALGMQIHNERWEGVPIVMRAGKALKESKVEIRIQFKEVAKGMFNDIQRNELVMRIQPNEAVYMKINSKIPGISAVPSVTDLDLTYSSRYSKEFWIPEAYESLIRDCYLGNHANFVRDDELDLSWKLFTPLLQHIESKDGPTPEPYPYGSNGPKNLRPFLSDHGYNFYDEGTYEWPLTTPNVKGKM

SEQ ID NO: 2082 - DNA, 1497 bp, Yarrowia lipolytica CLIB122
  CDS (1)..(1497)
atgactggcaccttacccaagttcggcgacggaaccaccattgtggttcttggagcctccggcgacctcgctaagaagaagaccttccccgccctcttcggcctttaccgaaacggcctgctgcccaaaaatgttgaaatcatcggctacgcacggtcgaaaatgactcaggaggagtaccacgagcgaatcagccactacttcaagacccccgacgaccagtccaaggagcaggccaagaagttccttgagaacacctgctacgtccagggcccttacgacggtgccgagggctaccagcgactgaatgaaaagattgaggagtttgagaagaagaagcccgagccccactaccgtcttttctacctggctctgccccccagcgtcttccttgaggctgccaacggtctgaagaagtatgtctaccccggcgagggcaaggcccgaatcatcatcgagaagccctttggccacgacctggcctcgtcacgagagctccaggacggccttgctcctctctggaaggagtctgagatcttccgaatcgaccactacctcggaaaggagatggtcaagaacctcaacattctgcgatttggcaaccagttcctgtccgccgtgtgggacaagaacaccatttccaacgtccagatctccttcaaggagccctttggcactgagggccgaggtggatacttcaacgacattggaatcatccgagacgttattcagaaccatctgttgcaggttctgtccattctagccatggagcgacccgtcactttcggcgccgaggacattcgagatgagaaggtcaaggtgctccgatgtgtcgacattctcaacattgacgacgtcattctcggccagtacggcccctctgaagacggaaagaagcccggatacaccgatgacgatggcgttcccgatgactcccgagctgtgacctttgctgctctccatctccagatccacaacgacagatgggagggtgttcctttcatcctccgagccggtaaggctctggacgagggcaaggtcgagatccgagtgcagttccgagacgtgaccaagggcgttgtggaccatctgcctcgaaatgagctcgtcatccgaatccagccctccgagtccatctacatgaagatgaactccaagctgcctggccttactgccaagaacattgtcaccgacctggatctgacctacaaccgacgatactcggacgtgcgaatccctgaggcttacgagtctctcattctggactgcctcaagggtgaccacaccaactttgtgcgaaacgacgagctggacatttcctggaagattttcaccgatctgctgcacaagattgacgaggacaagagcattgtgcccgagaagtacgcctacggctctcgtggccccgagcgactcaagcagtggctccgagaccgaggctacgtgcgaaacggcaccgagctgtaccaatggcctgtcaccaagggctcctcgtga

SEQ ID NO: 2083 - protein, 498 aa, Yarrowia lipolytica CLIB122
MTGTLPKFGDGTTIVVLGASGDLAKKKTFPALFGLYRNGLLPKNVEIIGYARSKMTQEEYHERISHYFKTPDDQSKEQAKKFLENTCYVQGPYDGAEGYQRLNEKIEEFEKKKPEPHYRLFYLALPPSVFLEAANGLKKYVYPGEGKARIIIEKPFGHDLASSRELQDGLAPLWKESEIFRIDHYLGKEMVKNLNILRFGNQFLSAVWDKNTISNVQISFKEPFGTEGRGGYFNDIGIIRDVIQNHLLQVLSILAMERPVTFGAEDIRDEKVKVLRCVDILNIDDVILGQYGPSEDGKKPGYTDDDGVPDDSRAVTFAALHLQIHNDRWEGVPFILRAGKALDEGKVEIRVQFRDVTKGVVDHLPRNELVIRIQPSESIYMKMNSKLPGLTAKNIVTDLDLTYNRRYSDVRIPEAYESLILDCLKGDHTNFVRNDELDISWKIFTDLLHKIDEDKSIVPEKYAYGSRGPERLKQWLRDRGYVRNGTELYQWPVTKGSS

SEQ ID NO: 2084 - DNA, 1524 bp, Candida albicans SC5314
  CDS (1)..(1524): transl_table=12
atgtcatttgattcatttggagattatgctaccattgttgtttttggtgcttcaggagatttagctaaaaagaaaacctttccagcattatttggattatttagagaaaaacaattaccatcaacggttcaaatcattggttatgctagatcacatttagaagatgaagaatttaaacaaagaatttctgaacattttaaaggtggtgatgaaaaaactaaaactgaatttttaaaacttgtttcatatattagtggaccttatgatactgatgaaggttataaaaaattagaatcaagatgtcaagaatatgaaaaggccaataaagataaaaatgatagttatactcccgaaagattattttatttggcattaccaccatcagtgttcactactgtttgtgaaaaagttaaaaaaaatgtttatccaccagaagaaagtaaaggtaaacttagaattattattgaaaaaccttttggacgtgatttagatacttatcgtgaaatgcaaaaagaaatttccccattatttactgaagatgaaatttatagaattgatcattatttaggtaaagaaatggtgaaaaatttattggttttacgatttggtaatgaattatttagtggagtttggaataataaacatatttcttcaattcaagtttcatttaaagaagcttttggtactgaaggtagaggtggttattttgataccattggaatcattagagatgttatgcaaaatcatttattacaagttttaactttattaaccatggaaagaccagtttcatttgatcctgaagccgttagagatgaaaaagttaaagttttaaaagcatttgatgctattgatattaatgacgttatattgggtcaatatactaaatctgaagatggtaaaaaaccaggttatttagatgataaaaccgttaatccggattctaaagctgttacttatgctgctttccgtgtaaacattcataatgaaagatgggatggagttccaattgttttacgtgctggtaaagctttagatgaaagtaaagttgaaattagaattcaatttaaaccagtcgccaaggggatgtttaaagaaattcaaagaaatgaattagttattagagtacaaccaaatgaagccatttatttaaaaattaattccaaaatccctggaatttctactgaaacttcattaactgatttagatttaacttatgctactcgttattctaaagatttttggattcctgaagcttatgaagcattaattagagattgttatttaggtaatcattctaattttgttagagatgatgaattggatgtttcttggaaattatttactccattattgaatgccgttgaagatccagctaaaaaaattgaattacaatattatccttatggttcaaaaggtccaaaagatttaagaaaatatttgaatgaacatggttatatatttagtgatccaggtacttatcaatggccattaactagtcctaacgttaaagggaagatttag

SEQ ID NO: 2085 - protein, 507 aa, Candida albicans SC5314
MSFDSFGDYATIVVFGASGDLAKKKTFPALFGLFREKQLPSTVQIIGYARSHLEDEEFKQRISEHFKGGDEKTKTEFLKLVSYISGPYDTDEGYKKLESRCQEYEKANKDKNDSYTPERLFYLALPPSVFTTVCEKVKKNVYPPEESKGKLRIIIEKPFGRDLDTYREMQKEISPLFTEDEIYRIDHYLGKEMVKNLLVLRFGNELFSGVWNNKHISSIQVSFKEAFGTEGRGGYFDTIGIIRDVMQNHLLQVLTLLTMERPVSFDPEAVRDEKVKVLKAFDAIDINDVILGQYTKSEDGKKPGYLDDKTVNPDSKAVTYAAFRVNIHNERWDGVPIVLRAGKALDESKVEIRIQFKPVAKGMFKEIQRNELVIRVQPNEAIYLKINSKIPGISTETSLTDLDLTYATRYSKDFWIPEAYEALIRDCYLGNHSNFVRDDELDVSWKLFTPLLNAVEDPAKKIELQYYPYGSKGPKDLRKYLNEHGYIFSDPGTYQWPLTSPNVKGKI

SEQ ID NO: 2086 - DNA, 1509 bp, Ustilago maydis 521
  CDS (1)..(1509)
atgcctgcctccaacgcccccgctttcgacaatgacactatcatcgtagtccttggcgcctcaggagatctggcaaagaagaagacgttcccagcgctctttaacctcttccgcctcggcctgctgccccaggccactcacattatcggatatgcacgaacaaagatggaaagggatgcgtttgccgaaaaggtcacaagtcacctcaaaaacgtcgacgatgaccagggaaagaaggacatccacaactttctcgaaatttgccaatacatctcgggtcagtacgacgaagacgcctcgttccagaatctcaacaaggagatggagcgcatcgaggctgaaatgaagcacgactcgcccagccgcctcttctacatggcgttgccgcccaacgtcttcaccgtcgtcgcaaagggtctcaagaagaactgctactcacaaaagggtcacaaccgaatcgtcatcgaaaagccctttggcaaggacctcgagagcagccgagagatgattggcgcgctcaagggtctgtggaaagaggacgagactttccgcatcgaccactacctcggaaaggagatggtcaagaacctgcttatcatgcgctttggcaaccctttcatcgatgccggccttaacaacaagctggtcgacaatgtccaaatcacctttaaggagcctttcggtaccgagggccgtggtggctactttgacgagtttggtatcatccgcgacatccagcagaaccacttgtcccaggtgctctctctgctcgccatggagcgacccaagtcgttctcggcagaggacatccgcgacgaaaaggtcaaagtgctcaagtcggtacctgccatcgagccaaaggacgtgcttatcggccagtacactgccgccaacggcaagccaggctacaaggatgacgagacggtgcccaaggacagcaactgtcccacctttgctgccttggcgctatttgtcaacaacgagcgctggaagggtgttccttttatcctcaaggcgggcaaggcactagatgaggccaaggtggtgattcgtatccagttcaaagacacgccagaaggcctcttcaacgatgttccgcgcaacgagctggtcatccgcatccagcccgacgaggcggtctacttcaagatgaacgccaagaagcctggcctcgagatggctacgcttcccgccgacttggacctcacctacaaggagcgcttctcccaggtgcgcatccccgaagcgtacgaggctctcatcttggacgcgctcaacggcgaccactcaaactttgtgcgagacgacgagctggaagtgtcgtgggccatcttcacgcctctgctgcacgccatcgatgcgggcaagatcaagaacgagccgtacgaatatggcagccgtggacctgcttcgctcaacgaattcaccgaacgctacggctacaagcgcaccaacgaatcgtacgaatggcccaccaccaacgtcaacaaggtgcaaggaaaaatgtag

SEQ ID NO: 2087 - protein, 502 aa, Ustilago maydis 521
MPASNAPAFDNDTIIVVLGASGDLAKKKTFPALFNLFRLGLLPQATHIIGYARTKMERDAFAEKVTSHLKNVDDDQGKKDIHNFLEICQYISGQYDEDASFQNLNKEMERIEAEMKHDSPSRLFYMALPPNVFTVVAKGLKKNCYSQKGHNRIVIEKPFGKDLESSREMIGALKGLWKEDETFRIDHYLGKEMVKNLLIMRFGNPFIDAGLNNKLVDNVQITFKEPFGTEGRGGYFDEFGIIRDIQQNHLSQVLSLLAMERPKSFSAEDIRDEKVKVLKSVPAIEPKDVLIGQYTAANGKPGYKDDETVPKDSNCPTFAALALFVNNERWKGVPFILKAGKALDEAKVVIRIQFKDTPEGLFNDVPRNELVIRIQPDEAVYFKMNAKKPGLEMATLPADLDLTYKERFSQVRIPEAYEALILDALNGDHSNFVRDDELEVSWAIFTPLLHAIDAGKIKNEPYEYGSRGPASLNEFTERYGYKRTNESYEWPTTNVNKVQGKM

SEQ ID NO: 2088 - DNA, 1515 bp, Cryptococcus neoformans var. neoformans B-3501A
  CDS (1)..(1515)
atggcggcgccttctaacaacaaatcaggcaccattccttccatggaggcatccggcgaagctcttacagacgagactgtcgttatcgtgctcggtgctagtggtgatcttgccaaaaagaagaccttccctgccctttttgcccttttcactcagggccttttgcctaaggatgttcatattgttggatatgcgagaaccaagatggataaggatgagttccacaggcgcgaaattcaatacatcaagggcgatcaggaaaagatcaagcaattccaagaactttcttcttacgtatcgggcccttacgacgaggatgctggttataaagagcttctcaagcatgtggaggagcttgaacgcgataggaaaacccgtaaccgcattttctacatggctcttcccccttcagtttttactaccgttgccaagggcctcaagaagaactgttactcttctcaaggtaccaatcgtatcatcattgaaaagccattcggcaaggatctcgagtcatgccgccagatgatgagtgaactcaagtcccagtgggcggaaaacgaaacctaccgtatcgatcactacctcggcaaagagatggtcaagaacctacttgttctccgctttggcaatgtcttcctcgatgcttctttcaacaaaaattttgtcagcaacgttcagatcaccttcaaagagcctttcggcaccgagggtcgtggaggatactttgacgaatttggaattattcgcgatgtttgccaaaaccatctcatgcaagctttgtcgatacttgctatggaacgacctgtttctttttctgctgaggatatcagggatgagaaggtcaaggttctccgctgcatccctgctattgaccgcaaggacgttcttttcggtcaatatgtcgccgctggggacaagccaggctatcttgaagatgataccgtacccaaagactctatctgtcccacatttgccgccatgactttgtggattaacaacccgcgatgggaaggtgttcctttcatcatgaaggcaggaaaagctttgaacgaggccaaagtcgaaattcgtgtgcagtacaaagatgctacgcagggtattttcaccgatatctctcgggacgagcttgtgatgcgcattcaacccgatgaagctgtatacctcaaaatgaacaacaagcttcctgggttccacacgcgtgctgttcctgttgaacttgacctcacctataagaagcgattcacggacgccaacattcctcaggcgtacgaagctctcattctcgatgctctcaagggcgatcactcgaactttgttcgtgatgacgagctggatgtcgcttggaagatcttcacccccattcttcattggatcgacagtaaagatgcgcctaagccggagccgtacccctatggttcccgaggacccaaacaaatcgatgaattcgctgccaagtatggattcaagcgcagcccgcagacttattcctggcctaagacatctgcaagtctttga

SEQ ID NO: 2089 - protein, 504 aa, Cryptococcus neoformans var. neoformans B-3501A
MAAPSNNKSGTIPSMEASGEALTDETVVIVLGASGDLAKKKTFPALFALFTQGLLPKDVHIVGYARTKMDKDEFHRREIQYIKGDQEKIKQFQELSSYVSGPYDEDAGYKELLKHVEELERDRKTRNRIFYMALPPSVFTTVAKGLKKNCYSSQGTNRIIIEKPFGKDLESCRQMMSELKSQWAENETYRIDHYLGKEMVKNLLVLRFGNVFLDASFNKNFVSNVQITFKEPFGTEGRGGYFDEFGIIRDVCQNHLMQALSILAMERPVSFSAEDIRDEKVKVLRCIPAIDRKDVLFGQYVAAGDKPGYLEDDTVPKDSICPTFAAMTLWINNPRWEGVPFIMKAGKALNEAKVEIRVQYKDATQGIFTDISRDELVMRIQPDEAVYLKMNNKLPGFHTRAVPVELDLTYKKRFTDANIPQAYEALILDALKGDHSNFVRDDELDVAWKIFTPILHWIDSKDAPKPEPYPYGSRGPKQIDEFAAKYGFKRSPQTYSWPKTSASL

SEQ ID NO: 2090 - DNA, 1578 bp, Tribolium castaneum
  CDS (1)..(1578)
atgccgctgctaaaaatagacgacgatgatgctgccaattcagaggtttgtttggccctttaccggaagtctctcaaatccaaagaaatggaccacggagggacccacttcgatgggcaccacccccacgtctttataaccctcggagcttcgggagacttagcccggaagaaaatctaccccacgttgtggtggctgtaccgggacaacctcctgccggtcaatacagtattcttcggctacgcccgaagcaagacgtcagtccaggaaatcaaggaaaaatgcaagccatacatgaaggtgaggcacggagaggaagagcgctttgaggacttctggaagttgcactattacgtcgctgggtcgtacgactccaggaccgacttcgagcgcctcaaccaggagctgtgcccctttgagaaagggccggccgccaacagggtcttctacttggcgctgccgccgtcggtgtttgagaccgtaaccgttcatatccgaaattcgtgcatggccccaaaaggctggacaaggatcattattgagaaaccgttcggtcgcgatttcgactcctcgcaaaaactgtcgaaccacttgggctctctcttcaccgagcagcaaatctaccggatagaccactatctgggcaaggaaatggtgcaaaacctcatgaccctgaggttcggcaatcgcattttcaacccgacctggaaccgcgacaacatcgcctcgatccagatcagtttcaaggaaccctttggcacgcaaggccgcggggggtatttcgacgagttcggtattatccgggacatcatgcaaaaccacctcctccaaatactgacgcttgccgcgatggagaaaccggcgtcagtccaccctgacgatataagaaacgagaaagtgaaagtcttgcgctgcatcaaagtgattgagaaaaaggacgtggttctgggccagtacgtcggggaccccaacggggagggcgaagccaaactgggctatctggacgacccgaccgtccccaacgattcagtgacccccacctacgccttggccgcgctccatatcaacaacgagcgctgggacggggtccccttcattcttaaatgtggcaaagctttgaatgaacggaaggccgaagtccgcatccaattcaaggacgttcctggggacatcttcgacggaaagccgaaacgtaacgaactggtcatcagggtgcagcctggcgaagccttgtatgtgaaattgatggtgaaaacgccgggcatggccttcgatatggaggagacggaactcgatctgacttacggacacagatacgcgaatgttaaattgcccgacgcttacgaacggttgattttggacgtattctgcggctcgcaaatgcatttcgtccgctcggacgagctaagcgaggcttggaggatcttcactccacttttgcaccaaattgaaagcgagagagttaaaccaatcccctacgtgtatgggagccgtgggcctaaggaggccgacgaaatgttgctaaacaacaacttcacttacacaggctcgtacaaatggcccgcccccaaaatgtga

SEQ ID NO: 2091 - protein, 525 aa, Tribolium castaneum
MPLLKIDDDDAANSEVCLALYRKSLKSKEMDHGGTHFDGHHPHVFITLGASGDLARKKIYPTLWWLYRDNLLPVNTVFFGYARSKTSVQEIKEKCKPYMKVRHGEEERFEDFWKLHYYVAGSYDSRTDFERLNQELCPFEKGPAANRVFYLALPPSVFETVTVHIRNSCMAPKGWTRIIIEKPFGRDFDSSQKLSNHLGSLFTEQQIYRIDHYLGKEMVQNLMTLRFGNRIFNPTWNRDNIASIQISFKEPFGTQGRGGYFDEFGIIRDIMQNHLLQILTLAAMEKPASVHPDDIRNEKVKVLRCIKVIEKKDVVLGQYVGDPNGEGEAKLGYLDDPTVPNDSVTPTYALAALHINNERWDGVPFILKCGKALNERKAEVRIQFKDVPGDIFDGKPKRNELVIRVQPGEALYVKLMVKTPGMAFDMEETELDLTYGHRYANVKLPDAYERLILDVFCGSQMHFVRSDELSEAWRIFTPLLHQIESERVKPIPYVYGSRGPKEADEMLLNNNFTYTGSYKWPAPKM

SEQ ID NO: 2092 - DNA, 1524 bp, Prochlorococcus marinus str. MIT 9515
  CDS (1)..(1524): transl_table=11
atgctaaaaactataagtaatcctcttagattaggattacgtcaagaaagagtgatatctccacaatgtctaataatctttggtgctagtggagatcttactcataggaaacttatacctgctttatttgaactgtatttacaaagaagaataccaagtgaatttgccatagttggttgtgctagaagaacttggactgatcaagagtttaaggagaaaatgaaagctaaattgggtgatcaaataactggtaatgaaaaagaatgggaacttttttctaattatcttttctatgagccagttgatctacaacaaagtgagcatgttgtaaggctctccaaaagattaaatgaaattgataaatcacaggctactcatggaaacaagaccttctacttatcagtatctccaaacttctacggaagtggctgtaaagcccttaagtctgctggattattggaagaccctaagaaaagtcgaatcgttattgaaaaaccttttggaagagattattcaagtgcaaaaaaactgaataaaattgttcaaagttgtgcagatgaaagtcagatatatcgtatagatcattatttaggaaaagagactgttcagaacatacttgttatgcgctttgctaatactatttttgaacccatatggaatagaaattatatttcaagtattcaaataacatcatcagagacagttggggttgaagatagagctggctattatgaaagctctggggctttaagagatatgctccaaaatcatttaactcaaatgcttgctgttactgcaatggagccaccaggtaaattcgaacctgaggcaataaggaatgaaaaagcgaaagttcttcaagcgtcaaaacttgctgatgagaatcaaccatggaattgctgtataagagggcagtatgcaaaaggaggaaatagtctaaaaagacttaaaggttacagggacgagaatggagtggatttaaatagtacaacagaaacttatatcgccacaaaagtttttattgataattggcgttggcaaggagttcctttttacttaagaacaggtaaaaggctacctaaaagacttggggagattgtattaacatttaaagatgttcctgtacacttgtttgaatcaacaataattaatccatctccaaatcagcttattcttagaattcagccaaatgaaggagctacttttaaatttgaagtcaaatcacccggttcagggatgaaatcaagaccagttgagatggaattttcttacgatgaatcttttggagaaccttctgatgaaggttatgtaagattgttggctgatgctatgctttctgatccaacattattcacaagaagtgatgaggtagaagctgcttggaaactttatacaccactaatagagttaatggagaatgctccttggaagttacctattcacaaatacgaatcaatgacttgggggcctcctgaatcagatcaattactttctaaagataatattttctggcgcagaccctaa

SEQ ID NO: 2093 - protein, 507 aa, Prochlorococcus marinus str. MIT 9515
MLKTISNPLRLGLRQERVISPQCLIIFGASGDLTHRKLIPALFELYLQRRIPSEFAIVGCARRTWTDQEFKEKMKAKLGDQITGNEKEWELFSNYLFYEPVDLQQSEHVVRLSKRLNEIDKSQATHGNKTFYLSVSPNFYGSGCKALKSAGLLEDPKKSRIVIEKPFGRDYSSAKKLNKIVQSCADESQIYRIDHYLGKETVQNILVMRFANTIFEPIWNRNYISSIQITSSETVGVEDRAGYYESSGALRDMLQNHLTQMLAVTAMEPPGKFEPEAIRNEKAKVLQASKLADENQPWNCCIRGQYAKGGNSLKRLKGYRDENGVDLNSTTETYIATKVFIDNWRWQGVPFYLRTGKRLPKRLGEIVLTFKDVPVHLFESTIINPSPNQLILRIQPNEGATFKFEVKSPGSGMKSRPVEMEFSYDESFGEPSDEGYVRLLADAMLSDPTLFTRSDEVEAAWKLYTPLIELMENAPWKLPIHKYESMTWGPPESDQLLSKDNIFWRRP

SEQ ID NO: 2094 - DNA, 1524 bp, Prochlorococcus marinus str. NATL1A
  CDS (1)..(1524): transl_table=11
atgagcatgccagtaacaaatccattgagaatagggcttcgccaagagcgagtagtacctcctcaatgtctggttatatttggggcctctggagatctaacacacaggaaacttgttcctgctctatttgaactctttaagcaaagaagattaccaagtgagtttgccgttttaggctgtgcgagaaggccttggactgatgaaatatttaaagaaaaaatggaagaagctctttcttctcaaataaaagaaagtccaaaagagtgggaattattttctcaaaatcttttttatgagcctgtagatctgcaacaacctgaacacctagtaaaacttggagaaagacttgaaataattgacaaactaaaagcgactcacggtcatcgaactttttacctttcagtatctccgaagttctatggaagtggatgcagagctttagctgcagcaggattattgaaagatccaaaacgaagtagggtcgtaatcgaaaaaccctttggaagagatttcaatagcgctcagtcactgaattctctcgttcaggggtgtgcccaagaaagtcaaatatttcgaatagatcattatttaggtaaagaaacagttcaaaatattcttgttctccgatttgcaaacacgatctttgaacctatttggaatagaaattatatctcgagtgttcaaattaccagttctgaaacagttggagttgaagatcgagctggatattacgaatcttcaggcgccttaagagatatggttcaaaatcatctaactcaaatgcttgctctaacagcaatggaaccacctgggcattttgatccagaagccataagaaatgaaaaagctaaagttcttcaggcagttaagcttgcgaatgaagaaaagccttgggaatgttgcgttagaggtcaatattcaaagggaggtagcgatgaagaaccactcttaggttatagagatgaaccaggtgttaatccaaacagcacaaccgaaacatatgtagctatgaagcttttcatagataattggagatggcagggggtccctttttatgtaaggaccggaaaacgtttagctaaaaggcttagtgaggttgttctcacatttagagaagcacctgttcacctttttgatgctgcaggggggtgcccaacttcaaaccaattaattcttagaattcaacccaacgaaggggctgaatttagttttgaggttaaatctccagggtctgggatgagaagtagacctgtaaatatggagttttcctatgatgaatcctttggagaaccatcagatgaaggttatgtgagactccttgctgatgcaatgctcggagatccaacattgtttactcgaagcgatgaagtagaggctgcttggcgtttatatactcctctacttgaaaagattgaggattctccttgggaattaccaatttatccatatgaatcaagaacatgggggcctactgaatcagacttacttattggcaaagatcaacttctatggagaagaccttga

SEQ ID NO: 2095 - protein, 507 aa, Prochlorococcus marinus str. NATL1A
MSMPVTNPLRIGLRQERVVPPQCLVIFGASGDLTHRKLVPALFELFKQRRLPSEFAVLGCARRPWTDEIFKEKMEEALSSQIKESPKEWELFSQNLFYEPVDLQQPEHLVKLGERLEIIDKLKATHGHRTFYLSVSPKFYGSGCRALAAAGLLKDPKRSRVVIEKPFGRDFNSAQSLNSLVQGCAQESQIFRIDHYLGKETVQNILVLRFANTIFEPIWNRNYISSVQITSSETVGVEDRAGYYESSGALRDMVQNHLTQMLALTAMEPPGHFDPEAIRNEKAKVLQAVKLANEEKPWECCVRGQYSKGGSDEEPLLGYRDEPGVNPNSTTETYVAMKLFIDNWRWQGVPFYVRTGKRLAKRLSEVVLTFREAPVHLFDAAGGCPTSNQLILRIQPNEGAEFSFEVKSPGSGMRSRPVNMEFSYDESFGEPSDEGYVRLLADAMLGDPTLFTRSDEVEAAWRLYTPLLEKIEDSPWELPIYPYESRTWGPTESDLLIGKDQLLWRRP

SEQ ID NO: 2096 - DNA, 1524 bp, Prochlorococcus marinus str. MIT 9303
  CDS (1)..(1524): transl_table=11
atgagcaccacgatcacaaaccctttacgagttggactacgtcaagagcgggttattgcaccgcagtgcctagtcatctttggagcaagtggcgacctgacccaccgcaaattggttccagcccttttcgagctatacaaacaacgacggctaccgagtgaattcgccttacttggctgcgcgcgacgtccttggagcaacgaaatatttcgccaaaaaatggctgaagccctcggcgagactatcaacgaaaaccagcttgcttgggatcaattcgccgcaggtcttttttacgaacctgtcgatctacagaagccagaagacctcatcaaactcagccatcggctggaagagattgatcgactccgcgccacccgtagcaatcgcaccttctatctttcggtgtcaccaaagttctacggtagtggctgcaaagctcttgctaatgccggtcttctaagcgaccccaaacgcagtcgagtggtcatcgaaaaaccattcgggcgggattacgccagtgctcagtctttaaatcaaatcgtccaaagctgtggccaagagaatcaaatcttccgcatcgaccactacctcggcaaagaaacagtccagaacatccttgtactgcgatttgccaataccatctttgaaccaatctggaacaggaattacatctccagcgttcaaatcacggccgctgaaaccgtaggtgttgaagaacgagccaactactacgaatcttcaggtgccctgcgagacatggtgcaaaaccatctcacccagatgctggccatcaccacgatggaaccgccagggcgctttgaccctgaggcaatccgcaatgaaaaagccaaggttttgctagcggctcgcctagcggatgagttggaaccttggaactgctgcatccgtggccagtacgcacctggcggcaccaaggaagctccgatagcaggctatcgacaggagccgggtgtcgatcccagcagcaccaccgagacctatgtagcgatgaaacttttcatcgacaactggcgctggcagggagtgcccttttacgttcgtactggcaaacgactggcaaagcgtcttagtgaagtggtgctcacctttcgagaagcacccgtgcaccttttcgatgccgctgggggcagccctacagcgaaccaactcatcctgcgaatccaaccggatgaaggtgccgagtggcgctttgaggtgaagtcacctggttcaggcatgcgcagccgaccagtagagatggaattctcctatgacgaatccttcggtgagccatccgatgagggatacgtccgacttttggccgatgccatgctcagtgacccaactttatttacccgcagtgatgaggttgaagcagcgtggcgcctttacacccctctactggaactgattgaagacagcccatggcaattgcccattcatccctatgaatcacgtacctgggggcccgctgctgccgataccctgcttgccaatgacggattgctctggcgccgaccctga

SEQ ID NO: 2097 - protein, 507 aa, Prochlorococcus marinus str. MIT 9303
MSTTITNPLRVGLRQERVIAPQCLVIFGASGDLTHRKLVPALFELYKQRRLPSEFALLGCARRPWSNEIFRQKMAEALGETINENQLAWDQFAAGLFYEPVDLQKPEDLIKLSHRLEEIDRLRATRSNRTFYLSVSPKFYGSGCKALANAGLLSDPKRSRVVIEKPFGRDYASAQSLNQIVQSCGQENQIFRIDHYLGKETVQNILVLRFANTIFEPIWNRNYISSVQITAAETVGVEERANYYESSGALRDMVQNHLTQMLAITTMEPPGRFDPEAIRNEKAKVLLAARLADELEPWNCCIRGQYAPGGTKEAPIAGYRQEPGVDPSSTTETYVAMKLFIDNWRWQGVPFYVRTGKRLAKRLSEVVLTFREAPVHLFDAAGGSPTANQLILRIQPDEGAEWRFEVKSPGSGMRSRPVEMEFSYDESFGEPSDEGYVRLLADAMLSDPTLFTRSDEVEAAWRLYTPLLELIEDSPWQLPIHPYESRTWGPAAADTLLANDGLLWRRP

SEQ ID NO: 2098 - DNA, 1470 bp, Burkholderia vietnamiensis G4
  CDS (1)..(1470): transl_table=11
atgcataccgattccagctttactttcgtccttttcggcggcaccggcgacctgtcgatgcgcaagatcctgcccgcgctgttcgaagcgcaccgcggcaacatgctcgcggaaggcggccggatcgtcgccgtcgcgcgacacgaatcggatcaggccggctatctcgaatgggtcgacacgcacgtgaaaccgcacgcggtgaaggcggccggcaaggcgttcgacgaaagcgcgtggaagtccttcctcgcgcgcatcgaatacgtgaagctcgatctcggccgcgcggaagactacgtcgtgctgcgcgacgcggtggcgccgcacgcgggcatccgcgtgttctatctggcgaccggcccgtcgctgttcgtgccgatctgcaacgcgctcgcgtcggtcggcctgaacgaaggcgcgcgcatcgtgctggagaagccgctcggctacgatctgcgctcgtcgaacgcgatcaacgacgcggtcggcgagatcttcgcggaagaccagatctaccggatcgaccactacctcggcaaggagccggtgcagaacctgctcgcgctgcgcttcggcaacgcgctgttcgagccgctgtggcgccgcgaatgggtcgagagcatccagatcacgatcgccgaggagctcggcgtcgaggcgcgcggcgatttctacgacaatacgggcgcgctgcgcgacatggtgcagaaccacctgctgcagctgctgtcgatcgtcgcgatggagccgccgcattcgatggattccgactcggtgcgcgacgagaagctgcgcgtgctgcgcgcgctgaagcccatcgatccgcgcgacatcggcaaggtcgcggtgcgcggccagtaccatgcgggcgtgatcaagggcgcgcaggtgccggcctatgcgaccgagccaggcgtgaagcccgacagcccgaccgaaaccttcgtcgcgctgaaggtcgagatcgagaactggcgctgggccggcgtgccgttcttcctgcgcacgggcaagcgtctggccgatcgcgtcgccgagatcgtcgtcaacttccggccggtgccgcactcggcgctcggcgcgcccgcgctgcgccccggctcgaaccgcctggtgatccggctgcagccgaacgagacgattcgcctgtattgcctcgcgaagcagccgggcgaaggcatgaacctcgcgagcgtgcacctcgatctggcgttcgaccggttcttcaaggaagggcagatggaggcgtatcagcgcctgctgctcgacgtgatcaacggccgcctcgcgttgttcgtgcgccgcgacgagcaggaagccgcatggcgctgggtcgagccgatcctgaatgaatgggcacgcacgctgaagccgccgaagccgtacgcggcgggcacgtgggggccggccgcgtcgagcgcgatgctcgcgcagcacggcacctgctggctcgaagaggaaaactga

SEQ ID NO: 2099 - protein, 489 aa, Burkholderia vietnamiensis G4
MHTDSSFTFVLFGGTGDLSMRKILPALFEAHRGNMLAEGGRIVAVARHESDQAGYLEWVDTHVKPHAVKAAGKAFDESAWKSFLARIEYVKLDLGRAEDYVVLRDAVAPHAGIRVFYLATGPSLFVPICNALASVGLNEGARIVLEKPLGYDLRSSNAINDAVGEIFAEDQIYRIDHYLGKEPVQNLLALRFGNALFEPLWRREWVESIQITIAEELGVEARGDFYDNTGALRDMVQNHLLQLLSIVAMEPPHSMDSDSVRDEKLRVLRALKPIDPRDIGKVAVRGQYHAGVIKGAQVPAYATEPGVKPDSPTETFVALKVEIENWRWAGVPFFLRTGKRLADRVAEIVVNFRPVPHSALGAPALRPGSNRLVIRLQPNETIRLYCLAKQPGEGMNLASVHLDLAFDRFFKEGQMEAYQRLLLDVINGRLALFVRRDEQEAAWRWVEPILNEWARTLKPPKPYAAGTWGPAASSAMLAQHGTCWLEEEN

SEQ ID NO: 2100 - DNA, 1470 bp, Dichelobacter nodosus VCS1703A
  CDS (1)..(1470): transl_table=11
atgagttgttcacaagaaccttttgatttattgatttttggcggcaccggcgatttagccatgcgcaaattattaccttctttatttcaagcgcatcatgccggcgcgttgcatgaaaatggtcacatttgggggatttcgcggcgggcgttgagttgcgaagattaccgttctttggtgaagaaaaatctgcaaatatttgttcccgaaattgcggcgttgccggaagcggcgattcattcttttttgcaacgtttaaattttatttcatgcgatgcttttcagcaggaagatttccgattactcgctgatgcgattcatttttcgccggaaaaagtcttaattgcttatttggcgacttcaccgcatattttcgagcacatttgcttaaatttagcggcggtgggactcaatcatcagcgcgcgcgcattgttttagaaaaacctttgggcgtagatttggcgtcaaatcaggcgattaatcaatcggttgcgaagttttttgatgaatcgcaaatttatcgcattgatcattatcaaggtaaagaatcggtgcaaaatttgctgatgatgcgttttgccaacgttttgtttgaaccgcaatggcggcgtgaatggattgatcatgtgcaaattacgattgccgaaagtgttggcgttggcgcgcgtggtgcgttttatgatgatatcggcgcgttgcgcgatatggtgcaaaaccatttattgcaattgttatgcatgattgcgatggaaccgccggcttctttgtcgccgctcgccgtgcgtaatgaaaaattaaaagtattgcaagcgctaaaaccgtttaccgccgaaagtgttgccacagatgtggtgcgcggacaatatgccggcggcgttatcgacggcgaagcggtatgtggttttcatgaagaattggatattgccaaacacagtcaaacggaaacatttgtggcgctgcgcacggaaattcaaaattggcgttgggcgggcgtgcctttttttctgcggacgggaaaacgtatggcaaaacgttccgcggcaattgtaattcaatttcgtaatgtgccgcatcatttatatccgaattctgtgcataaaatgagcggtaatcgtttggtgattcatttgcagccggaagatagcgtgcggcttcatttatatgcgaaatgccctggaaatacggtgacgctcaaacccgtttctttggatttggattttgatcggcattttaatgagcgccgcgctgatgcgtatgaacggttgttattggacgtgattcaaggcgatcaaacgttattcgtgcgccgcgatgagcaggaagaagcttggcgctgggtggcgccgattattgaggcgtgggaaaaagatccgttaccgccaaaatcttatgctgcgggttcttgggggcctgatgctgctgatgaattgttggcgcgcgatggtttacgttggtatggagaggaataa

SEQ ID NO: 2101 - protein, 489 aa, Dichelobacter nodosus VCS1703A
MSCSQEPFDLLIFGGTGDLAMRKLLPSLFQAHHAGALHENGHIWGISRRALSCEDYRSLVKKNLQIFVPEIAALPEAAIHSFLQRLNFISCDAFQQEDFRLLADAIHFSPEKVLIAYLATSPHIFEHICLNLAAVGLNHQRARIVLEKPLGVDLASNQAINQSVAKFFDESQIYRIDHYQGKESVQNLLMMRFANVLFEPQWRREWIDHVQITIAESVGVGARGAFYDDIGALRDMVQNHLLQLLCMIAMEPPASLSPLAVRNEKLKVLQALKPFTAESVATDVVRGQYAGGVIDGEAVCGFHEELDIAKHSQTETFVALRTEIQNWRWAGVPFFLRTGKRMAKRSAAIVIQFRNVPHHLYPNSVHKMSGNRLVIHLQPEDSVRLHLYAKCPGNTVTLKPVSLDLDFDRHFNERRADAYERLLLDVIQGDQTLFVRRDEQEEAWRWVAPIIEAWEKDPLPPKSYAAGSWGPDAADELLARDGLRWYGEE

SEQ ID NO: 2102 - DNA, 1476 bp, Listeria monocytogenes str. 4b F2365
  CDS (1)..(1476): transl_table=11
atgacagatgagttagaacaaaaagcactgattactatttttggcggtacgggagatttggcaaatcgcaaactttacccttcgctatatcatttgtacagtaagggatctcttggcgacaattttgctgttattggaacggctcgtcgtgaatggagtaacgatttcttccgtgataaagtaaaagagtctatcaaagacattgacggttccgaaaaagacgcggatgcatttgcttctcacttctactatcaatctcatgatgtgacaaataaagaatcttatgtaactttaaaagatttgtctgatgaattagatgcaaaatacgaattaggtggcaatcgcctcttctatcttgcaatggcgccgaatttctttggaactatcgcaagtcgcattaaatctgaaggatttgtagatacagatggctttcatcgtttaattatcgaaaaaccatttggtcacgatttagctagtgcagaagaattaaataattcgcttcgtcaagcatttaaagaagatgaaatttatcgtattgaccattatttaggaaaagaaatgatccaaaatatctcggttattcgttttgcaaattctatcattgaatcgctttggaataatcgttacatcgataacatccaagttactttaactgaggtgcttggggttgaagatcgtgggcgctattacgatgaaagtggcgcgcttcgagacatggttcaaaaccatattctccaaatcgtttctctacttgcgatggagccaccaattaacttaacgacacgcgagattcgtcatgaaaaagttcgcgcgcttcgttccttacgcgtttttgaaggtaaagaagttcaccaaaactttattcgtggtcagtacggtcctggtgaagtaggtggcaaagaactcaaaggctatcgtcaagaagataatgtggatcctcattccaatacggaaacgtttgttgcagccaaactagaaatcgataacttccgctgggctggcgttccattttatattcgcacgggtaaacgtcttgcgaagaaaacgacccaaattgcgattcagttcaaagatgtaccgctgaatttatttggtcaacaacaatcgcttggtggtaatgtgcttgttattcatatccaaccggacgaaggtattacacttcatttgaacgtcaaagaacctggtcaaggtatggttacaatgccagtcaacttaaattatattcattcctctccagacggcatgaacacacctgaggcttacgaaaaattgattctagactgtcttcgcggtgatgcgacttacttctctcactgggatgaagtatcactatcatggaactttattgaccatatagcagatgtttggacaaatacgaaagatcatttcccgaactacaaatccggttcgatggggcctaaagaagcagacgacctcattcaacgcgacggattccagtggttcccaatcgattaa

SEQ ID NO: 2103 - protein, 491 aa, Listeria monocytogenes str. 4b F2365
MTDELEQKALITIFGGTGDLANRKLYPSLYHLYSKGSLGDNFAVIGTARREWSNDFFRDKVKESIKDIDGSEKDADAFASHFYYQSHDVTNKESYVTLKDLSDELDAKYELGGNRLFYLAMAPNFFGTIASRIKSEGFVDTDGFHRLIIEKPFGHDLASAEELNNSLRQAFKEDEIYRIDHYLGKEMIQNISVIRFANSIIESLWNNRYIDNIQVTLTEVLGVEDRGRYYDESGALRDMVQNHILQIVSLLAMEPPINLTTREIRHEKVRALRSLRVFEGKEVHQNFIRGQYGPGEVGGKELKGYRQEDNVDPHSNTETFVAAKLEIDNFRWAGVPFYIRTGKRLAKKTTQIAIQFKDVPLNLFGQQQSLGGNVLVIHIQPDEGITLHLNVKEPGQGMVTMPVNLNYIHSSPDGMNTPEAYEKLILDCLRGDATYFSHWDEVSLSWNFIDHIADVWTNTKDHFPNYKSGSMGPKEADDLIQRDGFQWFPID

SEQ ID NO: 2104 - DNA, 1476 bp, Bacillus anthracis str. 'Ames Ancestor'
  CDS (1)..(1476): transl_table=11
atgacctttgttttatttggagcgacaggggacttagcgaaacgcaaaatttaccccgcactatataacttatatagagatcaaaagcttccaaagcaaatatccgttatcgggcttgggagacgtgaagtatctcatgtagattttcaaaaaagaataaaagaatcaatagagacgttttctcgtcatagagaagaaggtactccagaactcgaaggttttttagataattttcgctattgtccattagatgtgagtaagccggaagactatgagagattattacaagtcgttcgtgaaagggaagaagagctacatataaaagggaatagaatgttctatctttccggtgctcctgaattttttgagacaatcgctttaaatattaaggaaagcggacttgataaaacggatggatggaaacgcctaatgattgagaaaccgttcgggcacgaccttacatctgctcgtgagctgaatgataagcttagtcgcacgtttgaagaagacgagatataccgtattgatcattatttaggtaagccgatgattcaaaaccttgaagcactagagtttgcaaatcctgttttacaatcgatttggaataaagaacatatagcgaatgtacaaatcacagcgagtgaaacagttggtgttgaagaaagggcaggatattatgatcaggcaggagccattcgagatatggttcaaaatcatatgttacaaatattaatgatgactgctatgaatttgccggaaaaggttaatgcatgtgaaattcgagaggaaaagcgaaaggtaatggaggcgcttcgtaaagtgaaaaaagaagacgttcaaaaccatatcattcgcggacaatatggtgcaggtgagataaatggcgggcaagttgtagcatataaagaggagccaggagtaaatccctcttctaatatagacacatttattgctgctcgcttgtggatcgataatccattttggactggcgttcccttttatatacgaacaggcaaacgaatgaaagaaaagtctactcgtattgtaatcgaatttaaaaatacgttaaaacagcaatatcaagatagtaatccaaatgcagcacctaacttgttaataattgaaattagcccaggtgagaacgtttcattacagttaaatagtaaaaatccattgaaaaatggagaaattgaaccgatccgtattaactttacttgtgagcaagcggatgtgggagtacctgaagcgtatgaaagactcattcatgatgctgtgagtggagacgctacattctttgcacattggagagaagttgaattgtcatgggaatgggtacaaccaattcttgaagcattcgaggaaaacttattaccacttcatgaatatgagtctggttcatatggtccagaggcatctaatgaattattgcaagaaagtggatttaaatggtggttagatcaagaaacgaaaaaataa

SEQ ID NO: 2105 - protein, 491 aa, Bacillus anthracis str. 'Ames Ancestor'
MTFVLFGATGDLAKRKIYPALYNLYRDQKLPKQISVIGLGRREVSHVDFQKRIKESIETFSRHREEGTPELEGFLDNFRYCPLDVSKPEDYERLLQVVREREEELHIKGNRMFYLSGAPEFFETIALNIKESGLDKTDGWKRLMIEKPFGHDLTSARELNDKLSRTFEEDEIYRIDHYLGKPMIQNLEALEFANPVLQSIWNKEHIANVQITASETVGVEERAGYYDQAGAIRDMVQNHMLQILMMTAMNLPEKVNACEIREEKRKVMEALRKVKKEDVQNHIIRGQYGAGEINGGQVVAYKEEPGVNPSSNIDTFIAARLWIDNPFWTGVPFYIRTGKRMKEKSTRIVIEFKNTLKQQYQDSNPNAAPNLLIIEISPGENVSLQLNSKNPLKNGEIEPIRINFTCEQADVGVPEAYERLIHDAVSGDATFFAHWREVELSWEWVQPILEAFEENLLPLHEYESGSYGPEASNELLQESGFKWWLDQETKK

SEQ ID NO: 2106 - DNA, 1476 bp, Bartonella quintana str. Toulouse
  CDS (1)..(1476): transl_table=11
atggtgcgtaaaattattccagtctctccctttgactgtattgtttttggtggcaatagtgatttagcatcacgcaaactgatccctgctttatatcattgtcaatgtgttgggcaatttagcgagccaacgcgtatcattggggtttcgcgctcttcgttgagttgtgaagaatatcaaaactttgttcgctcttctctagaaaaatatgttcatccaaaagatctcaatcgaattgaactcaatcgttttcttgcgcgtttaacttatgtttctgttgatattacatcaaactgggggtgggaagatctcgctttcctgctatcgagagaatcagctgatattcgggctttttatttggcggttagttcgtccctttttggtgatattgcgatgagattgggacaaaatggttttgtgacgcagcaaacacggattatcattgaaaaacctattggtcacaatgtaaaaacagcagttgaactcaatgatacatttgcaagcgtattcgatgaagatcaaattttccgcattgaccattatcttggcaaggaaactgttcaaaatttaatggcattgcggtttgttaatacactgtatgagccattatggaactccaaatatattgatcatgttcagataacagttgctgaatctttaggattggaggggcgtgcggaatattatgagagtgcgggtgcactacgtgacatggtacagaatcatatgctgcaattgctttgtttggttgccatggaaataccatttaccaacagtgcaaatgctgtgcgtgatgaaaaacttaaagttttgcattctttaatgcctctcaatgttcataatgtagaggaacatactgtacgtgggcagtatctttctggtctatctgatggtgttgctgtaaaatcttatcttgatgatttggggaaaaaggtcagccagagcgaaacatttgtggcgcttaaaattaagattgataattggcgttgggctgatacgcctttttatttacgaactggtaagcgtatgttcacgcgaatgtctgaaattgttatcgttttcaaacccatcccccataatatttttgatacggattcgaatgaaattttttctaatcgattagttgttcgtctccaacctgatgagggcgtaaaacagtggctaatgattaaggacccaggtcctggtggtatgcggtttcgtcatattccattggacatgagttttgcgtctgcgttttctgaacgtaatcctgatgcttatgaacgcctattgatggacgttattcgtggaaatcaaacactgtttatgcgtcgtgatgaagttgaagctgcttggctttggattgatcctattcttgagggatgggaggcaataaaacagcctgtttatggttatagtgctggttcatggggaccatctgcttcgactattttgatggaacgtgatgggcggatatggaacaacttagtttag

SEQ ID NO: 2107 - protein, 491 aa, Bartonella quintana str. Toulouse
MVRKIIPVSPFDCIVFGGNSDLASRKLIPALYHCQCVGQFSEPTRIIGVSRSSLSCEEYQNFVRSSLEKYVHPKDLNRIELNRFLARLTYVSVDITSNWGWEDLAFLLSRESADIRAFYLAVSSSLFGDIAMRLGQNGFVTQQTRIIIEKPIGHNVKTAVELNDTFASVFDEDQIFRIDHYLGKETVQNLMALRFVNTLYEPLWNSKYIDHVQITVAESLGLEGRAEYYESAGALRDMVQNHMLQLLCLVAMEIPFTNSANAVRDEKLKVLHSLMPLNVHNVEEHTVRGQYLSGLSDGVAVKSYLDDLGKKVSQSETFVALKIKIDNWRWADTPFYLRTGKRMFTRMSEIVIVFKPIPHNIFDTDSNEIFSNRLVVRLQPDEGVKQWLMIKDPGPGGMRFRHIPLDMSFASAFSERNPDAYERLLMDVIRGNQTLFMRRDEVEAAWLWIDPILEGWEAIKQPVYGYSAGSWGPSASTILMERDGRIWNNLV

SEQ ID NO: 2108 - DNA, 1485 bp, Bacillus thuringiensis serovar konkukian str. 97-27
  CDS (1)..(1485): transl_table=11
ttggaatcaatgacctttgttttatttggagcgacaggggacttagcgaaacgcaaaatttaccccgcactatataacttatatagagatcaaaagcttccaaagcaaatatccgttatcgggcttgggagacgtgaagtatctcatgtagatttccaaaaaagaataaaagaatcaatagagacgttttctcgtcatagagaagaaggtactccagaactcgaagattttttagataattttcgctattgtccattagatgtgagtaagccggaagactatgagagattattacaagtcgttcgtgaaagggaagaagagctacatataaaagggaatagaatgttctatctttctgttgctcctgaattttttgagacaatcgctttaaatattaaggaaagcggacttgataaaacggatggatggaaacgcctaatgattgagaaaccgttcgggcacgatcttacatctgctcgtgagctgaatgataagcttagtcgcacgtttgaagaagacgagatataccgtattgatcattatttaggtaagccgatgattcaaaaccttgaagcactagagtttgcaaatcctgttttacaatcgatttggaataaagaacatatagcgaatgtacaaatcacagcgagtgaaacagttggggttgaagaaagggcaggatattatgatcaggcaggagccattcgagatatggttcaaaatcatatgttacaaatattaatgatgactgctatgaatttgccggaaaaggttaatgcatgtgaaattcgagaggaaaagcgaaaggtaatggaggcgcttcgtaaagtgaaaaaagaagacgttcaaaaccatatcattcgcggacaatatggtgcaggtgagataaatggcgggcaagttgtagcatataaagaggagccaggagtaaatccttcttctaatatagacacatttgttgctgctcgcttgtggatcgataatccattttggactggcgttcccttttatatacgaacaggcaaacgaatgaaagaaaagtctactcgtattgtaatcgaatttaaaaatacgttaaaacagcaatatcaagatagtaatccaaatgcagcacctaacttgttaataattgaaattagcccaggtgagaacgtttcattacagttaaatagtaaaaatccattgaaaaatggagaaattgaaccgatccgtattaactttacttgtgagcaagcggatgtgggagtacctgaagcgtatgaaagactcattcatgatgctgtgagtggagacgctacattctttgcacattggagagaagttgaattgtcatgggaatgggtacaaccaattcttgaagcattcgaggaaaacttattaccacttcatgaatatgagtctggttcacatggtccagaggcatctaatgaattattgcaagaaagtggatttaaatggtggttagatcaagaaacgaaaaaataa

SEQ ID NO: 2109 - protein, 494 aa, Bacillus thuringiensis serovar konkukian str. 97-27
MESMTFVLFGATGDLAKRKIYPALYNLYRDQKLPKQISVIGLGRREVSHVDFQKRIKESIETFSRHREEGTPELEDFLDNFRYCPLDVSKPEDYERLLQVVREREEELHIKGNRMFYLSVAPEFFETIALNIKESGLDKTDGWKRLMIEKPFGHDLTSARELNDKLSRTFEEDEIYRIDHYLGKPMIQNLEALEFANPVLQSIWNKEHIANVQITASETVGVEERAGYYDQAGAIRDMVQNHMLQILMMTAMNLPEKVNACEIREEKRKVMEALRKVKKEDVQNHIIRGQYGAGEINGGQVVAYKEEPGVNPSSNIDTFVAARLWIDNPFWTGVPFYIRTGKRMKEKSTRIVIEFKNTLKQQYQDSNPNAAPNLLIIEISPGENVSLQLNSKNPLKNGEIEPIRINFTCEQADVGVPEAYERLIHDAVSGDATFFAHWREVELSWEWVQPILEAFEENLLPLHEYESGSHGPEASNELLQESGFKWWLDQETKK

SEQ ID NO: 2110 - DNA, 1476 bp, Erwinia carotovora subsp. atroseptica SCRI1043
  CDS (1)..(1476): transl_table=11
atggcggtaacttcaacagcccaagcgtgcgatctggttattttcggtgccaagggcgatctggcgcgccgtaaattgctgccttccctgtaccagttggaaaaagcaggtcacatccatgcggacaccaaaattattggggtgggccgtgcggattgggataaagcggagtatacccgcgtcgtgcgcgaagcgcttgacacctttatgaaagaagccatcgacgataagttgtgggaaacgctaagcagtcggctggatttctgcaatcttgatgtggaagacacgaaagctttcaacaagctgggcaagatgcttgaccagaaaaatcgtaccacgatcaactattttgcgatgccacccagcacattcggagcgatctgcaaagggttgggaaccgcagggctgaataaagagcctgcacgcgtggtgatggagaaaccgctgggtaccgatctggcgtcttcccgtgccattaatgatcaggtcgcggaattcttcaacgagtgtcaagtttaccgtatcgaccactatctgggtaaagaaaccgttctgaacctgctggcgctgcgttttgccaactcgctgttctcctcaaattgggacaacaggacgatcgatcatgtacagatcacggtagccgaagaagtcggaattgaaggacgctggggctattttgataaagccggccagatgcgtgacatgatccagaaccacctgttacagattctgacgatgattgcaatgtcgccgccgtctgatttgacgaccgaccgcatccgtgatgaaaaagtaaaagtgttgcgctcgctgcgtcgtatcaatcgctccaatgtgcatgaaacgacggtgcgtggccaatactcttctggctttgttcagggacataaagtgccgggctacctggaagaagagggtgcgaacaaaagcagcagcacggaaacctttgtcgcaattcgtgtcgacattgatgactggcgctggtctggcgtgccgttctatctgcgtaccggtaaacgtctgccaacgaaatgttcagaagtggtggtgtactttaaaaatccagcactgaacctgttccatgattcttaccagcagttaccgcaaaacaaactgatcatccgtttgcagccggatgaaggcgtggaaatccagattctgaataaaatcccaggattagagcacaagcaccgtctgcaaacggtgaagctggacctgagcttctcggaaacctttaatcagcagcacttggcggatgcctatgagcgtctgttgctggaaaccatgcgtgggattcaggcgttgttcgttcgccgtgatgaagttgaagaagcctggaaatgggtggattccatcatggaagcctgggcgatggataatgatgcgccgaagccgtatcaggcaggaagctggggtccggtagcatccgtcgcgatgattacccgcgatggccgttcctggaatgagtttgagtga

SEQ ID NO: 2111 - protein, 491 aa, Erwinia carotovora subsp. atroseptica SCRI1043
MAVTSTAQACDLVIFGAKGDLARRKLLPSLYQLEKAGHIHADTKIIGVGRADWDKAEYTRVVREALDTFMKEAIDDKLWETLSSRLDFCNLDVEDTKAFNKLGKMLDQKNRTTINYFAMPPSTFGAICKGLGTAGLNKEPARVVMEKPLGTDLASSRAINDQVAEFFNECQVYRIDHYLGKETVLNLLALRFANSLFSSNWDNRTIDHVQITVAEEVGIEGRWGYFDKAGQMRDMIQNHLLQILTMIAMSPPSDLTTDRIRDEKVKVLRSLRRINRSNVHETTVRGQYSSGFVQGHKVPGYLEEEGANKSSSTETFVAIRVDIDDWRWSGVPFYLRTGKRLPTKCSEVVVYFKNPALNLFHDSYQQLPQNKLIIRLQPDEGVEIQILNKIPGLEHKHRLQTVKLDLSFSETFNQQHLADAYERLLLETMRGIQALFVRRDEVEEAWKWVDSIMEAWAMDNDAPKPYQAGSWGPVASVAMITRDGRSWNEFE

SEQ ID NO: 2112 - DNA, 1575 bp, Propionibacterium acnes KPA171202
  CDS (1)..(1575): transl_table=11
gtggcaggtcgagacgcatcaggaagcaccaccagagcgatcagcggactgcgtggcgaccgcgtcaacccattgcgggacccctcagaccgcagactgccacgcgtcgccgggccgtgcgttctagtcatgttcggggttaccggtgacctttcacgcaagaaactcatgccagctgtctacgatctggcgaaccgtggcctactcccaccaggttttggcctggtgggtttcgcccgtcgagattgggaggacgaggacttcgccaaggtcgtacacgacgccgtggccgagcatgcccgtacccccttccgcgaggaggtgtgggagcaactactcgaaggcattcggtttgtccgcggcgaattcgacgataacgacgccttcgagagattggctaacacgatccgcgaacttgatgaggaacgaggcactggtggtaatcacgccttctacctgtcgatcccgccgagatcttttgaagcggtcataagccagctcaaacgtcatggcatgaccggccacgactcctctcactggagcagagtcgtcattgagaaacccttcggacacgatctggaaagtgcccgcgatctcgacgagatcatcagcagcgccttcagcccagaatcggtattccgcattgaccactacttgggcaaagagaccgtccagaacatcatggcgtttcggttcgccaaccagattttcgagccgatttggaataaccattacgtttcgcacgtccagatcaccatggcagaggacattggcatcgctggccgggctggttattacgacggtatcggagcctcccgcgatgtcatccagaaccacttactgcaactcatggcactgaccgccatggaggagccgacgagtttcgacgccaagcaattgtgcgcggaaaagattaagatcttagctgcaattcaaccgcctgacaacatgttcgcccaaacctgccgcggccaatacgtggctggtcgccaaggaggcgaaagggtgcgcggctaccttgaggaagacggagtcgatcctcgctcccgcaccgaaacctatgccgctgtgcggctgaccatcgacaatcgacgctgggctggagttccgttctatctacgcactgccaaacgaatgcctcgacgagtcactgaggtcgccttgaatctgcaacgcgccccgcatctacccttctcagataccgcagctctcggcaccaacgccgtcgtactgcgtattcagcctgatgagggagttactctgaaattcggcgccaaagtgcccggcacccagatggaacttcgcgatgtcacgatggacttcgcgtatggatcttccttcaccgaggccagcccggaagcctacgagagactcattcttgatgttctcttgggcgatccgccactgttcccccaacatgaggaggtcgaattggcttggaagatccttgacccggtgctggatttctgggccgagtccaacactcccccgtgcgaatatccggccggtagttggggaccgtcggaggctgacgagatgatcgcccgcgacgagttcgtctggcgcaggccttga

SEQ ID NO: 2113 - protein, 524 aa, Propionibacterium acnes KPA171202
MAGRDASGSTTRAISGLRGDRVNPLRDPSDRRLPRVAGPCVLVMFGVTGDLSRKKLMPAVYDLANRGLLPPGFGLVGFARRDWEDEDFAKVVHDAVAEHARTPFREEVWEQLLEGIRFVRGEFDDNDAFERLANTIRELDEERGTGGNHAFYLSIPPRSFEAVISQLKRHGMTGHDSSHWSRVVIEKPFGHDLESARDLDEIISSAFSPESVFRIDHYLGKETVQNIMAFRFANQIFEPIWNNHYVSHVQITMAEDIGIAGRAGYYDGIGASRDVIQNHLLQLMALTAMEEPTSFDAKQLCAEKIKILAAIQPPDNMFAQTCRGQYVAGRQGGERVRGYLEEDGVDPRSRTETYAAVRLTIDNRRWAGVPFYLRTAKRMPRRVTEVALNLQRAPHLPFSDTAALGTNAVVLRIQPDEGVTLKFGAKVPGTQMELRDVTMDFAYGSSFTEASPEAYERLILDVLLGDPPLFPQHEEVELAWKILDPVLDFWAESNTPPCEYPAGSWGPSEADEMIARDEFVWRRP

SEQ ID NO: 2114 - DNA, 1542 bp, Leifsonia xyli subsp. xyli str. CTCB07
  CDS (1)..(1542): transl_table=11
ttgccaccggtggacatcaccccagagttcaatccgctccggctcccctccgatcgacggctgaaccgcatcgccggtccgagcagtctcatcatcttcggcgtcacaggcgacctgtcgcgcaagaagctgatgccggccgtgtacgacctcgcgaaccgcggtctgctgcctcccgggttctccttcgtcggcttcgcccggcgcgactgggaggatcaggacttcgagaaggtcgtccacgacgcggtcaagcagtacgcgagaacgccgttcgacgacgacgtctggaagcagctcacccagggcatccgcttcgtccccggcgagttcgacgacgccgaggcgttccggcgcctcaaggagaccgtcgaatcgctggacgaagagcgtggcacgatgggcaaccacgcgttctacctctcgatcccaccgaaggcgttcccgctcgtcaccgagcagttgcgcacatcgggtctcgccgaccagtccggcacgggatggcgtcgcgtcgtcatcgagaagccgttcggctccgacctgacgaccgcgcgcgaactgaaccacgttgtcgagtccgtcttcccgccggactcggtgttccgcatcgaccactacctcggcaaagagacggttcagaacatcctggcgctacggttcgcgaacgagctgtacgagccgatctggaacgccaactacgtcgaccacgttcagatcacgatggcggaggacatcggcgtcggcggccgggccggctactacgacggcattggagcggccagggacgtcatccagaaccacctgttgcagctcctcgcgctcaccgcgatggaagagcccatctcgttcgacgcgacggacctccgcaccgagaaagagaaggtcctcgccgcagtccgcctgccggaggacttggggaaggcgaccgctcgcgggcagtactccagcggctggcaggggggtgagaaggtcgtcggattcctggaggaggatgggatgaacccgcgctccgccaccgagacctacgcagccatcaagctcgacatcggcacccggcgctgggcgggcgtcccgttctacctgcgcgccgggaaacgactcggccgccgtgtcaccgagatcgcggtcgtgttcaaacgcgctccgcagcagctcttcgcggagtctcagaccagcgcgctcggccagaacgcactcgtgatccgcgtccagccgaacgagggcgtcacgatccgcttcggctccaaagtgcccggcgccgggatgcaggtgcgcgatgtcagcatggacttcggctacggccacgccttcaccgaagcgagccccgaggcctacgaacggctcatcctcgatgtgctgctcggcgatccgccgctcttcccccgccacgaggaggtcgagctgtcctggaagatcctggacccgatcgaggagttctgggccacgcagggccagcccgagcagtaccgccccggaacctggggcccgaagtcggccgacgagctgctcgctcgcgacggccgcgtttggagacgcccgtga

SEQ ID NO: 2115 - protein, 513 aa, Leifsonia xyli subsp. xyli str. CTCB07
MPPVDITPEFNPLRLPSDRRLNRIAGPSSLIIFGVTGDLSRKKLMPAVYDLANRGLLPPGFSFVGFARRDWEDQDFEKVVHDAVKQYARTPFDDDVWKQLTQGIRFVPGEFDDAEAFRRLKETVESLDEERGTMGNHAFYLSIPPKAFPLVTEQLRTSGLADQSGTGWRRVVIEKPFGSDLTTARELNHVVESVFPPDSVFRIDHYLGKETVQNILALRFANELYEPIWNANYVDHVQITMAEDIGVGGRAGYYDGIGAARDVIQNHLLQLLALTAMEEPISFDATDLRTEKEKVLAAVRLPEDLGKATARGQYSSGWQGGEKVVGFLEEDGMNPRSATETYAAIKLDIGTRRWAGVPFYLRAGKRLGRRVTEIAVVFKRAPQQLFAESQTSALGQNALVIRVQPNEGVTIRFGSKVPGAGMQVRDVSMDFGYGHAFTEASPEAYERLILDVLLGDPPLFPRHEEVELSWKILDPIEEFWATQGQPEQYRPGTWGPKSADELLARDGRVWRRP

SEQ ID NO: 2116 - DNA, 1437 bp, Borrelia garinii PBi
  CDS (1)..(1437): transl_table=11
atgaaagaaaaaagtgtttctaattttgatattgtaatttttggagttactgggaatttgtctagaaaaaaacttattccttcactttttaacttgtttaaaaataaatgtattagcaattttagggttattggtttttctcgtaaaatttttacagataaagaatttagattgtatattaaagattctttatggcaggaagagaccgattctttgattgaaatttttttaaatttctttatttatgtatttggtgattttaatgaaaatgagccttatataaaactatttaaatttttagataaaagtcgagaaacaatatattatctttcgacgtctcctacattttatggcccaataattaataatttaaaaaaacattttgtaagcgaaagattgactttatcaaaaatagttcttgaaaagccttttggctctagtcttgagacagcaaaaaaattaaatagtttactttactctgcttttagagaagatcaaatttatagaatagaccactatttaggtaaagagacagttcaaaatatttttacatttagattcggcaattctatttttgaaaatatttggaataatcgttatgtagattttgttcagattacggttgcagaagaattaggccttgatggaagggctgaatattatgattctgttggtgctttaaaggatatggttcaaaaccatattttacaattgttaagtcttgttgcaatggagtctcccattaaatttgattctgagtttattcatgatgagaaagtaaaagttttaaaaagtttgaggaaaattaacagagaggatattaagaattgcattgttaaggggcaatatataggttcacaagttcaaggagtttttaaaaaaggctataaagatgaaacagaatctttggggaattcaaatactgaaacttatttagccatgaaagtgtttattaataattggcgctggtctggtgttcctttttatcttagaaccggcaaaggtcttgctagaaaattttcagaaatatatattcaatttaaaaaaccaagctttactctttttaacaatagttctgttgatttttctaatgccttaatatttaggattcaaccaagagatggaattgaaattaaattcaataccaagaagcccggatataattatgaaattcaaactgctaatatggaattttcatattacgggacatttaaaagattgtttgatgaggcctatgagcgtttattgttagatgctttcttaggagatggcactttgtatgcaacaagcgatgagattgaaagttcttgggaattcgtttcagatattgcaaataaatgggaagatattgaaatttgtaattatttttatggatctgaaggaccaaaagaaatagattctattttagaaaaagatcatttttggcgtaaaatttaa

SEQ ID NO: 2117 - protein, 478 aa, Borrelia garinii PBi
MKEKSVSNFDIVIFGVTGNLSRKKLIPSLFNLFKNKCISNFRVIGFSRKIFTDKEFRLYIKDSLWQEETDSLIEIFLNFFIYVFGDFNENEPYIKLFKFLDKSRETIYYLSTSPTFYGPIINNLKKHFVSERLTLSKIVLEKPFGSSLETAKKLNSLLYSAFREDQIYRIDHYLGKETVQNIFTFRFGNSIFENIWNNRYVDFVQITVAEELGLDGRAEYYDSVGALKDMVQNHILQLLSLVAMESPIKFDSEFIHDEKVKVLKSLRKINREDIKNCIVKGQYIGSQVQGVFKKGYKDETESLGNSNTETYLAMKVFINNWRWSGVPFYLRTGKGLARKFSEIYIQFKKPSFTLFNNSSVDFSNALIFRIQPRDGIEIKFNTKKPGYNYEIQTANMEFSYYGTFKRLFDEAYERLLLDAFLGDGTLYATSDEIESSWEFVSDIANKWEDIEICNYFYGSEGPKEIDSILEKDHFWRKI

SEQ ID NO: 2118 - DNA, 1485 bp, Bacillus cereus E33L
  CDS (1)..(1485): transl_table=11
ttggaatcaatgacctttgttttatttggagcgacaggtgacttagcgaaacgcaaaatttaccccgcactatataacttatatagagatcaaaagcttccaaagaaaatatccgttatcgggcttgggagacgtgaagtatctcatgtagattttcaaaaaagaataaaagaatcaatagagacgttttctcgtcatagagaagaaggtactccagaactcgaaggttttttagataattttcgctattgtccattagatgtgagtaagccggaagactatgagagattattacaagtcgttcgtgaaagggaagaagagctacatataaaagggaatagaatgttctatctttccgttgctcctgaattttttgagacaatcgctttaaatattaaggaaagtggacttgataaaacggatggatggaaacgcctaatgattgagaaaccgttcgggcacgaccttatatctgctcgtgagctgaatgataagcttagtcgcacgtttgaagaagacgagatataccgtattgatcattatttaggtaagccgatgattcaaaaccttgaagcactagagtttgcaaatcctgttttacaatcgatttggaataaagaacatatagcgaatgtacaaatcacagcgagtgaaacagttggggttgaagaaagggcaggatattatgatcaggcaggagccattcgagatatggttcaaaatcatatgttacaaatattaatgatgactgctatgaatttgccggaaaaggttaatgcatgtgaaattcgagaggaaaagcgaaaggtaatggaggcgcttcgtaaagtgaaaaaagaagacgttcaaaaccatatcattcgcggacaatatggtgcaggtgagataaatggcggacaagttgtagcatataaagaggagccaggagtaaatccttcttctaatatagacacatttgttgctgctcgcttgtggatcgataatccattttggactggcgttcccttttatatacgaacaggaaaacgaatgaaagaaaagtctactcgtattgtaatcgaatttaaaaatacgttaaaacagcaatatcaagatagtaatccaaatgcagcacctaacttgttaataattgaaattagcccaggtgagaacgtttcattacagttaaatagtaaaaatccattgaaaaatggagaaattgaaccgatccgtattaactttacttgtgagcaagcggatgtgggagtacctgaagcgtatgaaagactcattcatgatgctgtgagtggagacgctacattctttgcacattggagagaagttgaattgtcatgggaatgggtacaaccaattcttgaagcattcgaagaaaacttattaccacttcatgaatataagtctggttcatatggtccagagccatctaatgaattattgcaagaaagtggatttaaatggtggttagatcaagaaacgaaaaaataa

SEQ ID NO: 2119 - protein, 494 aa, Bacillus cereus E33L
MESMTFVLFGATGDLAKRKIYPALYNLYRDQKLPKKISVIGLGRREVSHVDFQKRIKESIETFSRHREEGTPELEGFLDNFRYCPLDVSKPEDYERLLQVVREREEELHIKGNRMFYLSVAPEFFETIALNIKESGLDKTDGWKRLMIEKPFGHDLISARELNDKLSRTFEEDEIYRIDHYLGKPMIQNLEALEFANPVLQSIWNKEHIANVQITASETVGVEERAGYYDQAGAIRDMVQNHMLQILMMTAMNLPEKVNACEIREEKRKVMEALRKVKKEDVQNHIIRGQYGAGEINGGQVVAYKEEPGVNPSSNIDTFVAARLWIDNPFWTGVPFYIRTGKRMKEKSTRIVIEFKNTLKQQYQDSNPNAAPNLLIIEISPGENVSLQLNSKNPLKNGEIEPIRINFTCEQADVGVPEAYERLIHDAVSGDATFFAHWREVELSWEWVQPILEAFEENLLPLHEYKSGSYGPEPSNELLQESGFKWWLDQETKK

SEQ ID NO: 2120 - DNA, 1485 bp, Mannheimia succiniciproducens MBEL55E
  CDS (1)..(1485): transl_table=11
atgaaagcagaaaataactgtatcgtgattttcggtgcctcaggcgacttgacccaccgaaaactcattccggctctgtacaatctctataaaatcggtcgtttaagtgaaaacttctcagttttaggtgttgcccgcacagaattaagcaatgaaaaatttcgtgaaaaaatgcgcagcgccttaattgaacatgaaaaagccgacggcgacgaattaaataatttctgctcgcatctttattaccaagcagttaacacatcggatgcggcggattacgtgaaactcatccctcgcctagacgagttacatgataaatacaaaacctgtggtaatacgctttactacctttccaccccgccaagcctgtacggcgtaatccccgaatgtctggcggcgcacggattaaataccgaagaattcggctggaaacgcattatcgtggaaaaacctttcggctatgatatgaaaacggcaaaagaattagacgtgcaaattcaccgattctttgacgaacaccaaatttaccgtatcgatcattatttaggcaaagaaaccgtacaaaacctgttagtacttcgcttctccaacggtttattcgagccgctttggaaccgtaactatattgattacattgaaatcaccggcgcggaagaattaggcgttgaacaacgcggcggctattacgacggttccggcgccatgcgcgatatgttccaaaaccatttattacaagtgctggcgatggtagcaatggaaccgccggcaattattaatgcggattccatgcgtgacgaagtggcaaaagtgctttattgcctacatccgttagaaccgaatgatttacaacataatctggttttaggtcaatacgccgccacacaactaaacggtgagcgggtgaaaggttatttagaagaaaaaggcgttccgccggattcaaacaccgaaacctacatggcattacgttgcaaaatagacaactggcgttgggctggcgtgcctttttatgtacgcacgggtaaacggctggcggcacgggttacagaagtggttattcacttcaagaaaacaccacatccggtattcagtcaggaagcgcctgaaaataaattaattctacgcattcagcctgacgaaggtatttctatgcgcttcggtttgaaaaaacccggcgccggctttgaagcgaaggaggtctccatggacttccgctattcggatttaaacggcgcaagcttactcaccgcttacgaacgtttattattagacgccatgaaaggtgatgccaccctgtttgcacgtaccgatgccgtgcatgcttgctggaaattcgtgcaacctattctcgactataaagcgaacggcggacgggtttatgaatatgaagccggttcatgggggccggtggaagccgacaaattaatcgcccaacacggtcgcgtatggcgcaaaccttccggtcaaatgaagaaaaaggtttaa

SEQ ID NO: 2121 - protein, 494 aa, Mannheimia succiniciproducens MBEL55E
MKAENNCIVIFGASGDLTHRKLIPALYNLYKIGRLSENFSVLGVARTELSNEKFREKMRSALIEHEKADGDELNNFCSHLYYQAVNTSDAADYVKLIPRLDELHDKYKTCGNTLYYLSTPPSLYGVIPECLAAHGLNTEEFGWKRIIVEKPFGYDMKTAKELDVQIHRFFDEHQIYRIDHYLGKETVQNLLVLRFSNGLFEPLWNRNYIDYIEITGAEELGVEQRGGYYDGSGAMRDMFQNHLLQVLAMVAMEPPAIINADSMRDEVAKVLYCLHPLEPNDLQHNLVLGQYAATQLNGERVKGYLEEKGVPPDSNTETYMALRCKIDNWRWAGVPFYVRTGKRLAARVTEVVIHFKKTPHPVFSQEAPENKLILRIQPDEGISMRFGLKKPGAGFEAKEVSMDFRYSDLNGASLLTAYERLLLDAMKGDATLFARTDAVHACWKFVQPILDYKANGGRVYEYEAGSWGPVEADKLIAQHGRVWRKPSGQMKKKV

SEQ ID NO: 2122 - DNA, 1479 bp, Bacillus licheniformis ATCC 14580
  CDS (1)..(1479): transl_table=11
ttgaaaaaagatcaaatggaaccaaaagcagttatcgtaatatttggcgcaacaggggatttggcaaaacgaaaactatatccttctatccacaggctctacgaaaacggacaaatcgggaatgaattcgcggttgtcggagtcggcagacgcccttggacaaatgaagactttcgcagtaccgtacagcaatcggtttcgaagtttccgttaaacgaaaaggatgtggacgagtttacatctcacttctactatcatccttttgatgttacaaattccggctcataccgggaattaaacgaacttatagagaagctggaaagtacatatgatattccgaataaccggatgttttacttagcgatggctcctgaatttttcggaacgattgcaaagttcctaaaatcagagggtgtcacttcaacaacaggctggtcaaggctcgttatcgaaaagcctttcgggcatgatctgccgagcgcaaaagccttgaaccaggaaatccgtgaagcttttacagaagatcaaatttatcggattgaccattatctaggaaagcaaatggtgcagaacatcgaagtcatccgctttgccaacgcgatttttgagccgctttggacaaacagatacatctcgaacattcaaattacgtcaagtgaagatttgggtgtggaagacagagcgagatattatgaaaaatcgggtgcgcttagagacatggtgcaaaaccacattcttcaaatggtggcgctgcttgcgatggaaccgccgatcaagctgaacacggaagagatccgcagcgaaaaagtgaaggttctcagagcccttcgtccgattcaaaaagacgatgtcgaccaattttttgtgcgcggccagtatgacgcaggagtcgtcgacgaaaaacatgttccggcttatcgcgatgagcaaaacgtagcaaaagattcgaatacggaaacgttcgttgccggcaaactgctgatcgacaacttcagatgggccggtgtgccgttctacatccggacaggcaaacggatgcagaaaaaatcaacgcagattgtcgtccaatttaaagacattccgatgaatctttattacggaaacggcaacacgatgcaccctaatctgctggtgattcatattcagccggatgaaggcatcacccttcatttaaacgcaaggaagcttggaggcggcacttttgcccagccgatcaagctcgactactgccataactgcggggacggcatcaacacgcctgaagcttatgaaaagctgattttggactgcttgcacggagacgcgacaaactttgcccactgggatgaagttgcgctttcctggagttttgttgatgcgatttctcaaaactgggaggaaaacaaaaccctttcccctaactataaggcgggctccatggggccgaaagcttctgacgacctgctcgcaaaagacggctttcattggtggccgctttaa

SEQ ID NO: 2123 - protein, 492 aa, Bacillus licheniformis ATCC 14580
MKKDQMEPKAVIVIFGATGDLAKRKLYPSIHRLYENGQIGNEFAVVGVGRRPWTNEDFRSTVQQSVSKFPLNEKDVDEFTSHFYYHPFDVTNSGSYRELNELIEKLESTYDIPNNRMFYLAMAPEFFGTIAKFLKSEGVTSTTGWSRLVIEKPFGHDLPSAKALNQEIREAFTEDQIYRIDHYLGKQMVQNIEVIRFANAIFEPLWTNRYISNIQITSSEDLGVEDRARYYEKSGALRDMVQNHILQMVALLAMEPPIKLNTEEIRSEKVKVLRALRPIQKDDVDQFFVRGQYDAGVVDEKHVPAYRDEQNVAKDSNTETFVAGKLLIDNFRWAGVPFYIRTGKRMQKKSTQIVVQFKDIPMNLYYGNGNTMHPNLLVIHIQPDEGITLHLNARKLGGGTFAQPIKLDYCHNCGDGINTPEAYEKLILDCLHGDATNFAHWDEVALSWSFVDAISQNWEENKTLSPNYKAGSMGPKASDDLLAKDGFHWWPL

SEQ ID NO: 2124 - DNA, 1491 bp, Legionella pneumophila subsp. pneumophila str. Philadelphia 1
  CDS (1)..(1491): transl_table=11
atgctcttaaaagcagaatcgaagtatccttgtgatttaattttgtttggtacgctgggtgacttgtcttgtcgaaaattgttgcccgcattatatcaactagaactggctaatttacttcacgaaaaaacaagaattattgggtgtgcccgagaagagcttgatttttctgcttatgttgacttgattaaaaataaaattcagcaatttttatttgatgaaattgatgaagcagtctggttacgttttataaagaaactggcttattgcaagcttgatctgaatcaatcagatgattatcaaaaattaacggactatgttaacccttctgagcgagtggttatttcttacttggcaattcctccaagcctttattctcaaacttgccgcagtcttgctcgccttaatctaacacagaaaccatcgcgagttgttttggaaaaacctattggccatgatttgccttcttctgtagcaaccaacgaacaagtggcttgtttttttgctgaagatcagatttatcgaattgatcattacctgggtaaagaaaccgtcttgaatttattagtgcttcgctttgctaattccatattttcaaccaattgggataatcgcgttattgatcgagttgaaatttctgttgccgaagaaatcggtgttgaaggccgttgggaatattatgataagtcgggccaagtcagggacatgctgcaaaatcatttgttacaaatattatctttagttgcgatggaaccccccttaagcctttcagcagaaagcatcagaagcgaaaaattaaaagtactgaaatctttgcgttttattaacaagtccaatgttcatgatcatacagtacgagcccaatatgtggccaatactttagcaaatggtaaaaaaatacctggttatttggaagaggtgggtgctaatcaggcatctacaacagaaacttttgttgctatcaaagcctatgttgacaattggcgatggtctggtgttccattctatatgcttactggcaaaagattacccaaaaagcaaagcgaagtggttatttattttaaaccacagccttataatatctttcatcccttaaatgaagaattgtaccctaatcagttaattattcgcttacaacccgatgaaggggtggaggtgaggataatgaataaaattccgggtcttggtgagcgtatgatgttgcatgattccaagttggatttaaatttccatcatagttttaaaacgcaaaggattgctgatgcctatgagagattattgctagaggtcatgttaggtaatcagtatctttttgtaagccgagaagaaattgaacaggcttggcaatggattgacagtattgtatcggcatgggaagaagataatattccgctgtatacctatccagcttgtacatgggggccaaaggaagtcatacgcttatttaatgggcaagcacatgtttggggtgatcacaatgcagtttcataa

SEQ ID NO: 2125 - protein, 496 aa, Legionella pneumophila subsp. pneumophila str. Philadelphia 1
MLLKAESKYPCDLILFGTLGDLSCRKLLPALYQLELANLLHEKTRIIGCAREELDFSAYVDLIKNKIQQFLFDEIDEAVWLRFIKKLAYCKLDLNQSDDYQKLTDYVNPSERVVISYLAIPPSLYSQTCRSLARLNLTQKPSRVVLEKPIGHDLPSSVATNEQVACFFAEDQIYRIDHYLGKETVLNLLVLRFANSIFSTNWDNRVIDRVEISVAEEIGVEGRWEYYDKSGQVRDMLQNHLLQILSLVAMEPPLSLSAESIRSEKLKVLKSLRFINKSNVHDHTVRAQYVANTLANGKKIPGYLEEVGANQASTTETFVAIKAYVDNWRWSGVPFYMLTGKRLPKKQSEVVIYFKPQPYNIFHPLNEELYPNQLIIRLQPDEGVEVRIMNKIPGLGERMMLHDSKLDLNFHHSFKTQRIADAYERLLLEVMLGNQYLFVSREEIEQAWQWIDSIVSAWEEDNIPLYTYPACTWGPKEVIRLFNGQAHVWGDHNAVS

SEQ ID NO: 2126 - DNA, 1485 bp, Methylococcus capsulatus str. Bath
  CDS (1)..(1485): transl_table=11
atgaccctgcagcaacctcctcaggcgctaccgtgccattttgtcattttcggagccacgggcgatctggctgcgctcaagctgcttcccgcgctctatcgcctggatgtcggggggcacttgccggctggcatgtcgatcatcgccctagggcggcggccttggagtgaggccgattggctccagcatctggaggaaagcatccggcggcgtacgggcgaacagttcaacgcccgcgtctatcggcgtttcgcggcacgtttcgcctatgtcgcgggcgacctgcatgatccggccatctatcagaccctgagcgacaggctctgcgccgaccagagctgcgcccacgcagcgttctatttgtctctcaaaccttccgatttcggggaggtcatccagcggctcgagcaggccggattgaaccggccacgcggtctgcatcggatcgtggtggaaaagcccttcggcgaagacatcgacagcgccaggcaactgaaccggttgttgcacgacgccttcgacgaggaacagatttaccggattgatcattatctgggtaaggaaacggtccagaatctcctggtgttccggttcgccaacacgctcatcgagccgctctggaaccgcaattacatcgatcacgtgcagatttccgtggcggaacaggcgggcgtttccactcgtgccgactactacgacaaagccggtgcgctccgtgacatgctgcagaaccatttactgcagttgcttacattggtggccatggagccgccgccggcactggaagccgatgcgctgcgcgacgagaaggtcaaagtgctgcgatcgatccgtcccatcgaagaccaggtgatcaatgcccatgcgttccgggcgcagtacggtcctggctcgattgacggtgtccccgtgccgggctatcaggacgaggccggggtggcgcctcattccatcgccgagaccttcgtcgccgccaagttctatgtcgacaactggcgctggcgcggcgtgcctttctatctgcgcaccggcaagcgactcgcgcagcagctctcgctcgtcgccatccgcttccgccatccgccccagcagttgttccgggagactccgctggaattcatcgagcccaactgggtcttgctttccctgcagccgtcggagagcatgcatatcgagctgcattccaagcagccgggtcttgggatggacacacggatcatccggctcgacgcgtcctatcggcgcggccgggagaaaacgctggaagcttacgaaacgctgctgctggatatcatggaaggcgaccgttcgctgttcctgcgtttcgatgaggtggaatgggcctggcgcgtggtcgatcccatactccggcattggacgcggcagcgcgatttcatccacacctatccggccggctcgtgggggccactggaagccgaccgtttgttcgacaaactcgagcagagctggcgcaaccagttatga

SEQ ID NO: 2127 - protein, 494 aa, Methylococcus capsulatus str. Bath
MTLQQPPQALPCHFVIFGATGDLAALKLLPALYRLDVGGHLPAGMSIIALGRRPWSEADWLQHLEESIRRRTGEQFNARVYRRFAARFAYVAGDLHDPAIYQTLSDRLCADQSCAHAAFYLSLKPSDFGEVIQRLEQAGLNRPRGLHRIVVEKPFGEDIDSARQLNRLLHDAFDEEQIYRIDHYLGKETVQNLLVFRFANTLIEPLWNRNYIDHVQISVAEQAGVSTRADYYDKAGALRDMLQNHLLQLLTLVAMEPPPALEADALRDEKVKVLRSIRPIEDQVINAHAFRAQYGPGSIDGVPVPGYQDEAGVAPHSIAETFVAAKFYVDNWRWRGVPFYLRTGKRLAQQLSLVAIRFRHPPQQLFRETPLEFIEPNWVLLSLQPSESMHIELHSKQPGLGMDTRIIRLDASYRRGREKTLEAYETLLLDIMEGDRSLFLRFDEVEWAWRVVDPILRHWTRQRDFIHTYPAGSWGPLEADRLFDKLEQSWRNQL

SEQ ID NO: 2128 - DNA, 1458 bp, Silicibacter pomeroyi DSS-3
  CDS (1)..(1458): transl_table=11
atggtatcgcgcatcatcccggtagagcctttcgatctggtcgtctttggcggcaccggcgatcttgcgcgcagcaagattctgccggcgctgttccggcgctcggtcgcggggcaggtgcccgagggcggtcgtatcatcggcgtcgcgcgtcaggacatgggggtcgaggcctatcacgccctgatcgcccaaagcctgcgcgagctgttgcccgatctggcgcaagtgcccggcgcgcttgaccgctttctgaaacagctcgattacgtggcgctggatgcgacccaacccgagggatgggagcagctggccagcatgttggggcagggggtgcgtgccttttatttctcggtcggccccggtctgttcggtgccctggccgaacggctgcgccagcacgggctggtcagcgacgatacgcggatcgtggtcgaaaaaccctttggtcacgatctggccagcgcccgggcgctgaacgccacgctggccgcgcaatttcatgagcgtcagatctatcggatcgaccattacctgggcaaggaaacggtacagaacctgatggccgtgcggttcggcaacatgctgttcgaaccgctctggaacagccagtatgtcgatcatatccagatcaccgtggccgaggcggtcggggtcggcgggcgggccgattattacgaccgcgccggcgccatgcgcgacatgatgcagaaccatctgatgcagcttctgtgcctgatcgcgatggagcctccggccaagttcgaccccgacgcggtgcgtgacgagaagctcaaggtgatccgggcgctggatgcggtcaagccgcaccatatcgtgcgcggccaatacgcggtgccggtgggcggcgtcgggcagggctatcgcgacgaggtaggcgatccgcgctcgatcaccgaaagctatatcgccctgcgcgcccatatcagcaactggcggtgggcgggcacgcccttctacctgcggaccggcaagcggctggtggcgcgctcttcggtcatcaacgtgatgttcaaggacgcgccgcattcgatctttggcgaggaggcggggcggcatgccaatgtgctgtcgatccggctgcaacccaacgagggcatcacgctcaaggtgacgatcaaggagccggggccgggcgggatgcgcctggtcgatgtgcccttggacatgagtttcgccaaggcgctggggcccgaaaaccagagcccgcccgacgcctatgaacgtctgatcatggatgtgatccggggcaaccagaccctgttcatgcgcggcgacgaggtcgaggctgcctgggcctggactgacccgatcatcgccggctggcaggcgcggggcgatgtgcccaaaccctatgactgcggcagtaccggcccgggcgacgccgaactgctgatgagacgtgatggtcgccgctggcaagggataaacccatga

SEQ ID NO: 2129 - protein, 485 aa, Silicibacter pomeroyi DSS-3
MVSRIIPVEPFDLVVFGGTGDLARSKILPALFRRSVAGQVPEGGRIIGVARQDMGVEAYHALIAQSLRELLPDLAQVPGALDRFLKQLDYVALDATQPEGWEQLASMLGQGVRAFYFSVGPGLFGALAERLRQHGLVSDDTRIVVEKPFGHDLASARALNATLAAQFHERQIYRIDHYLGKETVQNLMAVRFGNMLFEPLWNSQYVDHIQITVAEAVGVGGRADYYDRAGAMRDMMQNHLMQLLCLIAMEPPAKFDPDAVRDEKLKVIRALDAVKPHHIVRGQYAVPVGGVGQGYRDEVGDPRSITESYIALRAHISNWRWAGTPFYLRTGKRLVARSSVINVMFKDAPHSIFGEEAGRHANVLSIRLQPNEGITLKVTIKEPGPGGMRLVDVPLDMSFAKALGPENQSPPDAYERLIMDVIRGNQTLFMRGDEVEAAWAWTDPIIAGWQARGDVPKPYDCGSTGPGDAELLMRRDGRRWQGINP

SEQ ID NO: 2130 - DNA, 1452 bp, Silicibacter pomeroyi DSS-3
  CDS (1)..(1452): transl_table=11
atggtatcgcgcgtcattccggtcaacgctttcgatctggtcctgttcggggccaccggcgatctggctcgccgcaagattttgccgggcctcttccatcgctacgaggttgggcagatgccggaagaggcgcggatcatcggctcggcccggactgagttgagcaccgaggccttccgcgctgacgtgcgtcaggcgatcgaggagttcacgcccgaaaccccgacccgtgctgcggtgctggagcggttcctgctaaagcttgactatgtcgcggtggatgcacgcggagacgcgggctggcaggcgctggccgcaatgttgcgcccggatgtggtgcgcgccttttacctgtcggtcggaccgtcgctgtttgccggtatagcccgccagctggactgccacggcatggccacgcccgaggcgcggatcgtggtcgaaaaaccctttggccgcgatctggaaaccgcacgcgccctgaatgccggtctgcgcgcctgtttcgaagagcaccagatctatcggatcgaccattatctgggcaaggagacggtgcagaacctgatggcgctgcgctttgccaattcgctgttcgaaccgctgtggaacgcgacccatatcgaccacgtgcagattaccgtggccgaaagcctggggatcgaggggcgcgaggcctattacgaccagtccggcgccatgcgggacatggttcagaaccatctggtgcagctcctttgtctgaccgcgatggagccaccatcgaaattcactccgaacgcggtgcgcgacgaaaaggtcaaggtgatcgaggcgcttgacccggttccgcccggcgacatcgcccggggacagtatcgcgccgacaagggtggcgatggttatctggatcatgtgggtgacgcccagagccgtaccgaaagcttcatcgcgctcaaggttcacgtggccaactggcgctgggccggggtgccgttctatctgcgtacgggcaagaggctgcgggcgcgggtgtcggaaatcgtggtgcagttccgcgatccgccacattcgatctttcccaatgtgggaccgatccatggcaacaagctgattatccggctgcaaccggacgagggcatcaccctgcgcaccacgatcaaggatccgggcccgggcggcttccggctggccgaggtgccgctggacatgagctttgccgaggcgctgggcggcgatgtccggcctcaggatgcctatgagcggctggtgatggatgtgatccggggcgaccagaccctgttcatgcgcggagacgaggccgaggccgcctgggcctgggttgatccgatcatcgccgaatgggaaaagaaccgcgaccggccctatccttatgatcagggcagttcgggaccggaagaggcactgatgctgctgcatcgtgacggccgccgctggcggcagatcggaggatga

SEQ ID NO: 2131 - protein, 483 aa, Silicibacter pomeroyi DSS-3
MVSRVIPVNAFDLVLFGATGDLARRKILPGLFHRYEVGQMPEEARIIGSARTELSTEAFRADVRQAIEEFTPETPTRAAVLERFLLKLDYVAVDARGDAGWQALAAMLRPDVVRAFYLSVGPSLFAGIARQLDCHGMATPEARIVVEKPFGRDLETARALNAGLRACFEEHQIYRIDHYLGKETVQNLMALRFANSLFEPLWNATHIDHVQITVAESLGIEGREAYYDQSGAMRDMVQNHLVQLLCLTAMEPPSKFTPNAVRDEKVKVIEALDPVPPGDIARGQYRADKGGDGYLDHVGDAQSRTESFIALKVHVANWRWAGVPFYLRTGKRLRARVSEIVVQFRDPPHSIFPNVGPIHGNKLIIRLQPDEGITLRTTIKDPGPGGFRLAEVPLDMSFAEALGGDVRPQDAYERLVMDVIRGDQTLFMRGDEAEAAWAWVDPIIAEWEKNRDRPYPYDQGSSGPEEALMLLHRDGRRWRQIGG

SEQ ID NO: 2132 - DNA, 1488 bp, Bacillus clausii KSM-K16
  CDS (1)..(1488): transl_table=11
atgaaccagatcgaacaagcggaagcggtttttgttatttttggctctacaggtgatttagcaaaacgaaaattgtttccttctatatacaatttatacagaaaaggcaatttgaacgaacattttgctgtagtaggtttagggcgccgtgaatgggatgatgaaaaactaagaacagtcgtgatggaatcgatccaagaagaacttggcgagcaacgtcctgaagtgactgaatcatttttaaagcatttttcctatctatcatttgatgtcaccaacaaagattcctatagcgagctcaatgacaagttgcatattttggatgagacattccaaattcctgggaaccgtattttttatatggcaatggcacctgaattttttgggcaaattgcacagtcaatacataacgaagggctaaaggacacgcaaggatggacgcgtcttgtgattgagaaaccgtttggcacagacttgcaatcggctatccgtttaaatgacgaaatacgccaggcattttcagaagatgaaatttatcggatcgaccactatttaggcaaagaaatggtgcaaaacattcaagtgatccgttttgccaatgccatatttggttcattgtggaacaaccggcatatcgctaatatccaagtgacttccagtgagcagctcggtgtcgaaggacggggcggctattatgaaaaatcaggagcccttcgtgatatggtacaaaaccatatgctgcaaatggtgtctctcttggcaatggatgtacctcttcgtttgtccaccgatgatatacgtagcgaaaaaattaaagtgctacgcgcattgcgcccgattgtcggcgagagcatcaaggaaaatgtggtacgcgggcaatatggccgaggggaaatcaatgggcaagaagtgattggctatttagaagaagaaaatgtgagtgattcgtcaaaaacagagacttacgttgcggcaaagttaatgattgacaatcatgtttgggcaggcgtccctttttatatccgcactggaaagcggatggcggtgaagtcaacgaaaatcgttgttgaatttaaggaattacctttaaatctgtatagcaaggaaaacaaacagactgggccgaatttgttgatcatccatatccagcctgatgaaggcatgacgattgttttgaacggcaaaaagattggctccgcagatacaacgcctgtccatttgcaatacaggcatgatagcgaagaccggtttaacacgcctgaggcatatgagcggctcctctttgattgcatgatgggcgatgccacaaactttgcccattgggatgaagttagtttgtcatggtcgcttgttgatgcgatctccaaagcgtggtcagaaagcggagaaaaactgccaacctatcgagctgggtcgatggggccgaaagaagcggatgagcttcttgaagcagacggcttttcatggtggcctgttgaagaaatgtaa

SEQ ID NO: 2133 - protein, 495 aa, Bacillus clausii KSM-K16
MNQIEQAEAVFVIFGSTGDLAKRKLFPSIYNLYRKGNLNEHFAVVGLGRREWDDEKLRTVVMESIQEELGEQRPEVTESFLKHFSYLSFDVTNKDSYSELNDKLHILDETFQIPGNRIFYMAMAPEFFGQIAQSIHNEGLKDTQGWTRLVIEKPFGTDLQSAIRLNDEIRQAFSEDEIYRIDHYLGKEMVQNIQVIRFANAIFGSLWNNRHIANIQVTSSEQLGVEGRGGYYEKSGALRDMVQNHMLQMVSLLAMDVPLRLSTDDIRSEKIKVLRALRPIVGESIKENVVRGQYGRGEINGQEVIGYLEEENVSDSSKTETYVAAKLMIDNHVWAGVPFYIRTGKRMAVKSTKIVVEFKELPLNLYSKENKQTGPNLLIIHIQPDEGMTIVLNGKKIGSADTTPVHLQYRHDSEDRFNTPEAYERLLFDCMMGDATNFAHWDEVSLSWSLVDAISKAWSESGEKLPTYRAGSMGPKEADELLEADGFSWWPVEEM

SEQ ID NO: 2134 - DNA, 1485 bp, Staphylococcus epidermidis RP62A
  CDS (1)..(1485): transl_table=11
ttgagtactaaacaaaaacacattccctgtttgattacaatattcggtgccacaggagatttgagtcatagaaagctatttccttctatattccatttatatcaacaagacaatttagatgaacatattgctattattggtataggacgtcgcgattataataacgaacaatttcgcgaccaagttaaagcgtcaattcaaacttatgttaaagatacagatagaattgatgagtttatgacgcatgttttttatcataaaactgacgtgagtgataaagaaagttatcagtcattacttcaatttagtgagcgactagattcagaatttgctttaggtgggaatcgtctgttttacttagcgatggcaccacaattttttggagtgatctcagattaccttaaatcttctggtcttactcaaactacaggatttaaacgcttagttatagagaaaccatttggcagtgatcttaaatctgctgaatcattaaataatcaaataagacgttcgtttaaagaagaagaaatttatcggatagatcactatcttggcaaagatatggtgcaaaatatagaagttttgcgattcgcaaacgcgatgtttgaacctttatggaataataaatacatttcaaatattcaagttacatcatcagaagtattaggtgtcgaagatcgtggtggctactatgaatctagtggtgcacttaaagacatggtacaaaatcacatgctacagatggttgctttacttgcaatggaagcaccgataagtttgaatagtgaagatatacgtgcagaaaaagtcaaagtacttaaatctcttagacaattaaaaccagaagaagttaaaaagaatttcgtgcgtggtcaatatgatcaaggcaatatagatggtaaacaggttaagtcatatcgagaagaagatcgcgtagcaaaggattcggttacaccgacatttgtatcgggtaaattaacaattgataactttagatgggctggagttcctttctacattagaacgggtaaacgtatgaaatcaaaaacgatacaagtcgtagtagaatttaaagaagtacctatgaatttatattatgaaactgacaatttactagattctaatttgctagtcattaatattcaaccaaatgaaggaatttcattgcatttaaatgctaaaaagaacattcaaggaattgatactgagccagtgcaattatcatacgcaatgagtgctcaagataaaatgaatacagttgatgcatatgaaaacttattgtttgattgtcttaaaggtgatgcgactaattttacacattgggaagaattaaaatctacttggaaatttgtagatgcaatccaagatcaatggacaatggttgaaccatgtttccctaactatgaagcgggtacgaatggacctcttgaaagtgatcttttattaagtcgtgatggaaatcattggtgggatgatatccactaa

SEQ ID NO: 2135 - protein, 494 aa, Staphylococcus epidermidis RP62A
MSTKQKHIPCLITIFGATGDLSHRKLFPSIFHLYQQDNLDEHIAIIGIGRRDYNNEQFRDQVKASIQTYVKDTDRIDEFMTHVFYHKTDVSDKESYQSLLQFSERLDSEFALGGNRLFYLAMAPQFFGVISDYLKSSGLTQTTGFKRLVIEKPFGSDLKSAESLNNQIRRSFKEEEIYRIDHYLGKDMVQNIEVLRFANAMFEPLWNNKYISNIQVTSSEVLGVEDRGGYYESSGALKDMVQNHMLQMVALLAMEAPISLNSEDIRAEKVKVLKSLRQLKPEEVKKNFVRGQYDQGNIDGKQVKSYREEDRVAKDSVTPTFVSGKLTIDNFRWAGVPFYIRTGKRMKSKTIQVVVEFKEVPMNLYYETDNLLDSNLLVINIQPNEGISLHLNAKKNIQGIDTEPVQLSYAMSAQDKMNTVDAYENLLFDCLKGDATNFTHWEELKSTWKFVDAIQDQWTMVEPCFPNYEAGTNGPLESDLLLSRDGNHWWDDIH

SEQ ID NO: 2136 - DNA, 1446 bp, Neisseria gonorrhoeae FA 1090
  CDS (1)..(1446): transl_table=11
atgagtacacagacaaattttgatttggtgttgttcggtgcgaccggcgatttggcaatgcgcaaacttttgccctgcctgtatcaggcgcatgttgccggtctgcttcatcccgaagggcgtattttgggggtcagccgcagcgagttggataccgaaggttttctggcgaaggtggaaaccagttccaaaatccatgtgaaagaaaatttttccggtgaggcgtgggcttcgtttgttgaacgtctcgcatatctcaaagtcgatgttacgcagccggacgattttgccgctttgggcgatttggtcaaagcacgcaaagaaaccgacaacgtcgtcatctatctgtccaccgcgccgaaattcttcgcgcaagcctgcgaaaaccttgctgcgatcggtttgaatgccgacaatgtgcgcgtggttttggaaaaaccgctgggtacggatttggcttcttcccaacaaatcaataccgatgtggcgcgttatttcaaagaagggcaaatttaccgcatcgaccactaccttggcaaagaaagcctgcaaaacctgcttgcgctgcgttttgccaatgtaatgttcgagccgctgtggaacaataaatacatcgaaagcgtgcagctgaccatcgccgaacagctcggtgtggaagagcgcggcgagttttacgacattaccggcgcgttgcgcgatatggtgcaaaaccatttgatgcagatgctgtgcatgactgcgatggaagcccccgccggcttggatgccgacgcggtgcgcgatgaaaaagtcaaagtcatcaagtcattgaagccgctgaccatcgaatctgtcaatgaaaatgtcgtgcgcggacaatataccgctgccaaaggcatgaacggctatcttgaagaaatcaacgttccgcaagacagctttaccgaaacctacgtcgccattaaagccgaaatcgaaaacgaacgctggaagggcgttcccttctacctgcgtaccggcaaacgcatggcgggcaaagtggcggaaatcgttttgaacttccgcccgctgcaaaaccatattttcgacaacagccaaaccgcgccgaaccgtttggttatcgagcttcaaccgaatgaatccgtccgcctttacacgcaggtgaaaaccccgggtgcgggcaacaaagtggaagtaacgcctttgggcgtggatttgggcaaggccgttgaaggccgccgcgccgaggcttacgaacgcctgctgttggatgtgattaacggcaaactcgctttgttcaaccgccgcgacgaactcgaagccgcgtgggaatatgtgatgccgattttggaaaactgggcaaataacaccacgccgccgcacggttacggcgcacactcttggggtcctgaagccgcccgcgaactgttggcgcgcgacggcaacaagtggcacgaagaacagtaa

SEQ ID NO: 2137 - protein, 481 aa, Neisseria gonorrhoeae FA 1090
MSTQTNFDLVLFGATGDLAMRKLLPCLYQAHVAGLLHPEGRILGVSRSELDTEGFLAKVETSSKIHVKENFSGEAWASFVERLAYLKVDVTQPDDFAALGDLVKARKETDNVVIYLSTAPKFFAQACENLAAIGLNADNVRVVLEKPLGTDLASSQQINTDVARYFKEGQIYRIDHYLGKESLQNLLALRFANVMFEPLWNNKYIESVQLTIAEQLGVEERGEFYDITGALRDMVQNHLMQMLCMTAMEAPAGLDADAVRDEKVKVIKSLKPLTIESVNENVVRGQYTAAKGMNGYLEEINVPQDSFTETYVAIKAEIENERWKGVPFYLRTGKRMAGKVAEIVLNFRPLQNHIFDNSQTAPNRLVIELQPNESVRLYTQVKTPGAGNKVEVTPLGVDLGKAVEGRRAEAYERLLLDVINGKLALFNRRDELEAAWEYVMPILENWANNTTPPHGYGAHSWGPEAARELLARDGNKWHEEQ

SEQ ID NO: 2138 - DNA, 1566 bp, Chlamydophila abortus S26/3
  CDS (1)..(1566): transl_table=11
atgtcacgaggtctcaaaagtacgatggaaatgacaagtaatgaaaatcaagacagtgggagaactttacccccatgccccccctgtgtgatggtaattttcggtgccaccggtgatctcacagcgcgcaagttatttccagcattataccatctgatcaaagaaggcaggctatctaacaactttgtttgtgtaggctttgcaagaagaaaaaagagtcacgaagaatttcgtgaagaaatgaaacaggctatacagaatttttcacgtgctcaagaactcgatatccgtatctgggaggaatttgaatcacgtatattttatcacgaatcgaacttttcttcttcggaaggctacgcttcattgaaggaaagacttgaggaaattgataagcaagacggcactcaagggaaccggctattttatttatctacacccccagattatttccccgaaattattgaaaatatcaataagcacaaactgttctatcatgatcaaggagaaggcaaaccttggtcacgcgtgattatagaaaaaccttttggtgtagatttgcaaagcgccaaggagttgcaaaaatacatagatgacaatttagatgaaggctctgtctatcgtattgaccattatttaggaaaagaaactgtacaaaacatcctcacgatacgttttgccaataccctatttgagtcttgttggaattctcaatatattgatcacgtacaaattagcgttagcgaatccataggcataggcactcgaggaaatttctttgagaaatcagggatgcttcgcgatatggtgcaaaaccatatgatgcagcttttgtgtttacttactatggaacccccttccgtcttcaattctgaagagataaaaaaagaaaaaatccatgtcctcaagaaaatacgtccattttctcaagacgatgtagtccgtggtcagtatggcactggagaagtccaaggagtttctgttcttggctatcgcgaagaggaaaatgtcaatcctcattctatggtagagacttacgtagctttgaagatgttcatagataaccctcgttggttaggagtgcctttctatctacgcgcaggaaaacgcctagctaaacgctctacagatatttctattatttttaaaaagtcctatgcgactttatttgaacccgaatcttgtcgtatttgtcctatagaaaatgatctcctcattattcgtatacaaccggatgaaggcgtagctttgcaatttaactgtaaagttcctgggatgaataatgtcgtgcgtcctgtgaaaatggattttcgctacgatacttattttaaaacaacagcccctgaagcctacgaaagattgctttgtgactgcattttaggtgataggatcctgtttacatctagtgatgaagtcatggcttcttgggagctgttcacacccattctacagcagtgggaacaagattcttcagatgtgtgcttccctaattatgttgccggctctgtaggacctaaagaggcagatcaattactacaagccgatggaagaagttggcgtcctttgtaa

SEQ ID NO: 2139 - protein, 521 aa, Chlamydophila abortus S26/3
MSRGLKSTMEMTSNENQDSGRTLPPCPPCVMVIFGATGDLTARKLFPALYHLIKEGRLSNNFVCVGFARRKKSHEEFREEMKQAIQNFSRAQELDIRIWEEFESRIFYHESNFSSSEGYASLKERLEEIDKQDGTQGNRLFYLSTPPDYFPEIIENINKHKLFYHDQGEGKPWSRVIIEKPFGVDLQSAKELQKYIDDNLDEGSVYRIDHYLGKETVQNILTIRFANTLFESCWNSQYIDHVQISVSESIGIGTRGNFFEKSGMLRDMVQNHMMQLLCLLTMEPPSVFNSEEIKKEKIHVLKKIRPFSQDDVVRGQYGTGEVQGVSVLGYREEENVNPHSMVETYVALKMFIDNPRWLGVPFYLRAGKRLAKRSTDISIIFKKSYATLFEPESCRICPIENDLLIIRIQPDEGVALQFNCKVPGMNNVVRPVKMDFRYDTYFKTTAPEAYERLLCDCILGDRILFTSSDEVMASWELFTPILQQWEQDSSDVCFPNYVAGSVGPKEADQLLQADGRSWRPL

SEQ ID NO: 2140 - DNA, 1518 bp, Pseudomonas fluorescens Pf-5
  CDS (1)..(1518): transl_table=11
atgaccaccacgcgaaagaagtccaaggcgttgccggcgccgccgaccacgctgttcctgttcggcgcccgcggtgatctggtcaagcgcctgctgatgccggcgctgtacaacctcagccgcgacggtttgctggatgaggggctgcggattgtcggcgtcgaccacaacgcggtgagcgacgccgagttcgccacgctgctggaagacttccttcgcgatgaagtgctcaacaagcaaggccagggggcggcggtggatgccgccgtctgggcccgcctgacccggggcatcaactatgtccagggcgattttctcgacgactccacctatgccgaactggcggcgcggattgccgccagcggcaccggcaacgcggtgttctacctggccaccgcaccgcgcttcttcagtgaagtggtgcgccgcctgggcagcgccgggttgctggaggaggggccgcaggcttttcgccgggtggtgatcgaaaaacccttcggctccgacctgcagaccgccgaagccctcaacggctgcctgctcaaggtcatgagcgagaagcagatctatcgcatcgaccattacctgggcaaggaaacggtccagaacatcctggtcagccgtttttccaacagcctgttcgaggcattctggaacaaccattacatcgaccacgtgcagatcaccgcggcggaaaccgtcggcgtggaaacccgtggcagcttttatgaacacaccggtgccctgcgggacatggtgcccaaccacctgttccagttgctggcgatggtggccatggagccgcccgctgcctttggcgccgatgcggtacgtggcgaaaaggccaaggtggtgggggctatccgcccctggtccgtggaagaggcccgggccaactcggtgcgcggccagtacagcgccggtgaagtggccggcaaggccctggcgggctaccgcgaggaagccaacgtggcgccggacagcagcaccgaaacctacgttgcgctgaaggtgatgatcgacaactggcgctgggtcggggtgccgttctacctgcgcaccggcaagcgcatgagtgtgcgcgacaccgagatcgtcatctgcttcaagccggcgccctatgcacagttccgcgataccgaggtcgagcgcctgttgccgacctacctgcggatccagatccagcccaacgaaggcatgtggttcgacctgctggcgaaaaagcccgggccgagcctggacatggccaacatcgaactgggttttgcctaccgcgactttttcgagatgcagccctccaccggctacgaaaccctgatctacgactgcctgatcggcgaccagaccctgttccagcgcgccgacaacatcgagaacggctggcgcgcggtgcaacccttcctcgatgcctggcaacaggacgccagcttgcagaactacccggcgggcgtggatggcccggcagccggggatgaactgctggcccgggatggccgcgtatggcgacccctggggtga

SEQ ID NO: 2141 - protein, 505 aa, Pseudomonas fluorescens Pf-5
MTTTRKKSKALPAPPTTLFLFGARGDLVKRLLMPALYNLSRDGLLDEGLRIVGVDHNAVSDAEFATLLEDFLRDEVLNKQGQGAAVDAAVWARLTRGINYVQGDFLDDSTYAELAARIAASGTGNAVFYLATAPRFFSEVVRRLGSAGLLEEGPQAFRRVVIEKPFGSDLQTAEALNGCLLKVMSEKQIYRIDHYLGKETVQNILVSRFSNSLFEAFWNNHYIDHVQITAAETVGVETRGSFYEHTGALRDMVPNHLFQLLAMVAMEPPAAFGADAVRGEKAKVVGAIRPWSVEEARANSVRGQYSAGEVAGKALAGYREEANVAPDSSTETYVALKVMIDNWRWVGVPFYLRTGKRMSVRDTEIVICFKPAPYAQFRDTEVERLLPTYLRIQIQPNEGMWFDLLAKKPGPSLDMANIELGFAYRDFFEMQPSTGYETLIYDCLIGDQTLFQRADNIENGWRAVQPFLDAWQQDASLQNYPAGVDGPAAGDELLARDGRVWRPLG

SEQ ID NO: 2142 - DNA, 1470 bp, Pseudomonas fluorescens Pf-5
  CDS (1)..(1470): transl_table=11
atgccttcgataacggttgaaccctgcacctttgccttgtttggcgcgctgggcgatctggcgctgcgtaagctgtttcctgccctgtaccaactcgatgccgccggtttgctgcatgacgacacgcgcatcctggccctggcccgcgagcctggcagcgagcaggaacacctggcgaatatcgaaaccgagctgcacaagtatgtcggcgacaaggatatcgatagccaggtcctgcagcgttttctcgtccgcctgagctacctgcatgtggacttcctcaaggccgaggactacgtcgccctggccgaacgtgtcggcagcgagcagcgcctgattgcctacttcgccacgccggcggcggtgtatggcgcgatctgcgaaaacctctcccgggtcgggctcaaccagcacacccgtgtggtcctggaaaaacccatcggctcggacctggattcatcacgcaaggtcaacgacgcggtggcgcagttcttcccggaaacccgcatctaccggatcgaccactacctgggcaaggaaacggtgcagaacctgattgccctgcgtttcgccaacagcctgttcgaaacccagtggaaccagaactacatctcccacgtggaaatcaccgtggccgagaaggtcggcatcgaaggtcgctggggctatttcgacaaggccggccaactgcgggacatgatccagaaccacttgctgcaactgctctgcctgatcgcgatggacccgccggccgacctttcggccgacagcatccgcgacgagaaggtcaaggtgctcaaggccctggcgcccatcagcccggaaggcctgaccacccaggtggtgcgcggccagtacatcgccggccacagcgaaggccagtcggtgccgggctacctggaggaagaaaactccaacacccagagcgacaccgagaccttcgtcgccctgcgcgccgatatccgcaactggcgctgggccggtgtgcctttctacctgcgcaccggcaagcgcatgccacagaagctgtcgcagatcgtcatccacttcaaggaaccctcgcactacatcttcgcccccgagcagcgcctgcagatcagcaacaagctgatcatccgcctgcagccggacgaaggtatctcgttgcgggtgatgaccaaggagcagggcctggacaagggcatgcaactgcgcagcggtccgttgcagctgaatttttccgatacctatcgcagtgcacggatccccgatgcctacgagcggttgttgctggaagtgatgcgcggcaatcagaacctgtttgtgcgcaaagatgaaatcgaagccgcgtggaagtggtgtgaccagttgattgccgggtggaagaaatccggcgatgcgcccaagccgtacgcggccgggtcctgggggccgatgagctccattgcactgatcacgcgggatgggaggtcttggtatggcgatatctga

SEQ ID NO: 2143 - protein, 489 aa, Pseudomonas fluorescens Pf-5
MPSITVEPCTFALFGALGDLALRKLFPALYQLDAAGLLHDDTRILALAREPGSEQEHLANIETELHKYVGDKDIDSQVLQRFLVRLSYLHVDFLKAEDYVALAERVGSEQRLIAYFATPAAVYGAICENLSRVGLNQHTRVVLEKPIGSDLDSSRKVNDAVAQFFPETRIYRIDHYLGKETVQNLIALRFANSLFETQWNQNYISHVEITVAEKVGIEGRWGYFDKAGQLRDMIQNHLLQLLCLIAMDPPADLSADSIRDEKVKVLKALAPISPEGLTTQVVRGQYIAGHSEGQSVPGYLEEENSNTQSDTETFVALRADIRNWRWAGVPFYLRTGKRMPQKLSQIVIHFKEPSHYIFAPEQRLQISNKLIIRLQPDEGISLRVMTKEQGLDKGMQLRSGPLQLNFSDTYRSARIPDAYERLLLEVMRGNQNLFVRKDEIEAAWKWCDQLIAGWKKSGDAPKPYAAGSWGPMSSIALITRDGRSWYGDI

SEQ ID NO: 2144 - DNA, 1464 bp, Dechloromonas aromatica RCB
  CDS (1)..(1464): transl_table=11
atgagttgcgccaccgagtcgcatgcctatgtgatcttcggggcgacgggtaatctggccatggccaagctcctgcccgccttgtaccagctgcaccgcctcgggcagctggcgccggatgtccgcattctcggctgcggccgcacgcctcatacgcgggatggctggcgcagcgaggttcggcagcgcctggaaacaagcgatccagcactgctcgaccgctttctccagcgcctcgactatctcgccggcgaccttgaagatgccgccttctatcaggcgctggacagctggatcggggccagcgactgcggcaacaacgtgattttctacctctcggtcagtcccgagttctacgcgccgatcaccatcaggctggcccaggccggtttgctggcggagcgcgctggctggcgacggatggtgattgaaaagcccttcggccacgacctgcaatcggcccgcgacttgcagcacgaactcaatacgcacctcaaggaagagcagatttaccggatcgatcattacgtcggcaaggaatccgtccagaacctgctggtcctgcgtttcgccaacatgatcctcgaacccctgtggaaccggcattacatcgaccaggtacagatcacccatgccgaaacggtcggcctggatgggcgggccaattattacgaccggcatggcggcgcaacgcgcgacatgatccagagccacctgttgcaggttcttgccttgctggccatggagccgccggtttcgttggaagccgagtcgctgcgtgatgaaaaggtcaaggtgctgcgctcgatccgcccgctagagttgccgcaactggccagccatacggtgcgcgcccagtatgccggctatcagcaggaagcaggagtcgccgccggcagccataccgagacttatgccgcgctgaagctgtatgtggacaactggcgctggcgcgatgtgccgttctatctgcgtaccggcaagcgcctcaaggaacgccgttcgatggttgccgtgcgtttccgcgaaccgccaatgcagcttttccaaggaacaggtgcctccgccgttcatccgaactggctgctgatcggtattcagccggacgatgtggtgcagatggaaatatcggccaaggtgcccggccaggaaacgcgcacccgtcagatatcgatggatgcctcggttggcaatcccggcgaacgcaaggcggatgcttacgaagacttgctgatggacgtcattcaaggcgatcgatccctcttcctgcgttatgacgaggtgaaggcggcatggaatgtggtcgatcctgtcatgcgcggctgggctgacgatgaacgcccgccattgcagtatccggtcggcagttgggggccgaaagcagccgaccagatatttggccaggcggatcgggcatggcggcagactttgagctgcaatggcaaatccgaaggggaaacctga

SEQ ID NO: 2145 - protein, 487 aa, Dechloromonas aromatica RCB
MSCATESHAYVIFGATGNLAMAKLLPALYQLHRLGQLAPDVRILGCGRTPHTRDGWRSEVRQRLETSDPALLDRFLQRLDYLAGDLEDAAFYQALDSWIGASDCGNNVIFYLSVSPEFYAPITIRLAQAGLLAERAGWRRMVIEKPFGHDLQSARDLQHELNTHLKEEQIYRIDHYVGKESVQNLLVLRFANMILEPLWNRHYIDQVQITHAETVGLDGRANYYDRHGGATRDMIQSHLLQVLALLAMEPPVSLEAESLRDEKVKVLRSIRPLELPQLASHTVRAQYAGYQQEAGVAAGSHTETYAALKLYVDNWRWRDVPFYLRTGKRLKERRSMVAVRFREPPMQLFQGTGASAVHPNWLLIGIQPDDVVQMEISAKVPGQETRTRQISMDASVGNPGERKADAYEDLLMDVIQGDRSLFLRYDEVKAAWNVVDPVMRGWADDERPPLQYPVGSWGPKAADQIFGQADRAWRQTLSCNGKSEGET

SEQ ID NO: 2146 - DNA, 1605 bp, Thermobifida fusca YX
  CDS (1)..(1605): transl_table=11
gtgcccggcacgctcagccggaccagccacgaccgcgattcacccagggaggacgccgacgtgaaagaaccggtgatgccgggagcggtccccaacccgctgcgcagtgtgctggaccggcggttaccgcggattgccggcccgtgtgtgctcgtcctcttcggggtcacgggcgacctgtcccgcaagaagctgcttcccgctatttacgacctggcgaaccgagggctgctaccgcccggtttcggactcgtgggattcgcccgccgggactgggccgaccaggacttcacccaggtcgcctatgacgcggtccgtacgcatgcgcgcaccccgttccgggaagacgtgtggcgccagttgagcgagggggtgcggttcgtccccggcgaggcgcatgacgacgccgcgtttgatgcgctggtgcgcaccgtgcgggaactggacgagagccggggcaccggcggcaattacgcgttctacctttcgcttcccccgaaactgttccccacggtgctcacccagttgaagcggagcggcctggcggagagctcgggggactcgtggcggcgggtggtgatcgagaagccgttcggccacgacctggccagcgcccaggagctcaacgccctcgtcgacgacgtgttcccaccgcactccgtgttccgtatcgaccactacttggggaaggaaaccgtccagaacctgctggcgctgcgtttctccaacaccctgttcgagccgatctggaaccgctcgtatatcgaccacgtccagatcaccatggccgaggacatcggggtggggggacgcgccgggtactacgacggtatcggggcggcgcgcgacgtcatccagaaccacctgctgcagctcctcgccctggtcgcgatggaggaaccgctgtccttcaccgcggacgcgatccgcgcggagaaggtcaaagcgttgtccgcggtccaactccccgacgatcttgcgaccgggaccgcgcgcggccagtacaccgcgggctggcagggcggcgcctgggttcccggctacttggaggaagaaggcatccccccgaactccaccacggagacgtacgcggccatgcggctgggggtgaacacgcggcgctgggcgggcgtcccgttctacctgcgcacggggaaacgcctggggcggcgggtcaccgaggtcgcactggtgttccaccgcaccgccaaccaggtgttcgaccatgttgccaccgccaaccagggcgccaactccttggtgatccggatccagccggatgagggggtgacgttgcggttcggctccaaagtccccgggaccgccatggaggtgcgcgatgtcagcatggacttcagctacggcgcgtccttcaccgaaaccagtccggaagcctacgagcggctgatcctcgacgtgctcatcggcgatcctccgctcttcccccaccaggaagaagtagagctgtcgtggcggatcctcgacccggtcgaggagttctgggccaagaacggccgccccgaaccctacccggcgggtagctggggcccgcccagcggccacgagctgctggcccgcgacaaccgtacgtggcgcagaccatga

SEQ ID NO: 2147 - protein, 534 aa, Thermobifida fusca YX
MPGTLSRTSHDRDSPREDADVKEPVMPGAVPNPLRSVLDRRLPRIAGPCVLVLFGVTGDLSRKKLLPAIYDLANRGLLPPGFGLVGFARRDWADQDFTQVAYDAVRTHARTPFREDVWRQLSEGVRFVPGEAHDDAAFDALVRTVRELDESRGTGGNYAFYLSLPPKLFPTVLTQLKRSGLAESSGDSWRRVVIEKPFGHDLASAQELNALVDDVFPPHSVFRIDHYLGKETVQNLLALRFSNTLFEPIWNRSYIDHVQITMAEDIGVGGRAGYYDGIGAARDVIQNHLLQLLALVAMEEPLSFTADAIRAEKVKALSAVQLPDDLATGTARGQYTAGWQGGAWVPGYLEEEGIPPNSTTETYAAMRLGVNTRRWAGVPFYLRTGKRLGRRVTEVALVFHRTANQVFDHVATANQGANSLVIRIQPDEGVTLRFGSKVPGTAMEVRDVSMDFSYGASFTETSPEAYERLILDVLIGDPPLFPHQEEVELSWRILDPVEEFWAKNGRPEPYPAGSWGPPSGHELLARDNRTWRRP

SEQ ID NO: 2148 - DNA, 1524 bp, Prochlorococcus marinus str. NATL2A
  CDS (1)..(1524): transl_table=11
atgagcatgccagtaacaaatccattgagaatagggcttcgccaagagcgagtagtacctcctcaatgtctggttatatttggggcctctggagatctaacacacaggaaactagttcctgctctatttgaactctttaagcaaagaagattaccaagtgagtttgccattttaggctgtgcgagaagaccttggactgatgaaatatttaaagaaaaaatggaagaagctctttcttctcaaataaaagaaagtccaaaagagtgggaattattttctcaaaatcttttttatgagcctgtagatctgcaacaacctgaacacctagtaaaacttggagaaagacttgaaataattgacaagctaaaagcgactcacggtcatcgaactttttacctttcagtatctccaaagttctatggaagtggatgcagagctttagctgcagctggattattgaaagatccaaaacgaagtagggtcgtaatcgaaaaaccctttggaagagatttcaatagcgctcagtcactcaattctctcgttcagggatgtgcccaagaaagtcaaatatttcgaatagatcattatttgggtaaagaaacagttcaaaatattcttgttctccgatttgcaaacacgatctttgaacctatttggaatagaaattatatatcgagtgttcaaattaccagttctgaaacagttggagttgaagatcgagctggatattacgaatcttcaggcgccttaagagatatggttcaaaatcatctaactcaaatgcttgctctaacagcaatggaaccacctgggcattttgatccagaagccataaggaatgaaaaagctaaggttcttcaggcagttaagcttgcgaatgaagaaaagccttgggaatgttgcgttagaggtcaatactcaaagggaggtagcgatgaagaaccactcctaggttacagagatgaaccaggtgttgatccaaacagcacaaccgaaacatatgtagctatgaagcttttcatagataattggagatggcagggggtccctttttatgtaaggactggaaaacgtttagctaaaaggcttagtgaggttgttctcacatttagagaagcacctgttcacctttttgatgctgcaggtgggtgcccaacttcaaaccaattaattcttagaattcaacccaacgaaggggctgaatttagttttgaggttaaatctccagggtcagggatgagaagtagacctgtaaatatggagttttcctatgatgaatcctttggagagccatcagatgaaggttatgtgagactccttgctgatgcaatgctcggagatccaacattgtttactcgaagcgatgaagtagaggctgcttggcgtttatatactcctctacttgaaaagattgaggattctccttgggaattacctatttatccttatgaatcaaggacatgggggccgactgaatcagacttacttattggcaaagatcaacttctatggagaagaccttga

SEQ ID NO: 2149 - protein, 507 aa, Prochlorococcus marinus str. NATL2A
MSMPVTNPLRIGLRQERVVPPQCLVIFGASGDLTHRKLVPALFELFKQRRLPSEFAILGCARRPWTDEIFKEKMEEALSSQIKESPKEWELFSQNLFYEPVDLQQPEHLVKLGERLEIIDKLKATHGHRTFYLSVSPKFYGSGCRALAAAGLLKDPKRSRVVIEKPFGRDFNSAQSLNSLVQGCAQESQIFRIDHYLGKETVQNILVLRFANTIFEPIWNRNYISSVQITSSETVGVEDRAGYYESSGALRDMVQNHLTQMLALTAMEPPGHFDPEAIRNEKAKVLQAVKLANEEKPWECCVRGQYSKGGSDEEPLLGYRDEPGVDPNSTTETYVAMKLFIDNWRWQGVPFYVRTGKRLAKRLSEVVLTFREAPVHLFDAAGGCPTSNQLILRIQPNEGAEFSFEVKSPGSGMRSRPVNMEFSYDESFGEPSDEGYVRLLADAMLGDPTLFTRSDEVEAAWRLYTPLLEKIEDSPWELPIYPYESRTWGPTESDLLIGKDQLLWRRP

SEQ ID NO: 2150 - DNA, 1491 bp, Thiobacillus denitrificans ATCC 25259
  CDS (1)..(1491): transl_table=11
atgacggtcaccaaggacgccagcgtcgaaaacatgccgtgctcgttcgtcattttcggcgccaccggtaatctcgcgtcgaacaagctcctgcctgcgctctatcatctcgaggcggctgcgcggctcgccgaatccctgagcatcatcgcgttttcgcgtcgcgactgggacaccgcgagctggcgcgaacacatgcgcgaggtcctccgcgacaagatcaagggcccgctcgacacgccgaccttcgaccgctttctcgcgcgcttcgcctaccacaaaggcgacctcaacgatccccacgcctaccacgcgctcgccgagcgtctgccgccggaaagctcatgttcggcgacggtgttctacctcgcgatcaagcctgcggaattcggcgcggtgatccagaatctcgaggccgctgggctgaacaagccgcgcggactcaaccgcgtggtgatcgaaaagcctttcggcgaggatctcgagtcggcgcagacgctcaaccgcctgctccaccagcatttcgaggagcaacaggtctaccgcatcgaccatttcctcggcaaggagacggtgcagaacctactcgtgttccgctttgccaacacgctgatcgaaccgctgtggaaccgcaatttcatcgaccacgtgcagatcacggtcgcggagtccggaggcatcgacaagcgcgccgactattacgatcgtgccggggccttgcgcgacatgctgcagaaccacctcatgcagctgatgacggtggtcgcaatggagccgccgcccgcgctcgaggccgacgcgctgcgcgacgagaaggtcaaggttttgcgctcggtccgtccgatctcgaagcgcgcggtgcacgcccatgcggtgcgcgcgcaatattcgcgcggcagcgtcgaggggcagatcgcgcgcgcgtaccagcaggaagacaacgtcgaggacaactcgacgaccgagactttcgtcgccgccaagttctacatcgacaactggcgctggcgcggcgtgccgttttatctgcggaccggcaagcgcatgccgcggcagacgcagatcatcgcgatccgcttccggcagccgccacagcagctgttccgcgagacgcccttcgaatcggttgcgccgaactgggtgctgctcagcatccagcccgaggagtccatgcatatggagatccacgtcaagcagccggggctcgacatggggacgcgcgtcatgcagatgaatgcgagcttcctcaagaccgacgagcagacgctcgatgcctacgagacgctgctgctcgacgtcatcgagggcgaccgctcgctgttcatccgtttcgacgaggtcgaatgggcgtggcgggtggtcgaccccatcctcaagaattgggcggtcgaacgcgagttcatcccgacctaccccgcgggcagctgggggccggccgaggccaaccgcctgttcgacagcgacgatcagacctggcgcaacgaactgtga

SEQ ID NO: 2151 - protein, 496 aa, Thiobacillus denitrificans ATCC 25259
MTVTKDASVENMPCSFVIFGATGNLASNKLLPALYHLEAAARLAESLSIIAFSRRDWDTASWREHMREVLRDKIKGPLDTPTFDRFLARFAYHKGDLNDPHAYHALAERLPPESSCSATVFYLAIKPAEFGAVIQNLEAAGLNKPRGLNRVVIEKPFGEDLESAQTLNRLLHQHFEEQQVYRIDHFLGKETVQNLLVFRFANTLIEPLWNRNFIDHVQITVAESGGIDKRADYYDRAGALRDMLQNHLMQLMTVVAMEPPPALEADALRDEKVKVLRSVRPISKRAVHAHAVRAQYSRGSVEGQIARAYQQEDNVEDNSTTETFVAAKFYIDNWRWRGVPFYLRTGKRMPRQTQIIAIRFRQPPQQLFRETPFESVAPNWVLLSIQPEESMHMEIHVKQPGLDMGTRVMQMNASFLKTDEQTLDAYETLLLDVIEGDRSLFIRFDEVEWAWRVVDPILKNWAVEREFIPTYPAGSWGPAEANRLFDSDDQTWRNEL

SEQ ID NO: 2152 - DNA, 1377 bp, Anabaena variabilis ATCC 29413
  CDS (1)..(1377): transl_table=11
atggcagctttactctctgatgccctggtattttttgggatcacaagtgatttagcctacaaaaaaatctttcctgccttacaggcgatgattcagcgcggtcattttgacattccaattattggagtgggtaggcgagattggagcatcgaacaattacaatcttatgtgcgtaagagcctggaggaacaggtaggcgttgatgaggcagctttccagaaactgtgttcattactttactatatttttggtgattatagcgatcgcgccacctatgataaattatgccaggtactccaaatagctgaagctcctctgtattacttagccattcctcccagtttgtttgcgacggttgtcgaagggttaggtcaatcaagttgtgtaaagaatggttgcgttatggtagaaaaaccctttggacgcgatctagaatcggctagaatactgaactgcattctgcactctatctttcccgaaagtcatatttttcggattgaccattacttgggaaaagaaccagtccaaaaccttctctacactcgcttcgccaattcattactcgaaccgatttggcatcgtgtcagtattgccagcatccaaatcacgatggctgaaaaatttggcattgatggacggggacagttttatgaagagacaggcgctattcgggatgtggtgcaaaatcatctacttcaggtgacggcgtgtttaatgatggatccgcccatcaacgagcagcatgaagccatccgagatgaaagagcgcgattgctcaaatccatagatccaatcgaaccctcaaatgtagtgcgcgggcagtacaagggctatgcctcagaacctggtgtagctcctgattccaaggtcgaaacctttgcggcggttaagctcaacattgatacttggcgctgggctagcgttccgatttacattcgtgcaggcaaatgtttaccgagtacaactactgaagttgtggtcaggctcaagcgtccgccgcaggatgtttttggcgagcgtgcctttggattagcaaattatttctactttcgtcttagtccaaatgtgctgactgcgatcggcattcgctctaaaaccccaggcgacagaatggtgggtagcgaagtcggactagtcgctcaagtcgagcatggcaatgagatgaatccctacgagcggctttttgaagatgccatgaaaggcgactccatgttatttgctcgccaggatgaagtagaagcacagtggcaaattgttgctcctatcctagatcgagcaacccctgtttacgaatacgcacctcatacctgggggcctcctttagcggatcgcatgattcccccagatggcggttggcataatcctaatgagacgtga

SEQ ID NO: 2153 - protein, 458 aa, Anabaena variabilis ATCC 29413
MAALLSDALVFFGITSDLAYKKIFPALQAMIQRGHFDIPIIGVGRRDWSIEQLQSYVRKSLEEQVGVDEAAFQKLCSLLYYIFGDYSDRATYDKLCQVLQIAEAPLYYLAIPPSLFATVVEGLGQSSCVKNGCVMVEKPFGRDLESARILNCILHSIFPESHIFRIDHYLGKEPVQNLLYTRFANSLLEPIWHRVSIASIQITMAEKFGIDGRGQFYEETGAIRDVVQNHLLQVTACLMMDPPINEQHEAIRDERARLLKSIDPIEPSNVVRGQYKGYASEPGVAPDSKVETFAAVKLNIDTWRWASVPIYIRAGKCLPSTTTEVVVRLKRPPQDVFGERAFGLANYFYFRLSPNVLTAIGIRSKTPGDRMVGSEVGLVAQVEHGNEMNPYERLFEDAMKGDSMLFARQDEVEAQWQIVAPILDRATPVYEYAPHTWGPPLADRMIPPDGGWHNPNET

SEQ ID NO: 2154 - DNA, 1530 bp, Anabaena variabilis ATCC 29413
  CDS (1)..(1530): transl_table=11
atggttagtctcctggaaaatcccttgcgcgttggtctgcaacaacaagggatgcccgaaccccaaattatagtcatctttggcgcttctggtgatcttacctggcgcaaactcgtccccgcactttacaaattgcgccgggaacgacgcattcccccagaaactaccattgttggtgtagcccgtcgggaatggagccacgaatacttccgcgaacaaatgcaaaaaggcatggaagaggctcatagcagtgtcgaacttggagaactatggcaagatttctctcaaggtctgttctactgccctggagatatagataacccggaaagttatcaaaaactcaagaatttgttaagcgaattagacgagaaacgaggtacacggggaaaccggatgttttacctctccgtcgcccctaacttcttccctgaagccatcaggcaactagggggagcaggaatgctagacgacccctacaaacatcgtctagtaattgaaaaaccctttggtcgagatttggcatcagcccaaagcctcaatgcagttgtgcagaagtattgcaaagaaaaccaagtctaccgcattgaccactacttgggtaaagaaacagttcaaaacttgttggtattccgcttcgccaatgccatttttgaacccttgtggaatcgtcactttgttgaccacgtacaaattaccgtcgcagaaaccgtaggcgtggaagaccgagctggttattacgaaaaagccggtgcactgcgggatatgttgcagaaccacttgatgcagctttattgcctcacagcaatggaagcaccaaactcaatggatgccgatagtatccgtacagaaaaagtcaaagtgttacaagctacccgtctagctgatgtacacaacctgtcacgttcagctatacgtggacaatacagcgctggctggatgaaaggtcaacaagttcctgggtatcggacagaaccaggagttgatcccaattcctccacacctacttatgtaggtatgaagtttttagttgacaactggcgttggcaaggtgttcctttttacctgcgtactggcaaacggatgccgaaaaaagtcagtgagatttctatccacttccgcgatgtaccttctcggatgttccaatcagccgcgcaacaaagaaacgcgaacattttagccatgcggattcagccaaacgaaggtatttccttgcgttttgatgtgaaaatgccaggagcagaattccgcacccgttccgtagatatggatttcagctatggttcctttgggattgaagctacttctgacgcttacgatcgcctattcttagattgtatgatgggcgaccaaacattattcaccagagccgacgaagtagaagcagcttggcaagtagtcacccccgccctttctgtttgggacttacccacagacccagccaccattccccagtacgaagccggaacctgggaaccagcagaagcagaatttctgattaaccaagatggtcgtcgctggcgcagactttaa

SEQ ID NO: 2155 - protein, 509 aa, Anabaena variabilis ATCC 29413
MVSLLENPLRVGLQQQGMPEPQIIVIFGASGDLTWRKLVPALYKLRRERRIPPETTIVGVARREWSHEYFREQMQKGMEEAHSSVELGELWQDFSQGLFYCPGDIDNPESYQKLKNLLSELDEKRGTRGNRMFYLSVAPNFFPEAIRQLGGAGMLDDPYKHRLVIEKPFGRDLASAQSLNAVVQKYCKENQVYRIDHYLGKETVQNLLVFRFANAIFEPLWNRHFVDHVQITVAETVGVEDRAGYYEKAGALRDMLQNHLMQLYCLTAMEAPNSMDADSIRTEKVKVLQATRLADVHNLSRSAIRGQYSAGWMKGQQVPGYRTEPGVDPNSSTPTYVGMKFLVDNWRWQGVPFYLRTGKRMPKKVSEISIHFRDVPSRMFQSAAQQRNANILAMRIQPNEGISLRFDVKMPGAEFRTRSVDMDFSYGSFGIEATSDAYDRLFLDCMMGDQTLFTRADEVEAAWQVVTPALSVWDLPTDPATIPQYEAGTWEPAEAEFLINQDGRRWRRL

SEQ ID NO: 2156 - DNA, 1452 bp, Rhodobacter sphaeroides 2.4.1
  CDS (1)..(1452): transl_table=11
atggtttcgagagtcattccggtggacacgttcgatctggtcatcttcggcggcacgggcgatctggcacgccggaagatcctgcccggcctctatcggcgcttcaccggcgggcagatgccgcccgacagccgcatcatcgctgccgcccgctcggagatggacgacgcggcctatcgcgcccaagtgcgggccgcgctcgaggaattcgtgcccgcgggcaagcgcgacgagggcgggatctcggcgttcctcgagcggatccactatgtcgccatcgacgcgaccggaacctcgggatgggcggacctcaagaagatgatgcgccccgacgtggtccgggccttctatttctccgtggccccctcgctcttcggggcgctggccgagcggctgcacgagaacggcatcgccgggccgcagagccgcatcgtggtcgagaagcccttcgggcgcgatctggaatccgcgcgggccttgaaccgcgtgctggcgctccatttcgccgaggagcagatctaccggatcgatcactatctcggcaaggagacggtccagaacctgatggcggtgcgcttcgccaacatcctcttcgagccgctctggaaggctcagtatatcgaccatgtgcagatcaccgtagccgagaccgtgggcgtaggcgggcgcggcgcctattacgacacgtcgggcgcgatgcgggacatggtgcagaaccacctgatgcagcttctctgcctgatcgcgatggagccgccctatcacttcgatccgaacgcggtgcgcgacgagaagctgaaggtgatccgtgcgctcgatccggtcccgcccgaggatatcgtgcgcggccagtatctcgcgggcggcgggcaggagagctatgtcgatcacgccggcaacccccgcagccgcaccgagagctacatcgcgctgaaggtccatatcgccaactggcgctggaagggcacgcccttctatctgcgcaccggcaagcggctgcgcgcccgcgcctccgagatcgccatcaccttccgcgagccgccgcattcgatcttcgacgatgccgaggactggcgcgagaacgtgctcgtgatccggctgcagcccgacgaggggatcaatctcaaggtgatgatcaaggagccgggcccgggcggcatgcgcctcacgcaggtgccgctcgacatgtccttcgccgaggcgctggggccggacggcgaggacattcccgacgcgtatgagcggctcatcatggatgtgatccgcggcaaccagacgctcttcatgcgcggcgacgaggtcgaggccgcctgggcctgggccgatccgatcatcgccgcctgggagcggcgcggcgacaggcccaagacctacgagccgggaacttccggccccgaggatgcgctgatgctcatgcaccgtgacggccgccgctggcgcgagatccgctga

SEQ ID NO: 2157 - protein, 483 aa, Rhodobacter sphaeroides 2.4.1
MVSRVIPVDTFDLVIFGGTGDLARRKILPGLYRRFTGGQMPPDSRIIAAARSEMDDAAYRAQVRAALEEFVPAGKRDEGGISAFLERIHYVAIDATGTSGWADLKKMMRPDVVRAFYFSVAPSLFGALAERLHENGIAGPQSRIVVEKPFGRDLESARALNRVLALHFAEEQIYRIDHYLGKETVQNLMAVRFANILFEPLWKAQYIDHVQITVAETVGVGGRGAYYDTSGAMRDMVQNHLMQLLCLIAMEPPYHFDPNAVRDEKLKVIRALDPVPPEDIVRGQYLAGGGQESYVDHAGNPRSRTESYIALKVHIANWRWKGTPFYLRTGKRLRARASEIAITFREPPHSIFDDAEDWRENVLVIRLQPDEGINLKVMIKEPGPGGMRLTQVPLDMSFAEALGPDGEDIPDAYERLIMDVIRGNQTLFMRGDEVEAAWAWADPIIAAWERRGDRPKTYEPGTSGPEDALMLMHRDGRRWREIR

SEQ ID NO: 2158 - DNA, 1539 bp, Geobacter metallireducens GS-15
  CDS (1)..(1539): transl_table=11
atggatacaacgatgaattctcggatggaaccgaccgtgatggtggtcttcggcgccgcaggtgatctcacgtggcgcaagcttgtgccggccctctacaacctctaccttgacggtcgtctccccgagcggttcgccatcgtcggggtcgcccggcaagagatggatgatgcgggattccgccgaaaactcagggagggggtggacctccactcacggcgcagcgtgacggacgagtcaacgtggagtggcttcgccgaccggctgtcgtaccttgccggggacttcaccacggcggaaaccggggcactcctcagccggagactcgaagggctggaccgggagtggaacggccgtgcggttcgggtcttctacttcgccattcctcccggtcttatggaagcggcggcccgccagttggagagcctcggcgtttgcagggactgctcccgggaccggctcgtggttgagaaaccctttggccgcgacctcgcttcggcccggcagttgaacgggcttctcacctccctgttcgccgagacgcagatctatcggatcgaccactacctgggcaaggagacggtgcagaacatcctcgctttccgtttcgccaactctctgttcgagccggtctggaaccggcgctacatcgaccacgtgcagatcaccgtcgccgaagcggtgggggtggggaagaggggaggctactacgatacatccggcgccttgcgtgacatggtgcagaatcacctcctccagatcctctgcctgattgccatggagccgccggtgtcgttttccgccgacgaagtgcgcaacaagaaggtggatgtcttgcgggccattcgtcccattcgccccgaagaagtccaccgggtggcggtccgcggccagtacggcagggggatggtggcctgcgagggagtgacgggataccgggaagagcagggggtgccacctgactccgtcaccgagacctttgccgccctcaagctgtggatcgacaattggcgctggcaaggggtgccgttctatcttcgcaccggtaaacgcctgcgcgccaaggtctccgaggtggccatcctcttccgcccggctccgcaccagctcttcccctccgcggccgtggagagctggcagccgaaccggctcgtccttcgcatccagcccgaggaggggattgcctcccgcatccaggtcaaacagccgggaacgcgcctgctgctgggagcggtggacatgggattccgttaccatgacgccttccacgccgcctctccggaagcctacgagactctgctcctggacgtcatctgcggcgacgctaccctcttcatgcgggccgaccaggtggagagcgcctggggagtcatttcaccgatcctcgatacctgggaatcggtgccgccggccgatttccccaactaccaggccggcggctgggggccggaaactgctgatctcctcatcgccaaggaggggcacagctgggtccaacccgaccttccgacggaagagggagagacggaggctccatga

SEQ ID NO: 2159 - protein, 512 aa, Geobacter metallireducens GS-15
MDTTMNSRMEPTVMVVFGAAGDLTWRKLVPALYNLYLDGRLPERFAIVGVARQEMDDAGFRRKLREGVDLHSRRSVTDESTWSGFADRLSYLAGDFTTAETGALLSRRLEGLDREWNGRAVRVFYFAIPPGLMEAAARQLESLGVCRDCSRDRLVVEKPFGRDLASARQLNGLLTSLFAETQIYRIDHYLGKETVQNILAFRFANSLFEPVWNRRYIDHVQITVAEAVGVGKRGGYYDTSGALRDMVQNHLLQILCLIAMEPPVSFSADEVRNKKVDVLRAIRPIRPEEVHRVAVRGQYGRGMVACEGVTGYREEQGVPPDSVTETFAALKLWIDNWRWQGVPFYLRTGKRLRAKVSEVAILFRPAPHQLFPSAAVESWQPNRLVLRIQPEEGIASRIQVKQPGTRLLLGAVDMGFRYHDAFHAASPEAYETLLLDVICGDATLFMRADQVESAWGVISPILDTWESVPPADFPNYQAGGWGPETADLLIAKEGHSWVQPDLPTEEGETEAP

SEQ ID NO: 2160 - DNA, 1524 bp, Prochlorococcus marinus str. MIT 9312
  CDS (1)..(1524): transl_table=11
atgccttcaactttaagtaatcctctaagattaggtttacggcaggaaagagttatatctccacaatgcttagtaatatttggtgctagtggagaccttactcatagaaaattaataccagccttatttgaactctatttgcaaagaagaattcctagtgaatttggaatagttggttgtgcgagaagaccttggactgataatgaatttagagaaaagatgaaagtaaagctatccactcaaatttctggtaaggaaaaggagtgggaacaattttccaattatcttttttatgaaccagttgacttacaacaaagcgatcatgtcgtaaggctttctaaaagattaaataaaattgataaaagacaagctactcatggaaatagaacattttatttatcagtatctccaaatttctatgcaagtggatgtaaagctcttaaaatagctggccttttagatgaccctaagaaaagtcgtttagtgattgaaaaaccttttggaagagattattcaagtgcaaaaaaattgaacaagatcgttcaaagttgtgctgaagaaagtcagatttataggattgatcattatttaggtaaagagacagttcaaaacattcttgttatgaggtttgctaatactatttttgaaccaatctggaacagaaattatatatcaagtgttcaaattacttcatctgaaacagtaggtgttgaagatagagcaggttattacgaaagctctggtgctttaagagatatgcttcaaaatcatatgactcaaatgctcgctgttactgctatggaacctcctgggaaatttgaaccagaagctataagaaatgaaaaagctaaggttcttcaagcttcaaaacttgctgacgaaaatgaaccgtggaattgttgtataagaggtcaatatggggagggaggaaatatctcaaatcttctcaaaggatataggcaggaagatggtgttaattgtaatagcacaacagaaacttatattgcgacaaaagttttcgttgataactggcgttggcaaggggtacctttttatttaagaactgggaaaagactacctaaaagacttggagaaatagtcttgacttttaaagacgttcctgttcatttatttgaatcaacaataataaatcctgctccaaatcaacttatcctaagaattcagccaaatgaaggtgctacttttaactttgaggtaaaatcccctggttctgggatgaaatccagacctgttgagatggaattttcttatgatgaatcatttggagaaccctcagatgaaggctatgtaagattactagctgatgcaatgctttctgatccaaccttatttacacgaagtgatgaagtagaggcagcttggaaactttatacgccattaatagaattgatggataattctccttggaagttacctatttataattatgaatctatgacgtggggacctcctgagtctgatcaattactttcaaaagataatattttctggcgcagaccttaa

SEQ ID NO: 2161 - protein, 507 aa, Prochlorococcus marinus str. MIT 9312
MPSTLSNPLRLGLRQERVISPQCLVIFGASGDLTHRKLIPALFELYLQRRIPSEFGIVGCARRPWTDNEFREKMKVKLSTQISGKEKEWEQFSNYLFYEPVDLQQSDHVVRLSKRLNKIDKRQATHGNRTFYLSVSPNFYASGCKALKIAGLLDDPKKSRLVIEKPFGRDYSSAKKLNKIVQSCAEESQIYRIDHYLGKETVQNILVMRFANTIFEPIWNRNYISSVQITSSETVGVEDRAGYYESSGALRDMLQNHMTQMLAVTAMEPPGKFEPEAIRNEKAKVLQASKLADENEPWNCCIRGQYGEGGNISNLLKGYRQEDGVNCNSTTETYIATKVFVDNWRWQGVPFYLRTGKRLPKRLGEIVLTFKDVPVHLFESTIINPAPNQLILRIQPNEGATFNFEVKSPGSGMKSRPVEMEFSYDESFGEPSDEGYVRLLADAMLSDPTLFTRSDEVEAAWKLYTPLIELMDNSPWKLPIYNYESMTWGPPESDQLLSKDNIFWRRP

SEQ ID NO: 2162 - DNA, 1515 bp, Moorella thermoacetica ATCC 39073
  CDS (1)..(1515): transl_table=11
atggccccggatcggttggacaacagcttgctggtgatctttggcggcacgggggacctcgcccggcgcaagctttacccggctttattcaacctttttgtcgatggtttcctgccgccggctcttggggtaatagctgtgggccggtgcggttttacccgggatagcttccggcaggagatattactgccgtccctggagaccttttcccgccgcgccgcttccctggacgcctattttgagccctttgccacccgtttgcactatttccgaaccgacatttatgacccggagggatatacccgcctgggacagttcctggtggaactggaggaggcggcgggctcccggggcaaccgcattttttacctggccgtggccccggaacactttggccccgtaatccggagcttaaaggaaacaggcctggtaccagcgcggggctggcagcgggtcgttattgagaaacccttcggccatgacctgccttcggcgacagaattaaaccgccagctgcgggaggctttcagcgaagaagagatttaccgcattgaccattacctggggaaagaaatgatccagaacatcatggtcatccgctttgccaatactttttttgaaccggtctggaataataaatatatcgaccacgtccaaattacttcggcggaaacggtgggtgtggagaaccggggcggctactacgaccgcgccggggcgctgcgggacatggtccagaaccacctcctgcaactggtgactttggtggccatggaaccaccggccagcctggccactgaagctattcgcgatgaaaaggtaaaggtgctacgttctttgaaacccctggatgcggcggcagtcagcaagaacgccatccgcggccagtacggtgccggggagatagatgggcagatggtgccgccttaccgccaggaaaaggaagtggcccctgattccacgacggaaacgtttgtcgctttaaagcttttcatagataacttccgctgggccggcgtgcccttttacctgcgtacgggcaagcgcctgccgcttaaagtgacggaaattatcctccagtttaaatccctgccggatatcctgtattttaaggaatacggtgaattacgccccaatctcctggtcatccgcgtccagcccctggaaggcgtctacgttcagctcaatgccaagcggccggggaataataattacatcgtacccatccgcctggatttttgccagaattgtgaggtgggggttaattcccccgaggcctatgagcgcctgctttatgatgtaatgcggggggaccctacccttttcacccgctgggatgaggtggaggcggcctggaagtttgtcgatcccatatcggccgcgtgggcggctcaggggcagccgcaatttcccaattacgccgccggccagtgggggccgccagcggcccagagactattaatttgcgatgctcgccgctggtgggaggaaaatggagcagaatcgatttcttaa

SEQ ID NO: 2163 - protein, 504 aa, Moorella thermoacetica ATCC 39073
MAPDRLDNSLLVIFGGTGDLARRKLYPALFNLFVDGFLPPALGVIAVGRCGFTRDSFRQEILLPSLETFSRRAASLDAYFEPFATRLHYFRTDIYDPEGYTRLGQFLVELEEAAGSRGNRIFYLAVAPEHFGPVIRSLKETGLVPARGWQRVVIEKPFGHDLPSATELNRQLREAFSEEEIYRIDHYLGKEMIQNIMVIRFANTFFEPVWNNKYIDHVQITSAETVGVENRGGYYDRAGALRDMVQNHLLQLVTLVAMEPPASLATEAIRDEKVKVLRSLKPLDAAAVSKNAIRGQYGAGEIDGQMVPPYRQEKEVAPDSTTETFVALKLFIDNFRWAGVPFYLRTGKRLPLKVTEIILQFKSLPDILYFKEYGELRPNLLVIRVQPLEGVYVQLNAKRPGNNNYIVPIRLDFCQNCEVGVNSPEAYERLLYDVMRGDPTLFTRWDEVEAAWKFVDPISAAWAAQGQPQFPNYAAGQWGPPAAQRLLICDARRWWEENGAESIS

SEQ ID NO: 2164 - DNA, 1470 bp, Burkholderia thailandensis E264
  CDS (1)..(1470): transl_table=11
atgcataccgattcgagcttcaccttcgttctcttcggcggcaccggcgatctgtcgatgcgcaagatcctccccgcgctcttcgaagcgcatcgcgcgaacatgctgtcggaaaccggcaggatcgtcgccgtggcccgccatgcggcggaccgcgacggctacctgcagtgggtcgaagagcacgtgaagccgcatgcggcgaaggcggcgggccgcgcgttcgacgaagcggcctggcgaagctttctcgagcgcatcgtctacgtgaagctcgacctcggccgcgcggaagattacgcgctgctgcgcgacacggtcggcgggctctcgggcatccgcgtgttctacctggcgacgggcccgtcgctcttcgtgccgatctgcaaggcgctcgccgccgtgggcctgaacgagggcgcgcggatcgtgctcgagaagccgctcggctacgatctgcgctcgtcgaacgcgatcaacgacgcggtgggcgagatcttcgccgaagatcagatctaccggatcgaccactatctcggcaaggagccggtgcagaacctgctcgcgctgcgcttcggcaatgcgctgttcgagccgctgtggcgccgcgaatgggtggagagcatccagatcacgatcgccgaggaactgggcgtcgaggcgcgcggcgatttctacgacaataccggcgcgctgcgcgacatggtgcagaaccacctgctgcagttgctttcgatcgtcgcgatggagccgccgcactcgatggattccgattcggtgcgcgacgagaagctgcgcgtgctgcgcgcgttgaagcccgtcgatccgcgcgacatcggcaaggtggcggtgcgcggccaataccacgcgggcgtgatcaagggcgcgcaggtgcccgcgtacgcgaccgagcccggcgtgaaggcggacagccagaccgagacgttcgtcgcgctgaaggtcgagatcgagaactggcgctgggccggcgtgccgttcttcctgcgcaccggcaagcgcctcgccgaccgcgtcgcggagatcgtcgtcaacttccgcccggtgccgcactcggcgctcgggcccaccgcgctgcgcgcgggcgcgaaccgcctcgtgatccggctgcagccgaacgaatcgattcgcctgtactgcctcgcgaagcagccgggcgaagggatgaatctggcgagcgtgcacctcgacctcgcgttcgaccagttcttcaaggaaggccagatggaggcgtaccagcgcctgttgctcgacgtgatcaacggccgcctcgccctcttcgtgcggcgcgacgagcaggaagccgcatggcgctgggtcgagccgatcctgaacgaatgggcgcgctcgacgaagccgccgaagccgtacgcggccggcacctgggggcccgcggccgcgagcgcgatgctcgcgcagcacggcacctgctggctcgaggaagaaaactga

SEQ ID NO: 2165 - protein, 489 aa, Burkholderia thailandensis E264
MHTDSSFTFVLFGGTGDLSMRKILPALFEAHRANMLSETGRIVAVARHAADRDGYLQWVEEHVKPHAAKAAGRAFDEAAWRSFLERIVYVKLDLGRAEDYALLRDTVGGLSGIRVFYLATGPSLFVPICKALAAVGLNEGARIVLEKPLGYDLRSSNAINDAVGEIFAEDQIYRIDHYLGKEPVQNLLALRFGNALFEPLWRREWVESIQITIAEELGVEARGDFYDNTGALRDMVQNHLLQLLSIVAMEPPHSMDSDSVRDEKLRVLRALKPVDPRDIGKVAVRGQYHAGVIKGAQVPAYATEPGVKADSQTETFVALKVEIENWRWAGVPFFLRTGKRLADRVAEIVVNFRPVPHSALGPTALRAGANRLVIRLQPNESIRLYCLAKQPGEGMNLASVHLDLAFDQFFKEGQMEAYQRLLLDVINGRLALFVRRDEQEAAWRWVEPILNEWARSTKPPKPYAAGTWGPAAASAMLAQHGTCWLEEEN

SEQ ID NO: 2166 - DNA, 1533 bp, Frankia sp. CcI3
  CDS (1)..(1533): transl_table=11
gtggcgcccacggtgagtaccaacccgctgcgggacccacgtgaccgcagactgccgcgcctgccggacgcgagcgccctggtggtgttcggcgctaccggcgacctggcccgcaagaagctgatccccgccgtctacgacctggcccaccgcggcctgctgccgccgggtttcgtcctgctcgggttcgcccgccgggactggcccgacgaggacttcgccgagttcgcccggcaggccgccgagaagggcgcccgcacccccttccgtgcagaggtctgggaccggctggcgggctccgtgcggttcctgccagggtccttcgacgacgacgccgcgttcgaccggctcgcccgcacgctggagagcctggagcactcccacggtatccgtggcaacgcggcgttctacctgtcgatcccgccgtcggccttcccggtcgtgctcaagcagatgcagcgcaccgggctctcctcggccgcgggttcgggcggctggcgccgggtcgtcgtcgagaaaccgttcggtcacgacctggagtcggcccggcagctcaacgcgctcgtcgacgacgtcttcaccccgtccggggtgttccgcatcgaccactacctgggcaaggagacggtccagaacctcttcgcgctgcgcttcgccaacacgctgttcgaaccgatctggaactcccagttcgtcgattcggtgcagatcaccatggccgaggacgtcgggatcggcacccgggccggcttctacgacgagacgggcgccgctcgggacgtgctccagaaccacctgttgcagctgctcgccctgaccgcgatggaggagccggtcagcttcggcgcggagaccatccgcaccgagaagctgaaggtgctccgcgcggtgtcgctgcccatggacctcactcgctacgcggtaagggggcagtacgagcagggctggctcgccggggagcgggtcccgggctacctcgacgaacaggacatccctgcgcagtcgcggacggagaccttctcggcggtgcgcctcggcatcgagacgcgccggtgggccggggtgccgttctacctgcggaccggcaagcggctgccacggcgggtcaccgaggtcgccatcttcttcaagaaggcgccgcacctgccattcgacgagaccgccaccaccgagctcggcaacaaccagctggtcatccgggtgcagcccgacgagggggtcacgctcaagttcggctccaaggtccccggctcggcgatggaggtccgggacgtcgcgatggacttcctgttcggtgaggcgttcaccgaggcgctgccggaggcctacgaacggctgatcctcgacgtgctgctcggcgacgcgacgctgttcccgaacaacgcggaggtcgaggagtcctggcggatcgtcgatccgctggagcggcactgggcgggcaccaccccgcaccgctaccgggccggcacctggggtccggctgccgccgacgagatgctcgcccacgacggtcgccggtggcggcggccatga

SEQ ID NO: 2167 - protein, 510 aa, Frankia sp. CcI3
MAPTVSTNPLRDPRDRRLPRLPDASALVVFGATGDLARKKLIPAVYDLAHRGLLPPGFVLLGFARRDWPDEDFAEFARQAAEKGARTPFRAEVWDRLAGSVRFLPGSFDDDAAFDRLARTLESLEHSHGIRGNAAFYLSIPPSAFPVVLKQMQRTGLSSAAGSGGWRRVVVEKPFGHDLESARQLNALVDDVFTPSGVFRIDHYLGKETVQNLFALRFANTLFEPIWNSQFVDSVQITMAEDVGIGTRAGFYDETGAARDVLQNHLLQLLALTAMEEPVSFGAETIRTEKLKVLRAVSLPMDLTRYAVRGQYEQGWLAGERVPGYLDEQDIPAQSRTETFSAVRLGIETRRWAGVPFYLRTGKRLPRRVTEVAIFFKKAPHLPFDETATTELGNNQLVIRVQPDEGVTLKFGSKVPGSAMEVRDVAMDFLFGEAFTEALPEAYERLILDVLLGDATLFPNNAEVEESWRIVDPLERHWAGTTPHRYRAGTWGPAAADEMLAHDGRRWRRP

SEQ ID NO: 2168 - DNA, 1449 bp, Novosphingobium aromaticivorans DSM 12444
  CDS (1)..(1449): transl_table=11
atgatcgagtccagctgttccgcactgctgctgttcggcgcgaccggcgacctttcccgccggatgcttctgccttcgctctacgcccttcacgaagacggcctgatccggccggacctgcgcatcgtgggcacggcccggtccgagcatgacgacgccgagttccgcgaattcgcccgcgaggcgcttgccgaattcctgcccgaggaccggcgggacgaggaaaagctcgcgagtttcctcgaacggctcgaataccagaccctcgatgcctcgaatgtcgatggcttcggcgaactggcccgcaagctgggcgacacctcgtgcggcctctcgattttcctgtccaccgcgccgttcctgttcgaaccgacgatcgaaggcctgcgccgggcgggcttggcccatgagaacgtgcggatcggccttgaaaagccgctcgggaacgaccttgcatcgtccacccgtatcaacgatgcggttgccgccgcctttgccgaggaacagatcttccggatcgaccattaccttggcaaggaaacggtccagaacctcatggcactgcgctttgccaacatgatgttcgagccgttgtggaacgcaggcggtatcgaccatgtgcagatcacggttagcgagacggtcggcctcgaagggcgcaagggcttctacgacgacaccggcgcactgcgcgacatggtgcagaaccacatgctccagttgctcgccctgaccgcaatggagccgccggcaagcctcgacgccacgtcgatccgcgacgaaaaggtcaaggtcctgcgcgcgcttcgcccggtcaaggcggaggaaatggtgcggggccagtaccgcgccggggcggtgaagggcacgtcggtcaccggataccaggaagaccttggcgaagtgtccgacacggagaccttcgtggcgatcaaggcccatgtcgacaactggcgttggaccggcgtgccgttctacctgcgcaccggcaagcgacttggcgagcggcgcagcgagatcgtggtcgagttcaagcctgttccgcacaacctctttgccgagcgcgggggaaggcttcgccccaaccgcctcgtcatccgcctccagcccgaggaatatgtgcggctgcaggtgatggcgaaggagccggggctcgaccgtggcggtattgtgctgcgcgacgtcaatctcgacctttcgttgaccgcagccttcgccaaggcgcgccgccgcattgcctacgaacgcctgctgctcgacctgatcgagggcgaacagaccttgttcgtccggcgagacgaagtggaagcgcagtggaagtgggtcgacgccatccgcaaggtctgggccgacaccgacatggaagccaagccctatgccgcaggaagctgggggccgaacgcaggcatcgcccttaccgagcgggacgggagaagctggaatgactga

SEQ ID NO: 2169 - protein, 482 aa, Novosphingobium aromaticivorans DSM 12444
MIESSCSALLLFGATGDLSRRMLLPSLYALHEDGLIRPDLRIVGTARSEHDDAEFREFAREALAEFLPEDRRDEEKLASFLERLEYQTLDASNVDGFGELARKLGDTSCGLSIFLSTAPFLFEPTIEGLRRAGLAHENVRIGLEKPLGNDLASSTRINDAVAAAFAEEQIFRIDHYLGKETVQNLMALRFANMMFEPLWNAGGIDHVQITVSETVGLEGRKGFYDDTGALRDMVQNHMLQLLALTAMEPPASLDATSIRDEKVKVLRALRPVKAEEMVRGQYRAGAVKGTSVTGYQEDLGEVSDTETFVAIKAHVDNWRWTGVPFYLRTGKRLGERRSEIVVEFKPVPHNLFAERGGRLRPNRLVIRLQPEEYVRLQVMAKEPGLDRGGIVLRDVNLDLSLTAAFAKARRRIAYERLLLDLIEGEQTLFVRRDEVEAQWKWVDAIRKVWADTDMEAKPYAAGSWGPNAGIALTERDGRSWND

SEQ ID NO: 2170 - DNA, 1476 bp, Saccharophagus degradans 2-40
  CDS (1)..(1476): transl_table=11
atgaatacagacatgctgattgttgggggtgatggtgacttagcactgcgcaagctctacccgtctctttactatttagaactcaataactgtatgccagaaaatactcgcattatcggtatggctcgcacagggcaaacacgcgaagagtttctagtaaaagtaaaagaatggttaaaagctaacgtagcagcagagttattttctgaagagaagtgggaaagctactctcaaaaaatcttttttgctcaaggtgatgccactaacgcagaatcgttaggcaaagttcgcgaagagtttcttggtgaaggcaaccagttggttgtgtatttagctattccaccactcatttttggtaaagtttgcaacgcgctagagggatgtggtttagcaaaagaaaccacgcgtttagttgtagaaaaaccacttggtgatagccgtgaatctttcattgctattaacaatgagttggctcgcaccttcccagaaaaacaactattccgcattgatcactatcttggtaaagagacagtgcaaaacttaattgcgctgcgttttgctaacgatattttcgaaccgctttggaactcacggtatgttgattccattcaaattaccgtttctgaagaagtaggtgttggcaaccgctggagtttttacgatcagaccggtgcaacccgcgacatggttcaaaaccacttgttacaagtgttgtgcttaacctgtatggagccgccagcagtgttagacgcagactccgtgcgcgcagaaaaattaaaagtacttaactctctaaaaatgattgagggagaagaagtgctaaaagataccgttcgcggtcaatatgagcgcggcgtggtaggtggcaaagaagtgccgggctacttagaagaagagtctgataaatacgaaattgaccccaatagtcaaacagaaacgtttgtagctattaaagcagagattcaaaactggcgttggtccggcgtgcctatttatcttcgtacgggtaagcgcttgcgtggccgtcactctgaaattgttgttcactttaagcaaagtaaacataaaattttccaagaaaaccacgaaaatcacgcatcaaaccgtttgattattcgtttgcagccagatgaaggtattcgtttgcgcgtaatgaataaggttgcaggtttagagcctggtattccgttggagtctggttgtttgaacctttggttctctgataaaaaagaaattaaaacacacgatgcatactcgcgcttattgtttgatgtgttgcgtaacgatcaaacgttgtttgtaagtgctgcggaagtagaagctgcgtggaaatgggtagacactattttcgctggctggaaatccacgggtatgaaagctcagggctatcctgctggcagtattgggccggttgcggcaaatgagctgctaagcagagacggtcgtgagtggcacgaaatagaacctcgcgattaa

SEQ ID NO: 2171 - protein, 491 aa, Saccharophagus degradans 2-40
MNTDMLIVGGDGDLALRKLYPSLYYLELNNCMPENTRIIGMARTGQTREEFLVKVKEWLKANVAAELFSEEKWESYSQKIFFAQGDATNAESLGKVREEFLGEGNQLVVYLAIPPLIFGKVCNALEGCGLAKETTRLVVEKPLGDSRESFIAINNELARTFPEKQLFRIDHYLGKETVQNLIALRFANDIFEPLWNSRYVDSIQITVSEEVGVGNRWSFYDQTGATRDMVQNHLLQVLCLTCMEPPAVLDADSVRAEKLKVLNSLKMIEGEEVLKDTVRGQYERGVVGGKEVPGYLEEESDKYEIDPNSQTETFVAIKAEIQNWRWSGVPIYLRTGKRLRGRHSEIVVHFKQSKHKIFQENHENHASNRLIIRLQPDEGIRLRVMNKVAGLEPGIPLESGCLNLWFSDKKEIKTHDAYSRLLFDVLRNDQTLFVSAAEVEAAWKWVDTIFAGWKSTGMKAQGYPAGSIGPVAANELLSRDGREWHEIEPRD

SEQ ID NO: 2172 - DNA, 1479 bp, Methylobacillus flagellatus KT
  CDS (1)..(1479): transl_table=11
atgaaagtcatagacccctgtacccttgttctgtttggtgcgagcggcaacctctcccgcatcaagctcatgcctggactattccgtcttgaccaggctggtcgcctgcctgagaaaatggccatcctctccgttggccgcagccaggtttctcgcgaggactggcttgcagacatcaagagcatgctggatgccaagttccccaagggctatgaccaggcagtgttcaagcgctttatcgagcgccatcattaccatgccaatccgcctgatgaccccagctccttcacccgcctgaaggaaaccttatcggacgaggctatcttcccgcaaaacttggcctatttcctttctgtacggccatctgattttgcagcgattgttgaccagctcgccagcgttggattgaccgaggaaggcaaatactggcgtcgcgttgtcgtcgagaaaccattcggcactgatctgaagagcgctcaagagctgcagtcctcgatcaccaagcacctcaaggaaagccagatataccgcattgaccactaccttggtaaatccgccttgcagaacatcatgctgcaacgttttgccaataccatcctcgaacctttgtggaacaaggactacatcgatcatgtgcagatcaccaataccgaacaactcggggttggcgagcgcacccagttctacgatgctaccggcgcgctgcgcgacatgattcagagccatgtgttacagacattggcgctgaccgccatggaacaaccagcctcgctgaatccggacgacatccgcgccgagaagatcaaggtcctggaagccattcgccctattccggtcgacgagctggaaaaatacgcattccgcgcacaatattcgtccggtgaaatcaagggtgaaaaagtgcctggctatctggaagaactcggcgacgacagcagtgtggtggaaacctacgccgcgctcaagctgttcatcgacaacccacgctgggaaggcgtgccattctacatccgcacggccaagcgccttcacgaggcagatacccgcattgcgatccgcttcaagaaagcaccgctgcaactgggcaacgggcaggatcagaactggctcatcatcggcatccagccgagagaatgcatcaagtttgaaatccagtccaagattcccggcttggatatcgcgacccgcacgattgagctcgacggcgccaaccgccaggaaggtgatgaaaccatcgatgcttacgaggccctgctgctgaacctaatggaaggggataactcgctctacctgcacatcagcgaagtggaagcccagtggcgcttagtggatcctgtcatcgaggcttgggccaaggaccgcaagcctgtacaccagtatcctgccggcagcagtgaccctgaagcgtccaaggtcatattcgagcatgaggaccaattctggcgctacagtattgcgctgggtggcgataaaaaataa

SEQ ID NO: 2173 - protein, 492 aa, Methylobacillus flagellatus KT
MKVIDPCTLVLFGASGNLSRIKLMPGLFRLDQAGRLPEKMAILSVGRSQVSREDWLADIKSMLDAKFPKGYDQAVFKRFIERHHYHANPPDDPSSFTRLKETLSDEAIFPQNLAYFLSVRPSDFAAIVDQLASVGLTEEGKYWRRVVVEKPFGTDLKSAQELQSSITKHLKESQIYRIDHYLGKSALQNIMLQRFANTILEPLWNKDYIDHVQITNTEQLGVGERTQFYDATGALRDMIQSHVLQTLALTAMEQPASLNPDDIRAEKIKVLEAIRPIPVDELEKYAFRAQYSSGEIKGEKVPGYLEELGDDSSVVETYAALKLFIDNPRWEGVPFYIRTAKRLHEADTRIAIRFKKAPLQLGNGQDQNWLIIGIQPRECIKFEIQSKIPGLDIATRTIELDGANRQEGDETIDAYEALLLNLMEGDNSLYLHISEVEAQWRLVDPVIEAWAKDRKPVHQYPAGSSDPEASKVIFEHEDQFWRYSIALGGDKK

SEQ ID NO: 2174 - DNA, 1452 bp, Silicibacter sp. TM1040
  CDS (1)..(1452): transl_table=11
atggtatcccgcgtcatccccgtcgacagtttcgacttcgtcttgttcggcgccaccggcgaccttgcccgacgcaagatcctgccaagcctgttccaccgctttcagatcggccagttcgacgacaacagccgcatcatcggggcctcgcgttccaagatggatcagggtgagtttcagaccctcgtgggcgatgcgctcaaggaattcggcgacatccccgccgatgcagaaccagatgtggagcggtttctgtcgcttctggattacgcatcggtagatgccaagggcgatggcggctggtcggatctgggcagcaagctgcgcgatggcgtagtgcgggcgttttatctctcggtcgcgccttcgctctttggcgacatcgccgggcggctcaaatccacgggtatcgcggacgaccagagccgcatcgtggtggaaaaacccttcggtcacgatctggcctcggcacaggcgttgaatgcggccctgcgcgagcactttgaggaaagccagatctaccggatcgaccactaccttggcaaagagacggtgcagaacctgatggcgctgcgctttgccaattcgctttttgagccgcagtggaattcgcatcacatcgaccatgtgcagatcaccgtctccgagagcatctcggttgcgggtcggggcgagtattacgacaaatccggcgccatgcgggatatggtgcagaaccacctgatgcagcttctgtgcctcaccgcgatggagcctccctccacctttgaacccaatgcggtgcgcaatgaaaaactcaaggtaatcgagagcctcgtacccgtggccgcagatgacatcgtgcgcggccagtatcgcgccaaatctgggaacgacagctaccttgaccacgcaggtgacccgcagtcgcgcaccgagagctttgtcgcgatgaaggtcgaggtggcaaactggcgctgggcagggacaccgttctacctgcgcaccggcaaatgcttgcgcgagcgcgtgtcggagattgcggtgtattttcgcaaaccgccgcacaatatttttggcgaggacaatgcgattgatggcaatatgctggtcattcgcctgcaacccgacgaaggcatcacgctcaagaccacgatcaaggatcccggccccggaggcatgcgcctgacgtctgcggacctcgatatgacctttgctgacagcctgcccgaagcgggtcgcccgcaggacgcctatgagcgcctcatcatggatgtgatccggggcaatcagaccctgttcatgcgcggcgatgaggtcgaagctgcctggacctgggccgacccgatcatcaacgcgtgggacacatccacccgcgcgccgcaaccctatgaccaaggtggctccggccccgaggatgcgcttttgctgctgcaccgggatggccgccgctggcgctccatcggtgcctga

SEQ ID NO: 2175 - protein, 483 aa, Silicibacter sp. TM1040
MVSRVIPVDSFDFVLFGATGDLARRKILPSLFHRFQIGQFDDNSRIIGASRSKMDQGEFQTLVGDALKEFGDIPADAEPDVERFLSLLDYASVDAKGDGGWSDLGSKLRDGVVRAFYLSVAPSLFGDIAGRLKSTGIADDQSRIVVEKPFGHDLASAQALNAALREHFEESQIYRIDHYLGKETVQNLMALRFANSLFEPQWNSHHIDHVQITVSESISVAGRGEYYDKSGAMRDMVQNHLMQLLCLTAMEPPSTFEPNAVRNEKLKVIESLVPVAADDIVRGQYRAKSGNDSYLDHAGDPQSRTESFVAMKVEVANWRWAGTPFYLRTGKCLRERVSEIAVYFRKPPHNIFGEDNAIDGNMLVIRLQPDEGITLKTTIKDPGPGGMRLTSADLDMTFADSLPEAGRPQDAYERLIMDVIRGNQTLFMRGDEVEAAWTWADPIINAWDTSTRAPQPYDQGGSGPEDALLLLHRDGRRWRSIGA

SEQ ID NO: 2176 - DNA, 1545 bp, Myxococcus xanthus DK 1622
  CDS (1)..(1545): transl_table=11
atggacgcgcatcagggcctgcacatcgagacccatccccgagaaggagacccgctggttcgcgcccggcggcccgacccgtgcgcgctggtgttgttcggcgccaccggagacctggcccagcgcaagctgttcccggccctcttcgagttggcgcgagcccacctgctgccgaagaacttcgccgtcgtcgccttcagccgctccgaaggagacagcgaggccttccgcgagcatgtgaaggcgtccctgctgaagttcgcccgcacccagcccctggacgaggccgtctggaacgacttcgccccgcgcctggagctcatctccggcggctatgacgacccgaagtccttcgtgcgcctgcgcgaggagctcgaccgggtcgcccagaagttcggcacccagggcaaccagttctattacctggccactccggcctccaccttcccccaaatcctccagggcctgtcggagtcggggctgctgaagcgccaggaacaggccgacccgcgcccgtggcagcggctcatcatcgagaagcccttcggccacgatttggagagcgcccgcgcgctcaaccgtgagctggcggcggtgctggacgagcggcagatattccgcatcgaccactacctgggcaaggagacggtccagaacatcctcgtcttccgcttcgccaatgccatcttcgagccgctgtggaaccggcagcacatcgaccacgtggaaatcaccgcggcggagacgctgggggtggaggggcgcggcggcttctacgacgagacgggcgtcatccgggacatggtgcagaaccacctgctccaggtgctcgcgctgtgtgcaatggaaccgcccgtgtccttcggcgccgaggacatccgcgacgaaaagaccaaggtcttccgcgcgctgcgcccgctggagggccgcgaggtgtcccgcgcggtggtggccggccagtacgagggttacctccaggagaagggcgtgaaggccggctcgcgcacgccgacctatgtcgccatgaagatgaacatcgacaactggcgctgggcgggcgtgcccttctatctgcgcgcgggcaagaagctgaagcggcgcgtgacggaggtgtccatccacttcaaatcggtgcccatcagcctcttctccggggaaggcgccacctgccagcggctgcagcccaacgtgctcacgctgcgcatccagccccaggaaggcatcgcgctctccttcgaatccaaggtgccgggcgaggatgtcaacatcgcgggcgtcaccatggacttcaactatcaggagaccttccagcggccggtccccgaggcctacgagcgcctgctgctggactgcatgcgcggcaacgccaccctctacgcgcggcaggacagcgtggagcaggcgtggaccttcgtgacgcccatcctccaagccctggagtccggcgagggcggaccggcgcacggctaccccggtggcagcgcgggcccggatgccgcggccgcgctgctggcccgcgatggccgccggtggaccggcctatga

SEQ ID NO: 2177 - protein, 514 aa, Myxococcus xanthus DK 1622
MDAHQGLHIETHPREGDPLVRARRPDPCALVLFGATGDLAQRKLFPALFELARAHLLPKNFAVVAFSRSEGDSEAFREHVKASLLKFARTQPLDEAVWNDFAPRLELISGGYDDPKSFVRLREELDRVAQKFGTQGNQFYYLATPASTFPQILQGLSESGLLKRQEQADPRPWQRLIIEKPFGHDLESARALNRELAAVLDERQIFRIDHYLGKETVQNILVFRFANAIFEPLWNRQHIDHVEITAAETLGVEGRGGFYDETGVIRDMVQNHLLQVLALCAMEPPVSFGAEDIRDEKTKVFRALRPLEGREVSRAVVAGQYEGYLQEKGVKAGSRTPTYVAMKMNIDNWRWAGVPFYLRAGKKLKRRVTEVSIHFKSVPISLFSGEGATCQRLQPNVLTLRIQPQEGIALSFESKVPGEDVNIAGVTMDFNYQETFQRPVPEAYERLLLDCMRGNATLYARQDSVEQAWTFVTPILQALESGEGGPAHGYPGGSAGPDAAAALLARDGRRWTGL

SEQ ID NO: 2178 - DNA, 1572 bp, Mycobacterium sp. MCS
  CDS (1)..(1572): transl_table=11
atggtggcggtgaaccggccggtccccggagtgccgactcccgccccggcgggttggcggaatccgctgcgtgacaaacgcgataaacgcatgccccggatcgccgggccgtgcggtgtggtcatcttcggggtcaccggcgatctgtcccgcaagaagctgatgccggcgatctacgacctggccaaccgggggctgctgcccgcgtcgttctcgctcgtcgggttcgcccgaagggactgggccgacgaggatttcgggcaggtcgtctatgaggcggtcaagaagcacgcccgcaccccgttccgccaggaggtgtgggaccggctggccgagggaatccggttcgtccagggcacattcgacgatgaagccgccttcgccactctcgccgaaaccctggagaagctcgacgtcgaacgcggcaccggcggcaatcacgcgttctacctgtcgatcccgccgaaggcgttcccggtggtctgcgaacagctgcgtagatccgggctggcgcgtccccaggagggccgctggagccgggtggtgatcgagaagccgttcggccacgacctcgagagcgcggtcgaactcaactcggtggtgaacagcgtgttccccgaggagtcggtgttccgcatcgaccactacctcggcaaggagaccgtgcagaacatcctggcgctgcggttcgccaatgaactgtacgagccggtctggaacaacaactacgtcgaccacgtccagatcacgatggccgaggacatcggattgggcgggcgcgcaggctattacgacggcatcggcgccgcccgcgacgtgatccagaaccacctgctgcaactgttggcgctgacggcgatggaggaaccggtcagcttccatccccacgagctgcaggccgagaagatcaaggtgctctccgcggtgcggttggctcaacccctcgaccagaccacctcccgcggtcagtacaccggcgggtggcagggcggtgagaaggtggtcggcctgcacgacgaggaggggttctccaagacgtcgacgaccgagacgttcgccgcgatcaccctcgacatcgacacccgccgctgggccggggtgccgttctatctgcgcaccggaaaacggctgggccgcagggtcaccgagatcgcgctggtgttccgccgggcgccgcacctgccgttcgacgcgacgatgaccgaggaactgggccagaacgcgctggtgatccgggtgcagcccgacgagggcatcacgctgcggttcggctccaaggtgccgggcagcgcgatggaggtccgcgacgtcaacatggacttctcctacgggtcggcgttcgccgaggattcccccgaggcctacgagcggttgatcctcgacgtgctgctcggtgaaccgtcgctgttcccggtcaacgccgaggtcgaactgtcctggaacatcctggatccggtgctggactactgggcttcgcacggcaagccggatccgtacgagtcgggcacgtgggggccggagtcggcgttcgagatgctgcggcgagacggccgcgaatggaggcggccgtga

SEQ ID NO: 2179 - protein, 523 aa, Mycobacterium sp. MCS
MVAVNRPVPGVPTPAPAGWRNPLRDKRDKRMPRIAGPCGVVIFGVTGDLSRKKLMPAIYDLANRGLLPASFSLVGFARRDWADEDFGQVVYEAVKKHARTPFRQEVWDRLAEGIRFVQGTFDDEAAFATLAETLEKLDVERGTGGNHAFYLSIPPKAFPVVCEQLRRSGLARPQEGRWSRVVIEKPFGHDLESAVELNSVVNSVFPEESVFRIDHYLGKETVQNILALRFANELYEPVWNNNYVDHVQITMAEDIGLGGRAGYYDGIGAARDVIQNHLLQLLALTAMEEPVSFHPHELQAEKIKVLSAVRLAQPLDQTTSRGQYTGGWQGGEKVVGLHDEEGFSKTSTTETFAAITLDIDTRRWAGVPFYLRTGKRLGRRVTEIALVFRRAPHLPFDATMTEELGQNALVIRVQPDEGITLRFGSKVPGSAMEVRDVNMDFSYGSAFAEDSPEAYERLILDVLLGEPSLFPVNAEVELSWNILDPVLDYWASHGKPDPYESGTWGPESAFEMLRRDGREWRRP

SEQ ID NO: 2180 - DNA, 1533 bp, Rubrobacter xylanophilus DSM 9941
  CDS (1)..(1533): transl_table=11
atgagcggcgtccgggaagagctgcgggacgcgctggccgacgagcggcgcatcccgcgcccgcccgagccggccgcgatggtcatcttcggggcctcgggggatctgacggcccgcaagctggtcccggccctctacgacctggcggcggcccggaggctgcccatgggcttcgcggtggtgggcgtctcccgcacgaagatgagccacgagcagttccggcagcggctgcgcggctcgctcgagcgccaccgcgcggggggcttcagcgaggaggtgtgggagagcttctcccgcagcatcttctacctccccggcgactcccggcggcccgagacctacggggagctccgggggctcctcgagcggctcgacgccgggcgggggaccggcggcaaccgcatcttctacctggcctcctcgccctccctcttctccccgaccgtcgagcggctcggggaggccgggatgagccgcgagggcgggggctcctacgtccggctcgtggttgagaagcccttcgggcgcgacctcgagagcgcccggcggctcaacgccgacctgctgcggcacttccgggaggaccagatctaccggatcgaccactacctgggcaaggagaccgtgcagaacatcctggccctgcgcttcgcaaacgggatcttcgagcccgtgtggaaccagcactacgtggaccacgtccagatcacggtggccgaggacatcgggatagaggggcggggggccttctacgaggaggccggcgccctgagggacatcgtgcagaaccacatgatgcagctgctgtgcctcaccgccatggagccgccggtggccttcgacgccgagccggtgcgcgacgagaaggtgaaggtgctcagcgccgtccggcccatcccggaggagcgggtggaggaggtggcggtgcgggggcagtacgggtccggctggatctggggtgaggaggtgagggcctaccgggaggaggagggggtcgctcccgactccgccaccgagacctacgcggccctcaagctctacgtagacaactggcggtgggccggggtgcccttctacgtgcgcaccggaaagcggctccccaagaaggtcaccgagatcgccatccgcttcaagcccacccctcacacccccttcgcccgcgccgcgggcgccgagcccaacgtgctcgtgatccgcatccagcccgaggagggggtctcgctcaagatcggggccaagatcccgggctccggtttcgaggtcggctcggtgaacatggacctgctctacggtacggcctttctggaggaggttcccgaggcctaccagcgcctgctgctggacctgatgctcggcgacgcgacgctgtttatccgggcggacgaggcggaggcggcctggtccatcctggaccccgtgctgcgcgcctggtcgggggcggaggacgtcccggtctacccggcgggctcctgggggcccgcggaggccgacgacctgctccggcgcgacgggagggggtggcggaggccgtga

SEQ ID NO: 2181 - protein, 510 aa, Rubrobacter xylanophilus DSM 9941
MSGVREELRDALADERRIPRPPEPAAMVIFGASGDLTARKLVPALYDLAAARRLPMGFAVVGVSRTKMSHEQFRQRLRGSLERHRAGGFSEEVWESFSRSIFYLPGDSRRPETYGELRGLLERLDAGRGTGGNRIFYLASSPSLFSPTVERLGEAGMSREGGGSYVRLVVEKPFGRDLESARRLNADLLRHFREDQIYRIDHYLGKETVQNILALRFANGIFEPVWNQHYVDHVQITVAEDIGIEGRGAFYEEAGALRDIVQNHMMQLLCLTAMEPPVAFDAEPVRDEKVKVLSAVRPIPEERVEEVAVRGQYGSGWIWGEEVRAYREEEGVAPDSATETYAALKLYVDNWRWAGVPFYVRTGKRLPKKVTEIAIRFKPTPHTPFARAAGAEPNVLVIRIQPEEGVSLKIGAKIPGSGFEVGSVNMDLLYGTAFLEEVPEAYQRLLLDLMLGDATLFIRADEAEAAWSILDPVLRAWSGAEDVPVYPAGSWGPAEADDLLRRDGRGWRRP

SEQ ID NO: 2182 - DNA, 1473 bp, Mesorhizobium sp. BNC1
  CDS (1)..(1473): transl_table=11
atgacgagccaaacgataccggtagagccttttgatctcgtggtcttcggggcaacaggtgacctttgcgaacgaaagctgctgcccgccctctaccagcgccagcgtgccggccaattcagcgagccgacacgcattatcggctcttcccgctcagagttgagcgacgaccaataccgctctttcgcactggatgcgatcaaagcgcatgtggccaaggccgaaatcgacaatcgtgagctcgaccggtttcttacccgagtttcctacgtgtcggcggacgccaccacgggccgaggctttaaagagctgaaggcggcaatcggagatagcgcgaatgtccgcgcattctatctcgccgttgctccttccctgttcggcagcatcgtcgcccaaatcgatgctcaccatatcgcgacgccgacctcgcgcgtcatcgttgaaaagccgatcggacgaagcctggaaactgcgcgggaggtcaacgattcgataggccgggttttcgatgaggcccggattttccgcatagaccattatctcggcaaggagacggtccagaacctgatggcgctgcgctttgccaacgcgctttatgagccgctctggaattcggcccatgtggatcacgtacagatcaccgtcgccgaatccgtcggcctggaaggcagagccggctactacgacaaagccggcgccctgcgcgatatggtgcagaaccatatgctgcagctcctctgcctcgtcgctatggaagtgcctgcctctctggatgccgatgccgtccgcgacgaaaagctgaaagtgctgcgtgccttgaggccgatcaatcagctcaattcggagcgcgtgacggtgcgcgggcaatatcgggcaggtgcttcgaatggcggcgcggtgaaaggctatttggaagagcttgggaatggcgggagcgacacggaaacctttgtcgcagtgaaggcggagatcggcaattggcgctgggcagacgtgcccttttatctgcgcaccggcaaacgcatggccacgcgcgtttccgaaatcgtcatccagttcaagcccattccccactcgatcttcggcgatgcggcaggccgaatctttgccaaccagctcgtcattcgcctgcagccggatgaaggtgtcaaacagtggatcatgatcaaggatcccggtccgggcggcatgcggctgcggcagatcccgctggacatgagctttgcggaatcctttcacgagcgcaatccggatgcctatgagaggctgatcatggatgtaatccgcgggaaccagacactcttcatgcgccgcgacgaggtggaagctgcctggcggtggatcgacccaatccatgcggcatgggaggagcgtagccagtcggtgcagccctataccgcaggcacttggggcccctcagcgtcgatcgccctcatcgaacgtgacggtcgcacctggcatgagagcttctga

SEQ ID NO: 2183 - protein, 490 aa, Mesorhizobium sp. BNC1
MTSQTIPVEPFDLVVFGATGDLCERKLLPALYQRQRAGQFSEPTRIIGSSRSELSDDQYRSFALDAIKAHVAKAEIDNRELDRFLTRVSYVSADATTGRGFKELKAAIGDSANVRAFYLAVAPSLFGSIVAQIDAHHIATPTSRVIVEKPIGRSLETAREVNDSIGRVFDEARIFRIDHYLGKETVQNLMALRFANALYEPLWNSAHVDHVQITVAESVGLEGRAGYYDKAGALRDMVQNHMLQLLCLVAMEVPASLDADAVRDEKLKVLRALRPINQLNSERVTVRGQYRAGASNGGAVKGYLEELGNGGSDTETFVAVKAEIGNWRWADVPFYLRTGKRMATRVSEIVIQFKPIPHSIFGDAAGRIFANQLVIRLQPDEGVKQWIMIKDPGPGGMRLRQIPLDMSFAESFHERNPDAYERLIMDVIRGNQTLFMRRDEVEAAWRWIDPIHAAWEERSQSVQPYTAGTWGPSASIALIERDGRTWHESF

SEQ ID NO: 2184 - DNA, 1545 bp, Rhodococcus sp. RHA1
  CDS (1)..(1545): transl_table=11
gtgagcgaacccgcagcgtcagacgattgggtcaatccactccgcgacggtagggacaagcgcctaccacgcatcgccgggccgtgtgcgctggtgatcttcggtgtcaccggcgacctggcccggcgcaagttgatgcccgccatctacgatctggccaatcgtggtcttctgccgcccgggttcgctctcgtcgggttcgcccgcagggattggtcggacgaggacttcggcaagatcgtccacgatgccgtccgcgaccattcccgcaccccgttccgggaggacgtctgggagcgactgtcggagggcctgcgtttcgtcaagggcagcttcgacgacccggcggccttccaggaactggcccacactctcgggacactggaacgcgaacgcgggaccggcggcaatcacgggttctatctcgcgattccgccggacgcgttcccggtcgtcctgaagcagctgtccgaggccggtctcgcgcagtcgaacgacgaccagtggcgtcgggtagtcatcgagaagccgttcggtcacgacctcgcgagtgcacgtgagctcaacgcggtcgtgaacgaggtcttccctgaggacacggtcttccggatcgaccactacctcggcaaggaaaccgtccagaacatcctggcgttgcgcttcgcgaaccagttgttcgatccgatctggaacgcccactacgtggatcacgtccagatcaccatggccgaggacatcggtctcggtggacgcgccgggtactacgacggcatcggggcggcgcgcgacgtcatccagaatcacctgctgcaactcctcgcgttcaccgcgatggaggagccgatcagcttcgaaccgtccgagttgcaggcggagaagatcaaggtgctctccgccaccaggctcgcccagccgctcgacgagaccaccgcgcgcggccagtacgcgggcggctggcagggcggtacccgggtggtcggactgctggaggaggaagggttctcgaaggactccaccacggaaacgttcgcggccatcaccctcgaggtcgacacccgccgctgggcgggggtgccgttctacctccgcaccgggaagcggctcggccgtcgggtcaccgagatcgccgtgatcttcaagcgcgcaccgcatctgccgttcgatcagaccatgaccgaggaactggggcagaacgccctcgtcatccgggtgcagccggacgagggtgtgaccatgcggttcgggtccaaggtcccggggtcgagcatggaagtccgcgacgtcaacatggacttcagctacggtcaggcgttcacggagtcgtcgcccgaggcgtacgagcgcctcatcctcgacgtgctcctcggtgagccctcgctgttccccgtgaacgccgaggtggaactgtcctgggaaatcctcgaccccgtgctcgagcactgggccgcggacggcaggccggaaccgtacgaggccggcacgtggggcccgccgtcggcagacgaaatgatgcaccgcaccggtcgcgaatggagaaggccgtag

SEQ ID NO: 2185 - protein, 514 aa, Rhodococcus sp. RHA1
MSEPAASDDWVNPLRDGRDKRLPRIAGPCALVIFGVTGDLARRKLMPAIYDLANRGLLPPGFALVGFARRDWSDEDFGKIVHDAVRDHSRTPFREDVWERLSEGLRFVKGSFDDPAAFQELAHTLGTLERERGTGGNHGFYLAIPPDAFPVVLKQLSEAGLAQSNDDQWRRVVIEKPFGHDLASARELNAVVNEVFPEDTVFRIDHYLGKETVQNILALRFANQLFDPIWNAHYVDHVQITMAEDIGLGGRAGYYDGIGAARDVIQNHLLQLLAFTAMEEPISFEPSELQAEKIKVLSATRLAQPLDETTARGQYAGGWQGGTRVVGLLEEEGFSKDSTTETFAAITLEVDTRRWAGVPFYLRTGKRLGRRVTEIAVIFKRAPHLPFDQTMTEELGQNALVIRVQPDEGVTMRFGSKVPGSSMEVRDVNMDFSYGQAFTESSPEAYERLILDVLLGEPSLFPVNAEVELSWEILDPVLEHWAADGRPEPYEAGTWGPPSADEMMHRTGREWRRP

SEQ ID NO: 2186 - DNA, 1491 bp, Haemophilus somnus 129PT
  CDS (1)..(1491): transl_table=11
atgaacgtaaatgcagaaaataattgtattgttatttttggagcttcgggagatttaactcaccgaaaattaatccccgcactttataatttatacaaaataggacgtttgacagaaaatttctctgtgttaggtgtttcccgaactgacttaagcgatgaagaatttcgtgaaaaaatgcgtaatgcgttgagaaaaacagaagatataacagaagaacatttggaaaaattttgttctcatctttattatcaggcgattgatacctcgaatgcttctgattatggaaaacttgttcctcgtttagatgagctacatgatacatatcagaccggaggcaatactctttattatatgtccacaccgccaagcctttacggtgtgattcctgaatgccttgccacacacggactaaatacggaagaatgcggttggaaacgtcttattgtagaaaaaccttttggttatgacataaaaaccgcaaaagaacttgatgtgcaaattcatcgtttttttgaagaacatcaaatttatcgtattgaccattatttgggtaaagaaactgttcaaaaccttctcgtattacgtttttccaacggcttatttgaaccgctatggaaccgcaactttattgactatgtagaaattacaggtgctgaagaaatcggtgttgaagaacgtggcggatactataatgattctggtgcaatgcgtgatatgttccaaaaccacttattacaagttttagccatggtagcaatggagccccctgctattattaatgctgattctatgcgtgacgaagtagcaaaagtgttacattgcttacacccgctcagcgaagacgatataaaaaacaatcttgttttaggtcaatacacatcttcaactatagatggtgaagtggtgaatggttatttacaagaaaaaggtgttccagcagactccaatacagaaacctacattgctttacgttgcgaaattgataactggcgttgggctggtgtgccattctatgtgcgtagcggtaaacggttaccaactcgtgttacggaaattgtcatacactttaaaacaacgccccatccagtcttcagtcaaaatgcaccagaaaataaattaattatccgaattcagcctgatgaagggatttcaatgcgtttcggcttgaaaaaaccgggtgctggctttgaagcaaaagaagtgtcaatggatttccgctatgctgatttagcaacaccaagcctactaagtgcctatgatcgtttattattagatgccataaaaggcgatgcgacactttttgcacggacagatgcagtacatgcctgctggaaatttgtacaacccatcttgaattataaaaaagatcaagggcgtgtttacgaatatgaagccggaacgtggggaccgacagaagcggataaattaattgctaaaacggggagagtatggcgtaaacctagtggaatgatgaagaaaaaagtctaa

SEQ ID NO: 2187 - protein, 496 aa, Haemophilus somnus 129PT
MNVNAENNCIVIFGASGDLTHRKLIPALYNLYKIGRLTENFSVLGVSRTDLSDEEFREKMRNALRKTEDITEEHLEKFCSHLYYQAIDTSNASDYGKLVPRLDELHDTYQTGGNTLYYMSTPPSLYGVIPECLATHGLNTEECGWKRLIVEKPFGYDIKTAKELDVQIHRFFEEHQIYRIDHYLGKETVQNLLVLRFSNGLFEPLWNRNFIDYVEITGAEEIGVEERGGYYNDSGAMRDMFQNHLLQVLAMVAMEPPAIINADSMRDEVAKVLHCLHPLSEDDIKNNLVLGQYTSSTIDGEVVNGYLQEKGVPADSNTETYIALRCEIDNWRWAGVPFYVRSGKRLPTRVTEIVIHFKTTPHPVFSQNAPENKLIIRIQPDEGISMRFGLKKPGAGFEAKEVSMDFRYADLATPSLLSAYDRLLLDAIKGDATLFARTDAVHACWKFVQPILNYKKDQGRVYEYEAGTWGPTEADKLIAKTGRVWRKPSGMMKKKV

SEQ ID NO: 2188 - DNA, 1530 bp, Trichodesmium erythraeum IMS101
  CDS (1)..(1530): transl_table=11
atggtagcagtattagaaaatcctctgcgagttggactacaacaagaccgggttccagaaccacaaattatgattatttttggtgcatccggtgatctaacccagagaaaacttgttccagcattatatcaaatgaagctagaacggagacttcctcctgaactaacaatagtgggagttgctcgcagagaatggagccatgattacttccgcgaacaaatgaagataggtgtagaagaatttggtggtggcttacaatctgaagaactgtggaatgattttgctaaggggattttttactgccctggtaatatagatcaaccagaagattatcaaagactcaaaaaacttttgagtcaattggacgaagagagaggtacgcgaggtaatcgcgtattttacttgtctgtagctccccgatactttggagaagcaacccaacagttaggggcagcaggaatgttagttgatcctaaaaagcaaagattagtaattgaaaaaccctttggtagagacctcagttcagctcaggtactcaataaaattgtgcgtcaagtttgccccgaagagcaaatataccgtattgaccattatctagggaaagaaactgttcaaaacttaatggtatttagatttgcaaatgctatttttgaacctctgtggaaccgtcaatttgttgataatgtccaaatcactgttgcagaaacggtagggttagaaggacgtgctggatattatgaaacatcaggtgcattgcgggacatggtacaaaaccacctgatgcagctattctccctgacagcaatggaacctcctaattctttagatgctgacagtattcgcaatgaaaaagtaaaagtagttcaggcaacccgcctagcaaatttagagcgtttagaatattcagcaattcgtggtcagtatacacagggttggatgaaaggtaaaagtgtaccagcttatcgggaagagggaggagcaaatcctaactctacaacacctacgtatgcagcactgaaactcaatattgataattggcgctggaaaggggtaccattttatttgcggactggcaagcgaatgccaaaaaaagtctcagaaattgctattcagtttaaagaagtaccgtttctgatgtttcagtcagcggcaaaacaagcgaatcctaatgtcttggctttacgcatccagcctaatgaaggggtatcaatgcgttttgaagtcaaaacaccaggtagttccctgcgaactcgctcagtagatatggattttcgttacgatactgcttttggtaagcctagtacagatgcttacagtcgtttgttggttgactgtatgttaggagaccaaaccttatttactcgtggcgatgaagtagaagcatcttggcgagcattaacaccaatacttagcatctgggatgctcctgctccaccagaagtcatacctttgtatgaagcaggcacctgggggccagttgaggctgaactgttgctcaaccaagatggtcgtcgttggcgccgactttga

SEQ ID NO: 2189 - protein, 509 aa, Trichodesmium erythraeum IMS101
MVAVLENPLRVGLQQDRVPEPQIMIIFGASGDLTQRKLVPALYQMKLERRLPPELTIVGVARREWSHDYFREQMKIGVEEFGGGLQSEELWNDFAKGIFYCPGNIDQPEDYQRLKKLLSQLDEERGTRGNRVFYLSVAPRYFGEATQQLGAAGMLVDPKKQRLVIEKPFGRDLSSAQVLNKIVRQVCPEEQIYRIDHYLGKETVQNLMVFRFANAIFEPLWNRQFVDNVQITVAETVGLEGRAGYYETSGALRDMVQNHLMQLFSLTAMEPPNSLDADSIRNEKVKVVQATRLANLERLEYSAIRGQYTQGWMKGKSVPAYREEGGANPNSTTPTYAALKLNIDNWRWKGVPFYLRTGKRMPKKVSEIAIQFKEVPFLMFQSAAKQANPNVLALRIQPNEGVSMRFEVKTPGSSLRTRSVDMDFRYDTAFGKPSTDAYSRLLVDCMLGDQTLFTRGDEVEASWRALTPILSIWDAPAPPEVIPLYEAGTWGPVEAELLLNQDGRRWRRL

SEQ ID NO: 2190 - DNA, 1524 bp, Synechococcus sp. CC9311
  CDS (1)..(1524): transl_table=11
atgaccgcaacgatcacgaacccactgagggttgggctgcgacaggaacgagtcatcgctccgcagtgcctggtgatttttggagcgagcggcgacctcacccatcgcaagctggttccagccctcttcgagttatttcagcaacgacgacttcccagcgaatttgccatcctgggttgcgccagaaggccttggagcgacgacgaattccgcagcaaaatggcggaggccatgggagacaaggttcgcgaccatcccgaggcatgggagcaatttgcagccgggatgttttatgagccggtggatcttcagaaaccggaagacgtcgtgaagctcgggggtcgcctgcaggagatcgaccgtctgagagccacacgaagcaaccgcaccttttacctctcggtgtcaccgaagttttatgcgagcggctgccgagccctcgccgatgcagacctcttaaaagatccccaacgaagtcgcgttgtcattgaaaaaccattcggacgggactacggcagcgcccaatccctgaacagagtggttcaaggctgcggccaagagaaccaaatctttcgcatcgaccactacctcgggaaggaaacggtccaaaacatcatggtgatgcggttcgccaacgcgattttcgaaccaatctggaatcgcaactacatctcaagtgtgcaaattactgcctctgaaaccgttggggttgaggaacgggccgggtactacgaaacctcgggtgcactgcgcgacatggtgcaaaaccacctgacccaaatgttggcgattaccgccatggaaacccctgggcgctttgatcccgaggccatccgcagtgagaaagccaaggttcttcaagctgcacgcctggccgatgaacttgaaccctggaactgctgcgttcgcggacaatacgggcctggaggcagcgacggttcacctctcagtggctaccggcaagaaccaggcgtcgatccgcagagcaccacggaaacttacgtgtcgatgaagctgttcatcgacaactggcgctggcagggcgttcctttctatgtgcgcaccggcaagcgccttgccaagcgtctaagcgaagtggttttgactttccgtgaagcacccgtccacctcttcgatgctgcaggtggcagtccaacagccaatcagctcatcctgcgaattcagcccgatgaaggagctgaattcaaatttgaagtgaagtctccaggctccggtatgcgcagccggcctgtcgagatggaattttcctatgacgaatccttcggggagccatcagatgagggctatgtgcgccttctggccgacgccatgttgggcgatccaacgctcttcactaggagtgatgaagtggaggcagcttggaggctttacaccccgctgctggaactgatcgaagacagtccctggaaactgcccatccatccctacgagtcacgcacttggggacctgccgctgccgatgcgctgctagcccgagacggcctgctctggcgtcgcccctaa

SEQ ID NO: 2191 - protein, 507 aa, Synechococcus sp. CC9311
MTATITNPLRVGLRQERVIAPQCLVIFGASGDLTHRKLVPALFELFQQRRLPSEFAILGCARRPWSDDEFRSKMAEAMGDKVRDHPEAWEQFAAGMFYEPVDLQKPEDVVKLGGRLQEIDRLRATRSNRTFYLSVSPKFYASGCRALADADLLKDPQRSRVVIEKPFGRDYGSAQSLNRVVQGCGQENQIFRIDHYLGKETVQNIMVMRFANAIFEPIWNRNYISSVQITASETVGVEERAGYYETSGALRDMVQNHLTQMLAITAMETPGRFDPEAIRSEKAKVLQAARLADELEPWNCCVRGQYGPGGSDGSPLSGYRQEPGVDPQSTTETYVSMKLFIDNWRWQGVPFYVRTGKRLAKRLSEVVLTFREAPVHLFDAAGGSPTANQLILRIQPDEGAEFKFEVKSPGSGMRSRPVEMEFSYDESFGEPSDEGYVRLLADAMLGDPTLFTRSDEVEAAWRLYTPLLELIEDSPWKLPIHPYESRTWGPAAADALLARDGLLWRRP

SEQ ID NO: 2192 - DNA, 1473 bp, Shewanella sp. MR-4
  CDS (1)..(1473): transl_table=11
atgggcaaaacaacatcaggcgccaaagcttgtgacttcgtactctttggtactaaaggcgacttggcacgacgcaagttgttaccttctttataccagctagataaagctgaacttctggataaaaacaccaaagtcattggggttgccaaagatgagttcagtcaggatgaatttagagaactcgtcatccttgcgttaaaaaccttcgtaaaagaaccgctctgcgaagagactgtcgaacgtttcttgtcccgctgccattatgtcggcacgaatttcaccgaatctgcaggctacagcgccttccatgaattgctcaaaccagaagagcgcgtcatggtcagttattttgccacccctcctgcgatttttggtgatatctgccgctgtctacacgaacaaaatcttatccatagcgattctcgcgtggtactcgaaaagcccattggctctgatctcgcttcttcccgcgtgattaacgatcaagtttctgcctacttcaaagaaaaccaagtttatcgtatcgaccattacttaggtaaagagacggtccaaaacctgattgcgctgcgttttgctaactcgttattcgcgtctaagtgggacaaccggaccattgaccatgtccagatcaccgttgctgaagaagtgggtatcgaaggccgttggggttacttcgataaagccggtcagatgcgcgatatgatccaaaaccacttactgcaagtgttgacactggttgccatggatcctccggttaacttagatgccgacagtattcgcgatgaaaaagtgaaagtactgaagtcgctgcgcccaattaatgccgacaatgtctatgaaaacactgtccgtggtcagtacagtgccggcttcctcaagggcagtccagttcctgggtatttagaggaagagggcgctaaccttcagtcccacaccgaaacctttgtggcgctgcgtgtcgatatcgacaactggcgttgggcgggcgtgccattttatctgcgtagcggtaaacgcatgccgttcaagagctctgaaattgtggtgtattttaaaaacccaccccacaacttgtatcgctcaagctaccgtaacttgccacctaacaagttaaccatccgtctgcaaccacatgaaggggttgagatccagatgatgaacaaggtgccggggctagagcagaagcaacgtttacaaaccactaaactcgacttgagtttctcggatacctttaaaaatgagcgtatcgccgatgcttacgagcgtctgttgctcgaagccatgctcggtaaccaagcactgttcgttcgccgtgacgaagtagagcaggcttggacttgggtggatggcatcatccaatcatgggaacaaagtaacgagaaaccgaaaccttatcctgcgggcacttggggacctgtagcgtcggtcgcgctgatcaccaaagacggccgttcgtgggatgaatag

SEQ ID NO: 2193 - protein, 490 aa, Shewanella sp. MR-4
MGKTTSGAKACDFVLFGTKGDLARRKLLPSLYQLDKAELLDKNTKVIGVAKDEFSQDEFRELVILALKTFVKEPLCEETVERFLSRCHYVGTNFTESAGYSAFHELLKPEERVMVSYFATPPAIFGDICRCLHEQNLIHSDSRVVLEKPIGSDLASSRVINDQVSAYFKENQVYRIDHYLGKETVQNLIALRFANSLFASKWDNRTIDHVQITVAEEVGIEGRWGYFDKAGQMRDMIQNHLLQVLTLVAMDPPVNLDADSIRDEKVKVLKSLRPINADNVYENTVRGQYSAGFLKGSPVPGYLEEEGANLQSHTETFVALRVDIDNWRWAGVPFYLRSGKRMPFKSSEIVVYFKNPPHNLYRSSYRNLPPNKLTIRLQPHEGVEIQMMNKVPGLEQKQRLQTTKLDLSFSDTFKNERIADAYERLLLEAMLGNQALFVRRDEVEQAWTWVDGIIQSWEQSNEKPKPYPAGTWGPVASVALITKDGRSWDE

SEQ ID NO: 2194 - DNA, 1470 bp, Hyphomonas neptunium ATCC 15444
  CDS (1)..(1470): transl_table=11
gtggcaaagttcgttcctgttgaagccttcgacatcgtcatctttggcggcacgggcgatctgtcccgccgcaagctgcttcctgcgctctatcaccgctgggtggatggccagattccggaaaactcgacgatcgtcggaacggctcgctccgagctggatgcgcaggcttatcgggaccttgcgcgggaagcttgcgagaaagcctcaggcaaatcgtgggacgctgacgcttgggagaagtttgctcagatcctccattatgtcgcgatcgatgcgaccgatccggaaggggattgggaggggctcaaggccaggctgaaggcagaagatggccgtccacggatattctatctggcaacgtcgcctcacctttatgtcgatatctcccgcgcgctgggaaaggtcggccttgtggacggcatgtgcagggtcgtgctggaaaagcccatcggtacggaccttgcatccgcgcaggcgatcaatgacggcgtcggcgaggtgttcaccgaacggcaggtattccgtattgaccactatctgggcaaggaaaccgtccagaacctgatggttttgcgctttgccaatatcctgttcgaaccgctctggtcgcagaattatatcgatcacgttcagatcactgtcgctgaagatctcggccttgaagggcgggccgactattacgaccggtccggcgcgctgcgcgacatggtccagaaccacctgttgcagctcctgtgcctcacggcgatggagccccccaacgacatggatgacgacgatatacgcacagaaaagatcaaggttctgaaggccctgcggccggtatcgtctcaggatgcaaagcggctgaccgtgcgcgggcaatacgcggcaggcatgcatgcgggcaaaccggctaaaggctatgtcgaggagctctccgaaaccgggggcagcaagaccgaaacatttgtggccatcaaggcagagatcaacaactggcgctggacgggcgtgccattctatctgcgcaccggaaaacgcatgtcgtcgcgccattccgacatcgtgatccagttcaagcaggcgccccacaatctgttcggtgagcaatcgggaaatgtaaaccagcttgtaatccgtctgcagccggatgaagcggttcgcctgtatgttcagatcaaggaacccggccctggtggcctgcgcgtcaaatcgctcccactcaacctttcctatgcggaaagtttcaccctacgctatcccgacgcctatgagcggctgttgatggatgtcgttcgcggaaacctttccctgttcatgcgccgggacgaggttgaggccgcctggcgctgggttgatggcctgatcgatgcgtgggacaccagcggctatcagcctgaagcctatccggcgggtacggatggcccgatgtcggccgcgatgctgatggaccgtgacaatcgtagttggtggaaagaaagctga

SEQ ID NO: 2195 - protein, 489 aa, Hyphomonas neptunium ATCC 15444
MAKFVPVEAFDIVIFGGTGDLSRRKLLPALYHRWVDGQIPENSTIVGTARSELDAQAYRDLAREACEKASGKSWDADAWEKFAQILHYVAIDATDPEGDWEGLKARLKAEDGRPRIFYLATSPHLYVDISRALGKVGLVDGMCRVVLEKPIGTDLASAQAINDGVGEVFTERQVFRIDHYLGKETVQNLMVLRFANILFEPLWSQNYIDHVQITVAEDLGLEGRADYYDRSGALRDMVQNHLLQLLCLTAMEPPNDMDDDDIRTEKIKVLKALRPVSSQDAKRLTVRGQYAAGMHAGKPAKGYVEELSETGGSKTETFVAIKAEINNWRWTGVPFYLRTGKRMSSRHSDIVIQFKQAPHNLFGEQSGNVNQLVIRLQPDEAVRLYVQIKEPGPGGLRVKSLPLNLSYAESFTLRYPDAYERLLMDVVRGNLSLFMRRDEVEAAWRWVDGLIDAWDTSGYQPEAYPAGTDGPMSAAMLMDRDNRSWWKES

SEQ ID NO: 2196 - DNA, 1476 bp, Rhizobium leguminosarum bv. viciae 3841
  CDS (1)..(1476): transl_table=11
atgagcagccaaatcattcccgttgagccctttgattatgtcgtcttcggcggcagcggcgaccttgcagaacgcaagttgctgcccgccctttaccatcgccagatcgaaggccagttcagcgaaccgacccgcgtgatcggcgcctcgcgcagcccgttgacccatgaggaataccgcaaattcgccaaggacgcgctgaacgagcacctgaagaagggtgaatatgacgaggcggaggtgcagaaattctgtgcccgcctctactacgtctcggtcgatgcccgcaccgatgccggctgggatcagctgaagaagctgctcgacgaaggcaaggatcgcgtgcgcgccttctatctggcggtcgcgcccggcattttcggcgacatttcgcagaagatccacgaccacaagctgatcaccaagtcgacccgcatcgtcgtcgagaagccgatcggccgcgacctcgcctcggcgctgcagctcaacgacacgatcggccgcgccttcaaggaagagcagatcttccgcatcgaccattatctcggcaaggagacggtgcagaacctgatggcgctgcgcttcgccaatgcgctctacgagccgctgtggaacgccaactacatcgaccacgtgcagatcaccgtggctgaatcggtcggcctcgaaggccgcgccggctattacgacacggcgggcgcattgcgcgacatggtgcagaaccacatcctgcagctcctctgcctgacggcgatggaagtgccctcgtcgatggattcggaagccgttcgcgacgagaagctgaaggtgctgcgggcgctgaagccgctcaatgcctccaacgtcgagcaggcgacggttcgcggccagtatcgcgccggcgcctcgggcagcggcccggtcaagggctacctcgaagagctcgaaggcggcgtgtcgaataccgagaccttcgttgccatcaaggccgagatcaacaactggcgctgggccggcgttcccttctatatccgcaccggcaagcggctgaccgggcgcatgtccgagatcgtcatcaccttcaagccgatcccgcacgccatcttcgaccaggcggctgggcgcatcaacgccaaccagctgatcatccgcctgcagccggatgagggcgtcaagcagtcgctgatgatcaaggatccaggtccgggcggcatgcgcctgcgcaacgtctcgctcgacatgagcttcgcccaggccttcaacgtccgcaatcccgacgcctacgagcgcctgctgatggacgtgatccgttccaaccagacgctgttcatgcgccgcgacgaagtcgaggctgcatggaaatgggtggatccgatcctcaagggttgggaaacgaccggccagcaggtgcagggctataccgccggcacctggggtccgagccaggccatcgcgctgatcgagcgtgacggccgtacctggcatgacgaaatctag

SEQ ID NO: 2197 - protein, 491 aa, Rhizobium leguminosarum bv. viciae 3841
MSSQIIPVEPFDYVVFGGSGDLAERKLLPALYHRQIEGQFSEPTRVIGASRSPLTHEEYRKFAKDALNEHLKKGEYDEAEVQKFCARLYYVSVDARTDAGWDQLKKLLDEGKDRVRAFYLAVAPGIFGDISQKIHDHKLITKSTRIVVEKPIGRDLASALQLNDTIGRAFKEEQIFRIDHYLGKETVQNLMALRFANALYEPLWNANYIDHVQITVAESVGLEGRAGYYDTAGALRDMVQNHILQLLCLTAMEVPSSMDSEAVRDEKLKVLRALKPLNASNVEQATVRGQYRAGASGSGPVKGYLEELEGGVSNTETFVAIKAEINNWRWAGVPFYIRTGKRLTGRMSEIVITFKPIPHAIFDQAAGRINANQLIIRLQPDEGVKQSLMIKDPGPGGMRLRNVSLDMSFAQAFNVRNPDAYERLLMDVIRSNQTLFMRRDEVEAAWKWVDPILKGWETTGQQVQGYTAGTWGPSQAIALIERDGRTWHDEI

SEQ ID NO: 2198 - DNA, 1467 bp, Pseudomonas aeruginosa UCBPP-PA14
  CDS (1)..(1467): transl_table=11
ttgagtacaccagccactccaacgtcctgcgacatcctggtcttcggcggtaccggcgacctggccctgcacaagctgctgccggcgctctatcgcctgcaccgggaggaccgcctgccggccgatacgcggatcttcgccctcgcccgcagcgcgctggacaacgccgccttcctcgccctcgccgagcgcaacgtccgcgcggtggtggcacgcagcgagttcgccgccgaacaatggaaaggcttcgccgcgcgcctcgactacctggccatggacgcctcgcagagcgccgacttcggccgtctcgcgcggcacctgaagagcagcgagggccgggtgctggtgcactacctggcgacctcgccgagcctgttcgcgccgatcgcgcagaacctctccatcgccggcctcgccgggccgcaagcgcgcatcgtgctggaaaaaccgctgggccattcgctggactcggcgcgggcgatcaaccagtccatcggccgggtgttcgacgagtcgcgggtgttccgcatcgaccactacctgggcaaggaaaccgtgcagaacctgatggccctgcgcttcgccaatgcgttgttcgagccggtctggcgcgcggcgcacatcgaccatgtgcagatcagcgtcaacgagacccttggcgtggagaaccgcggcggctactacgaccacgccggggcgatgcgcgacatggtgcagaaccatctgctccagttgctctgcctggtggcgatggaggcgccggtgcgtttcgacgccgaggctgtgcgcaacgagaagctcaaggtgctgcaggcgctgaagccgatctccgggctcgacgtgcaggacaagacggtacgcggccagtacgccgccggcaggatcggcggccaggaggtgccggcgtactacttcgagaagaacgtcgacaacgacagcgataccgagaccttcgtcgcgctccaggccgaggtcgagaactggcgctgggccggggtgccgttctacctgcgcaccggcaagcgcatggcgcgcaagtgctcggaaatcgtcatccagttcaagccggtgccgcacagcctgatcgacggcggcggcgggccggccaaccgcctgtggataaggttgcagccggaggagcggatcagcgtgcaactgatggccaagaccccgggcaagggcatgcaactggaaccggtggagctggatctcaacctggccgaggccctcagccgcaacaagcggcgctgggacgcctacgaacgcctgctgctggacgtgatcgagggcgactcgacgctgttcatgcgccgcgacgaggtagaggccgcctggggctgggtcgacccgatcctcgccggctggcgcgagcactaccagagcccgcggccctacccggccggcagcaacggcccggaacaggcgcaactgctgctggaactgcagggtcgacgctggctggaatga

SEQ ID NO: 2199 - protein, 488 aa, Pseudomonas aeruginosa UCBPP-PA14
MSTPATPTSCDILVFGGTGDLALHKLLPALYRLHREDRLPADTRIFALARSALDNAAFLALAERNVRAVVARSEFAAEQWKGFAARLDYLAMDASQSADFGRLARHLKSSEGRVLVHYLATSPSLFAPIAQNLSIAGLAGPQARIVLEKPLGHSLDSARAINQSIGRVFDESRVFRIDHYLGKETVQNLMALRFANALFEPVWRAAHIDHVQISVNETLGVENRGGYYDHAGAMRDMVQNHLLQLLCLVAMEAPVRFDAEAVRNEKLKVLQALKPISGLDVQDKTVRGQYAAGRIGGQEVPAYYFEKNVDNDSDTETFVALQAEVENWRWAGVPFYLRTGKRMARKCSEIVIQFKPVPHSLIDGGGGPANRLWIRLQPEERISVQLMAKTPGKGMQLEPVELDLNLAEALSRNKRRWDAYERLLLDVIEGDSTLFMRRDEVEAAWGWVDPILAGWREHYQSPRPYPAGSNGPEQAQLLLELQGRRWLE

SEQ ID NO: 2200 - DNA, 1488 bp, Pediococcus pentosaceus ATCC 25745
  CDS (1)..(1488): transl_table=11
atgaatcaaaaggctttatttattatttttggcggaacaggcgacttagcttatcgaaaattatatccggcgttatttaatttatacgaaaaaggatatttaaaagaggattttgctgtaattggtacagcacgccgtccgtggtctaacgatcactaccatgaagtagttatgagtgcaattgaagacgcaggccgtgattctggtcggactaacgatgacctacctcgcaaatttgcaagccatttctactatcaatcacataatgttgatgatgtcgatcattatgtagctttacgtaaattagcagatgaattggatgaaaagtatgatcttcaaggaaatcgtattttttatttagcaatggcaccaagattctttggaacaattgccggccatctgaaagatcaagctttacttacaaagggaaatggttttaaccgattaattatcgaaaaacccttcggacgtgactatcccagtgctaaagaattgaacgattcaatttcgggttcctttaaagaagaacagatttttagaattgatcattatttaggtaaggaaccgatccagtcaattgctggattacggtttgggaacgcattgttcaactcgctttggaataaagaacatattgataacattcagattaccctatctgaatcacttggtgtcgaagaacgggctggatactatgaaacagctggggcaatgcgggatatggtccaaaatcatattatgcaaattgtttcgttacttacaatggaacggccagatgtttttgattcagaacatttacgtgacaagaaaattgaagctttggaaaatatccaaatgtataccaaagaagaagctaaaaaatatttcattcgtggccaatacggtgcagatgaggctaatacacaacttggataccgagatgaagaaggtacggataatcaatcaactgttgaaactttcgttgccggtaaattaattacacataatccgtcattagatggtgtaccagtttatattcgtactgggaaacgattaactaaaaaatcaactcagattaacattgtatttaaaaatgatgatcaaaacatttttgctaaagacgcgtcagaaaaattaaagaccaatgttttgactatgcatattgaacctgatcaagggtttacactagaatttaatacaaagactggaaaccaaggttacaacctttccccagttcatttacgttatcgtaagacagccactgaaaaggctcaaattccagatgcttacgaaggtttgattcgcgatgctttaatgggaaataagactaattttgcacattggcatgaagttagccaagcatggaagattatggatgtagtccgcgaggcttgggatgaagaagaacccgcatttccaaactatgcaagtggtagtatgggacctgaagcagctatgcaacttctagctgatgatggacgtaaatgggtttttaatccacgcagctaa

SEQ ID NO: 2201 - protein, 495 aa, Pediococcus pentosaceus ATCC 25745
MNQKALFIIFGGTGDLAYRKLYPALFNLYEKGYLKEDFAVIGTARRPWSNDHYHEVVMSAIEDAGRDSGRTNDDLPRKFASHFYYQSHNVDDVDHYVALRKLADELDEKYDLQGNRIFYLAMAPRFFGTIAGHLKDQALLTKGNGFNRLIIEKPFGRDYPSAKELNDSISGSFKEEQIFRIDHYLGKEPIQSIAGLRFGNALFNSLWNKEHIDNIQITLSESLGVEERAGYYETAGAMRDMVQNHIMQIVSLLTMERPDVFDSEHLRDKKIEALENIQMYTKEEAKKYFIRGQYGADEANTQLGYRDEEGTDNQSTVETFVAGKLITHNPSLDGVPVYIRTGKRLTKKSTQINIVFKNDDQNIFAKDASEKLKTNVLTMHIEPDQGFTLEFNTKTGNQGYNLSPVHLRYRKTATEKAQIPDAYEGLIRDALMGNKTNFAHWHEVSQAWKIMDVVREAWDEEEPAFPNYASGSMGPEAAMQLLADDGRKWVFNPRS

SEQ ID NO: 2202 - DNA, 1473 bp, Oenococcus oeni PSU-1
  CDS (1)..(1473): transl_table=11
atggataataaacctactgaattaccattagttttgctgctttttggtggcacaggagatcttgcaaaacgcaagttatatccttcactgtttaatttatttaaaaaaggttatctgcaaaaacacttcgctgtgattgggactgctcgtcatcccttggacgacgaaaaattccaagaagtcgtccgccaatcaattgctaaaaatggaaccgaaggacaagttaaagaattcgctgcccacttccgttacagcagccatgacgttaccgacttaaaagattatggcaaattgaaaaatatgctggccaaacttgataaagagtttgatgccggcggtaaccggatcttttatatgtctgttgctcctcgtttctttggccaaatcgctcaagccatcaaatccgagggtctgatgtcggataccggttataaccgattaatggtcgaaaaaccttttggaacaagttataagacggccgaagaactacaaaatcaacttgaatcaggtttttccgatgaccaaattttccgaattgatcattaccttggtaaagaaatggtgcaaaatattcctgctgttcgtttcggtaatccgatcttagacgccacttggaacaaaaactacatcaaaaacgtccaagtaactttagcagaacagctcggagttgaggaacgtgctggatattacaacaccgccggggctctgcttgatatgattcaaaaccacgccttccaaatcgttggttggctggcaatggaaaaaccaagttcattttccgatacggatattcgagcagctaaaaatactgttttctcaaaactgaaaatgtatgacgaacgagaggttgtcgcaaactttgttcgtggacaatatggtcgaggaagagaagtttggcaaaagtcatatacggaagaacccaatgttccagcagattcaaagaacgatacttatgttgctggtcgtcttcaatttgaaaatgatcgttggaccggtgttcctttttacatcagaaccggaaagcgattagctgccaagcaaacgcgagtcgatattgtttataaaaaatcttcatttgattttggaaaattcaatcaagacaaactatccgaaccggttttgagtatcttaatcgatccggttgggggaattaatttctccttgaatggcaaaaatgttacaaccgaatttgaaacacgttccgatttgttaaaatggtcaatttccgatcaagacaaggttaagacaccggatccatacgaaagaatgcttcacgatgcgatgaatggcgatggatccaacttcgctgattggaatggcgtttctatctcctggaaatttgtcgatcaaattgccaaggtttgggctgaagacaaggctcctttggaaatttacgaatctgccacaatgggttcagttgccagtgatcgtttgttggctgagactggagatcgttggatttaccgcggataa

SEQ ID NO: 2203 - protein, 490 aa, Oenococcus oeni PSU-1
MDNKPTELPLVLLLFGGTGDLAKRKLYPSLFNLFKKGYLQKHFAVIGTARHPLDDEKFQEVVRQSIAKNGTEGQVKEFAAHFRYSSHDVTDLKDYGKLKNMLAKLDKEFDAGGNRIFYMSVAPRFFGQIAQAIKSEGLMSDTGYNRLMVEKPFGTSYKTAEELQNQLESGFSDDQIFRIDHYLGKEMVQNIPAVRFGNPILDATWNKNYIKNVQVTLAEQLGVEERAGYYNTAGALLDMIQNHAFQIVGWLAMEKPSSFSDTDIRAAKNTVFSKLKMYDEREVVANFVRGQYGRGREVWQKSYTEEPNVPADSKNDTYVAGRLQFENDRWTGVPFYIRTGKRLAAKQTRVDIVYKKSSFDFGKFNQDKLSEPVLSILIDPVGGINFSLNGKNVTTEFETRSDLLKWSISDQDKVKTPDPYERMLHDAMNGDGSNFADWNGVSISWKFVDQIAKVWAEDKAPLEIYESATMGSVASDRLLAETGDRWIYRG

SEQ ID NO: 2204 - DNA, 1473 bp, Shewanella sp. ANA-3
  CDS (1)..(1473): transl_table=11
atgggcaaaacaacatcaggcgccaaagcttgtgacttcgtactctttggtactaaaggcgacttggcacgacgcaagttgttaccttctttataccagctagataaagctgaacttctggataaaaacaccaaagtcattggggttgccaaagatgagttcagtcaggatgaatttagagaactcgtcatccttgcgttaaaaaccttcgtaaaagaagccctctgcgaagagactgtccaacgcttcttgtcccgctgccattatgtcggcacgaatttcaccgaatctgcaggctacagcgccttccatgaattgctcaaaccagaagagcgcgtcatggtcagttattttgccacccctcctgcgatttttggcgatatctgccgctgtttacacgaacaaaatcttatccatagcgattctcgcgtggtactcgaaaagcccattggctctgacctcgcttcttcccgtgtgattaacgatcaagtttctgcctacttcaaagaaaaccaagtttatcgtatcgaccattacttaggtaaagagacagtccaaaacctgattgcgctgcgtttcgctaactcgttattcgcgtctaagtgggacaaccggaccattgaccatgtccagatcaccgttgctgaagaagtgggtatcgaaggccgttggggttacttcgataaagccggtcagatgcgcgatatgatccaaaaccacttactgcaagtgttgacactggttgccatggatccaccagttaacttagatgctgacagtattcgcgatgaaaaagtgaaagtactgaagtcgctgcgcccaatcaatgccgacaatgtctatgagaacactgtccgtggtcagtacagtgccggcttcctaaaaggcagtcctgttcctggctatttagaggaagagggcgctaaccttcagtcccatactgaaacctttgtggcgctgcgtgtcgatatcgacaactggcgttgggctggcgtgccattttatctgcgtagcggtaaacgcatgccgttcaagagctctgaaattgtggtgtattttaaaaacccaccccacaacttgtatcgctcaagctaccgtaacttgccacctaacaagttaaccatccgtctgcaaccacatgaaggggttgagatccagatgatgaacaaggtgccggggctagagcagaaacaacgtttacaaaccaccaaactcgacttgagtttctcggatacctttaaaaacgagcgtatcgccgatgcttacgagcgtctgttgctcgaagccatgctcggtaaccaagccctgttcgttcgccgtgacgaagtagagcaggcttggacttgggtggatggcatcatccaatcatgggaacaaagtaacgagaaaccgaaaccttatcctgcgggcacttggggacctgttgcgtcggtcgcgctgatcaccaaagacggccgttcgtgggatgaatag

SEQ ID NO: 2205 - protein, 490 aa, Shewanella sp. ANA-3
MGKTTSGAKACDFVLFGTKGDLARRKLLPSLYQLDKAELLDKNTKVIGVAKDEFSQDEFRELVILALKTFVKEALCEETVQRFLSRCHYVGTNFTESAGYSAFHELLKPEERVMVSYFATPPAIFGDICRCLHEQNLIHSDSRVVLEKPIGSDLASSRVINDQVSAYFKENQVYRIDHYLGKETVQNLIALRFANSLFASKWDNRTIDHVQITVAEEVGIEGRWGYFDKAGQMRDMIQNHLLQVLTLVAMDPPVNLDADSIRDEKVKVLKSLRPINADNVYENTVRGQYSAGFLKGSPVPGYLEEEGANLQSHTETFVALRVDIDNWRWAGVPFYLRSGKRMPFKSSEIVVYFKNPPHNLYRSSYRNLPPNKLTIRLQPHEGVEIQMMNKVPGLEQKQRLQTTKLDLSFSDTFKNERIADAYERLLLEAMLGNQALFVRRDEVEQAWTWVDGIIQSWEQSNEKPKPYPAGTWGPVASVALITKDGRSWDE

SEQ ID NO: 2206 - DNA, 1467 bp, Mycobacterium avium 104
  CDS (1)..(1467): transl_table=11
atggtgatcttcggcgtcaccggcgatctggcccgcaagaaggtcatgcccgccatctacgacctggccaaccgcgggctgctgccgcccagcttctcgctggtcggcttcgcccgaagggattggagcacccaggatttcggcaaggtggtatacgaggccgtcaaggagcactgccgcaccccgttccggcaggagaactgggatcggctggccgagggattccgtttcgtgccaggcgctttcgacgacgacgaggcgttcggccggctcgccgagacgctggacaaactcgacgccgagcggggcaccggcggtaatcacgccttctacctggccatcccgcccaagtccttccccgtcgtgtgcgaacaactgcacaagtccgggctggcccgcccgcagggcgaccgctggagccgagttgtcatcgagaagccgttcggccacgacttggagagcgcgcagagcctgaacaaggccgtcaacgccgtctttcccgaggagtcggtcttccgcatcgaccactacctgggcaaggagacggtccgcaacatcctggcgctgcggttcgccaaccagttgttcgacccgatctggaactcgcactacgtcgaccacgtgcagatcaccatggccgaggacatcggcttgggcgggcgggccggctactacgacggcatcggcgccgcgcgcgacgtcatccagaaccacctgatgcagctgctggcgctgaccgcgatggaagagccggtcagcttcagcccgttggcgctgcaggccgagaagatcaaggtgctctcggccacccacctcgcccacccgctcgacgagaccaccagccgcggccagtacaccgcgggctggcagggcggcgagaaggtggtcgggctgctcgacgaggagggcttcgccaaggactcgatcaccgagacgttcgccgccatcaccctcgaggtggacacccgccgctgggccggggtgccgttctacctgcggaccggaaaacgcttgggccgcagggtgaccgagatagccctggtgttcaaacgcgcgccgcatctgccgttcgacgcgacgatgaccgatgagctgggcgccaacgccatggtgatccgggtgcagcccgacgagggtgtcacgctgcggttcggttccaaggtgccgggcaccgcgatggaggtccgcgacgtcaacatggacttctcctacgggtcggcgttcgccgaggaatcaccggaggcctacgagcagttgatcctcgacgtgctgctgggtgagccgtccctgttcccggtcaacgccgaagtcgaattggcttggcacatcctcgatcccgtgctcgacaactgggcgagcggcggcaggcccgagccctacgaggccggcacctggggcccggattcggcgttcgagatgctgcaccggacgggccgcgaatggcgcggccatgatacgcagcgatga

SEQ ID NO: 2207 - protein, 488 aa, Mycobacterium avium 104
MVIFGVTGDLARKKVMPAIYDLANRGLLPPSFSLVGFARRDWSTQDFGKVVYEAVKEHCRTPFRQENWDRLAEGFRFVPGAFDDDEAFGRLAETLDKLDAERGTGGNHAFYLAIPPKSFPVVCEQLHKSGLARPQGDRWSRVVIEKPFGHDLESAQSLNKAVNAVFPEESVFRIDHYLGKETVRNILALRFANQLFDPIWNSHYVDHVQITMAEDIGLGGRAGYYDGIGAARDVIQNHLMQLLALTAMEEPVSFSPLALQAEKIKVLSATHLAHPLDETTSRGQYTAGWQGGEKVVGLLDEEGFAKDSITETFAAITLEVDTRRWAGVPFYLRTGKRLGRRVTEIALVFKRAPHLPFDATMTDELGANAMVIRVQPDEGVTLRFGSKVPGTAMEVRDVNMDFSYGSAFAEESPEAYEQLILDVLLGEPSLFPVNAEVELAWHILDPVLDNWASGGRPEPYEAGTWGPDSAFEMLHRTGREWRGHDTQR

SEQ ID NO: 2208 - DNA, 1551 bp, Mycobacterium smegmatis str. MC2 155
  CDS (1)..(1551): transl_table=11
atgacagcggtcaacgaccggccggacaccacctggcacaacccccttcgcgacaaacgcgacaaacgcatgccccgcatcgcggggccatgcggggtggtgatcttcggtgtcacaggcgacctcgcgcgcaagaagctgatgccggccatctacgacctcgccaaccggggtctgctgccggcatccttcgcgctcgtcggcttcgcccggcgtgactgggaggacgaggacttcggtcaggtcgtctacgacgccgtgcgccagcacgccagaactccgttccgccaggaggtctgggaccgcctggccgagggcatccggttcgttcagggcacgttcgacgacgacaccgcgttcacgcgtctggccgagaccctcgacaagctcgacatcgagcgcggcacgggcggcaatcacgcgttctacctgtcgattccgccgaacgccttcccggtggtgtgcgagcagttgcgcaaatcgggcctggccaagccgcgcgacggccggtggagccgtgtggtcatcgagaagccgttcggccacgacctcggcagcgcacgcgagctcaactcggtggtcaacagcgtgttcccggaggagtcggtgttccgcatcgaccactacctgggcaaggagaccgtccagaacatcctggcgctgcgcttcgccaacgcgctctacgagccgatctggaacaacaactacgtcgaccacgtgcagatcaccatggccgaggacatcggcctcgggggccgggccggctactacgacggcatcggcgccgcgcgcgacgtgatccagaaccacctgctgcagttgctggcgctcaccgcactggaggagccggtcagcttcagcccgcacgagttgcagaccgagaagatcaagatcctctcggcggtgaaactcgccgagccgctcgatgagaccacggcgcggggccagtacgccgcgggctggcagggcggcgagaaggtcgtcggcctgctcgacgaggagggcttcgccaaggactcgaccaccgagacctacgcggccatcaccctcgaggtcaacaccaggcgctgggcgggcgtgccgttctacctgcgcaccggaaaacgcctgggccgcagggtcaccgagatcgcgctggtgttcaagcgggctccgcacctgccgttcgacgcgaccatgaccgaggaactcggccagaacgcgctggtgatccgcgtgcagcccgacgagggcatcacgctgcgcttcggctcgaaggtccccggcagtgccatggaggtccgtgacgtcaacatggacttctcgtacggttcggcgttcgccgaggattcccccgaggcctacgagcgcctgatcctcgacgtgctgctcggcgaaccgtcgttgttcccggtgaacgaagaagtcgaattgtcctgggagatcctggatccggtgctcgaatactgggcacagcacggcaagcccgaaccgtacgagtccggaacgtgggggccgccgtccgccgacgcgatgctgcggcgcacgggccgggaatggagacgtccgtga

SEQ ID NO: 2209 - protein, 516 aa, Mycobacterium smegmatis str. MC2 155
MTAVNDRPDTTWHNPLRDKRDKRMPRIAGPCGVVIFGVTGDLARKKLMPAIYDLANRGLLPASFALVGFARRDWEDEDFGQVVYDAVRQHARTPFRQEVWDRLAEGIRFVQGTFDDDTAFTRLAETLDKLDIERGTGGNHAFYLSIPPNAFPVVCEQLRKSGLAKPRDGRWSRVVIEKPFGHDLGSARELNSVVNSVFPEESVFRIDHYLGKETVQNILALRFANALYEPIWNNNYVDHVQITMAEDIGLGGRAGYYDGIGAARDVIQNHLLQLLALTALEEPVSFSPHELQTEKIKILSAVKLAEPLDETTARGQYAAGWQGGEKVVGLLDEEGFAKDSTTETYAAITLEVNTRRWAGVPFYLRTGKRLGRRVTEIALVFKRAPHLPFDATMTEELGQNALVIRVQPDEGITLRFGSKVPGSAMEVRDVNMDFSYGSAFAEDSPEAYERLILDVLLGEPSLFPVNEEVELSWEILDPVLEYWAQHGKPEPYESGTWGPPSADAMLRRTGREWRRP

SEQ ID NO: 2210 - DNA, 1551 bp, Nocardioides sp. JS614
  CDS (1)..(1551): transl_table=11
gtgacgacgcctccgggctggcacaaccccctccgcgacccgcgcgatcgtcggctgccgcggatcgcggggccgagcgggatggtgctcttcggcgtcaccggcgacctgtcccgcaagaagatcatgccggcgatctacgacctcgcgaaccgcgggctgctgccgccgggcttcagcctgaccggcttcgcgcgccgcgactgggccgaccaggacttcgcgcagatcgtccacgactcggtcaagacgcacgcccggaccgagttccgcgaggaggtgtggcgtcagctcgcggaaggcttccgcttcgtgccgggcaacttcgacgacgacatggccttcgagcggctgcgccggaccatcgaggagctcgacgaggtgcgcggcaccggcggcaaccacgcgttctacctggccatcccgccggggttcttcgccgatgtcgtgggtcagctccaggagcacgggctgaccgagggccgcggcgactcctggcgtcgggtggtcgtggagaagcccttcggtcacgacctggagtccgcgcagcggctcaactcggtgctggccgaggtgttcccctccggctcgatcttccggatcgaccactacctcggcaaggagacggtgcagaacatcctggcgctgcggttcgccaacgagatgttcgagccgatctggaactccaactacgtcgaccacgtccagatcacgatggccgaggacatcggcatcggcgggcgcgccggctactacgacggcatcggcgcggcacgggacgtgatccagaaccacctcctccagctgatggcgctcgtggccatggaggagccgacgtccttcgacgccgagagcctgcgcatcgagaagcagaaggtcctctccagcgtcgtgctgccgcgccggctcgacctgaccaccgcacgcggtcagtacgccgccggctgggcgggcggcgagcaggtgatcggcttcctcgaggaggagggcatcaagcggacctccaccaccgagacctacgccgcggtgaccctccacgtggacacccggcggtgggccggcgtcccgttctacctccgcaccggcaagcggctgggccggcgggtgaccgaagtggccgtggtcttcaggcgggcgccgcacctgccgttcgccgcctcctcgaccgaggagctcacccagaacgccctcgtgatccgggtgcagcccgacgagggcgtgacgatgcgcttcggctcgaaggtgcccggcacccagatggagatccgcgacgtcaacatggacttcgtgtacggcggggccttcaccgagtcctctcccgaggcctacgagcgcctcatcctcgacgtgctcctcggcgacccgccgctcttcccccgccacgaggaggtggagctgtcctggaggatcctcgatccgatcctcgagcactgggcccgccaggacgagcagcacaagagcaggcccgagcagtacgagtccggtggctggggcccggagtccgcgaatgcgatgctcgcccgcgacggacgggtgtggagacgaccatga

SEQ ID NO: 2211 - protein, 516 aa, Nocardioides sp. JS614
MTTPPGWHNPLRDPRDRRLPRIAGPSGMVLFGVTGDLSRKKIMPAIYDLANRGLLPPGFSLTGFARRDWADQDFAQIVHDSVKTHARTEFREEVWRQLAEGFRFVPGNFDDDMAFERLRRTIEELDEVRGTGGNHAFYLAIPPGFFADVVGQLQEHGLTEGRGDSWRRVVVEKPFGHDLESAQRLNSVLAEVFPSGSIFRIDHYLGKETVQNILALRFANEMFEPIWNSNYVDHVQITMAEDIGIGGRAGYYDGIGAARDVIQNHLLQLMALVAMEEPTSFDAESLRIEKQKVLSSVVLPRRLDLTTARGQYAAGWAGGEQVIGFLEEEGIKRTSTTETYAAVTLHVDTRRWAGVPFYLRTGKRLGRRVTEVAVVFRRAPHLPFAASSTEELTQNALVIRVQPDEGVTMRFGSKVPGTQMEIRDVNMDFVYGGAFTESSPEAYERLILDVLLGDPPLFPRHEEVELSWRILDPILEHWARQDEQHKSRPEQYESGGWGPESANAMLARDGRVWRRP

SEQ ID NO: 2212 - DNA, 1476 bp, Acidovorax sp. JS42
  CDS (1)..(1476): transl_table=11
atgagctttgatctggtcctcttcggcggcacgggcgacctcgcctggcgcaagctgctgcctgccttgttccaggcttttcgccacgggtcgctgccgccgcaggggcgcatcatcggcgtggcgcgcgacgcgctgagcgacggcgactaccgcgcgctgattgcccggcgctttgccgatgtggagggagaaaaacgccccagcgacgaagaattcgaacgctttgccgcgctgttgcagtaccagcgcatggatctgtcccagccagaggattacgccctgctggcgcagcgcctgcgcgagcgccacgccgacacggtggtgatgtacctggccaccgcgcccgcgctgttcaccaccgtctgcgagcagctcggcgctgccggcctggcgacgcccgccacccgcgtggtgctggaaaagcccctggggcacgatttggcttccaaccgtgccatcaacgccgcggtgcgcagcgtgttcgacgaacggcagatcttccgcatcgaccactacctgggcaagccctcggtgcagaacctgctggcgctgcgctttggcaacgcgctgttcgaacccctgtggcggcgcgagaccgtcgccagcatcgagatcaccatggccgagcagctgggcgtggagcagcgtggcgccttctacgaccagactggcgcgttgcgcgacatggtgcagaaccacgcgctgcagctgctgtgcgcgatcgccatggagccgcccatcaacgcccatgccgatgccatccgcgatgagaagctcaaggtgctgcgttcgctgagtacgtggactcccgccacgctgctgcgggacgtggtgcgcggccagtattccaccggcaccacggcctgcgagggcgtgcgcgcctatgccgacgaggacggcgtggcgcccggcagcaccaccgaaaccttcgtcgccctgcgcaccgagatcgccaattggcgctgggcgggcgtgccgttctacatccgcaccggcaagcgcctggccgcgcgcgaggcacacatcgccatcaacttccgccccacgccccacgccatctaccgcacgccgctgggcgcggccaaccgcctggtgatccacctgcagccgcgcgacggcgtggcgctgcacctgtttgccgcggggcaggaaaagcgcggcacgcgcatttccgaagcccaggcgctggcgcccgtgcagctggacctggacttcgaccagcgctttggcagccagcgcgtgggcgcgtacgagcggctgctgctggacgtgatcgccgggcgcctgaatctgttcgtgcgcgccgacgaacaggaagccgcctggcattgggtggaacccatcatgcaggcctgggccgagcaggacgcccgtggtgaaggcccacgcccgtatgccgctggcagctggggccccagcgccgccagcgcgctggtggcccgcgaaggacacacctggatggaagaatgctag

SEQ ID NO: 2213 - protein, 491 aa, Acidovorax sp. JS42
MSFDLVLFGGTGDLAWRKLLPALFQAFRHGSLPPQGRIIGVARDALSDGDYRALIARRFADVEGEKRPSDEEFERFAALLQYQRMDLSQPEDYALLAQRLRERHADTVVMYLATAPALFTTVCEQLGAAGLATPATRVVLEKPLGHDLASNRAINAAVRSVFDERQIFRIDHYLGKPSVQNLLALRFGNALFEPLWRRETVASIEITMAEQLGVEQRGAFYDQTGALRDMVQNHALQLLCAIAMEPPINAHADAIRDEKLKVLRSLSTWTPATLLRDVVRGQYSTGTTACEGVRAYADEDGVAPGSTTETFVALRTEIANWRWAGVPFYIRTGKRLAAREAHIAINFRPTPHAIYRTPLGAANRLVIHLQPRDGVALHLFAAGQEKRGTRISEAQALAPVQLDLDFDQRFGSQRVGAYERLLLDVIAGRLNLFVRADEQEAAWHWVEPIMQAWAEQDARGEGPRPYAAGSWGPSAASALVAREGHTWMEEC

SEQ ID NO: 2214 - DNA, 1377 bp, Nostoc punctiforme PCC 73102
  CDS (1)..(1377): transl_table=11
atggcagctttactctccgatgccctggtattttttgggatcacaagtgatttagcctacaaaaaaatctttcctgccttacaggcgatgattcaacgcggtcattttgacattccaattattggagtgggtaggcgagattggagcatcgaacaattacaatcttatgtgcgtaagagcctggaggaacaggccagcgttgatgaggcagctttccagaaactgtgttcattactttactatatttttggtgattatagcgatcgcgctacctatgataaattatgccaggtactccaaatagctgaagctcctctgtattacttagccattcctcccagtttgtttgcgacggttgtcgaagggttaggtcaatcaagttgtgtaaagaatggtcgcgttatggtagaaaaaccctttggacgcgatctagaatcggctagaatgctgaactgcattctgcactctatctttcccgaaagtcatatttttcggattgaccattacttgggaaaagaaccagtccaaaatcttctctacactcgcttcgccaattcattacttgaaccgatttggcatcgcgtcagtattgccagtatccaaatcacgatggctgaaaaatttggcatcgatgcacggggacagttttatgaagagacaggcgctattcgggatgtggtgcaaaatcatctacttcaagtgacggcgtgtttaatgatggatccgcccatcaacgagcagcatgaagccatccgagatgaaagagcgcgattgctcaaatccatagatccaatcgaaccctcaaatgtagtgcgtggacagtacaagggctatgcctcagaacctggtgtagctcctgattccaaagtcgaaaccttcgcggcggtcaagctcaacattgatacttggcgctgggctagcgttccgatttacattcgtgcaggcaaatgtttaccgagtacaactactgaagttgtggtcaggctcaagcgtccgccgcaggatgtttttggcgagcgtgcctttggattagcaaattatttctactttcgtcttagtccaaatgtgctgactgcgatcggcattcgctctaaaaccccaggcgacggaatggtgggtagcgaagtcggactagtcgctcaagttgagcatggcaatgagatgaatccctacgagcggctttttgaagatgccatgaaaggcgactccatgttatttgctcgccaggatgaagtagaagcacagtggcaaattgtcgctcctatcctagatcgagcaacccctgtttacgaatacgcacctcatacctgggggcctcctttagcggatcacatgattcccccagatggcggttggcataatcctaatgcgacgtga

SEQ ID NO: 2215 - protein, 458 aa, Nostoc punctiforme PCC 73102
MAALLSDALVFFGITSDLAYKKIFPALQAMIQRGHFDIPIIGVGRRDWSIEQLQSYVRKSLEEQASVDEAAFQKLCSLLYYIFGDYSDRATYDKLCQVLQIAEAPLYYLAIPPSLFATVVEGLGQSSCVKNGRVMVEKPFGRDLESARMLNCILHSIFPESHIFRIDHYLGKEPVQNLLYTRFANSLLEPIWHRVSIASIQITMAEKFGIDARGQFYEETGAIRDVVQNHLLQVTACLMMDPPINEQHEAIRDERARLLKSIDPIEPSNVVRGQYKGYASEPGVAPDSKVETFAAVKLNIDTWRWASVPIYIRAGKCLPSTTTEVVVRLKRPPQDVFGERAFGLANYFYFRLSPNVLTAIGIRSKTPGDGMVGSEVGLVAQVEHGNEMNPYERLFEDAMKGDSMLFARQDEVEAQWQIVAPILDRATPVYEYAPHTWGPPLADHMIPPDGGWHNPNAT

SEQ ID NO: 2216 - DNA, 1380 bp, Nostoc punctiforme PCC 73102
  CDS (1)..(1380): transl_table=11
atgggaactcctgattcagacgcactggtattttttggggcaacaggtgacttggcttacaagaaaatctttcccagccttcaggcaatggtacgacggggcaatctcaatgtcccagtaattggggttgccggacgaccttggacgacggatcaacttagggaaagggcacgtgatagcctagaacataatggtggtatagatcgagacgcatttgagaaactttctggtctactccagtacgttgctggtgactacaacaaaccagaaacttacgaaaaattacgtcaagcccttggtgataccactcatcccctctactatttggcaattccaccgagcctgtttgcacaagtagcgtcaggattgggtaaatcaggctgtgctaaaaatgcgcgggtggtaattgaaaaaccatttggacgggatttgaaatcggcacgtgagttaaatcaaattctggcatcggtttttcccgaatcatccatctatcgcattgaccattacctgggcaaggaaccactgctgaatttactctattttcggtttggcaactcttttctcgaacccatctggaatcgcaactatgttgaaagcatccaaattgtgatggcagaggactttggcattcaaggaaggggacgcttctatgaggagactggtgcaattcgggatgtggtggaaaaccacatgctgcaagtattggcttcagtgtgcatggatgctcccgctagtacggcggccgattccattcgagatgaaaaagcacgtattctcaaagctataccttcactgcaacccgatgatattattcgcggtcaattttctgattaccgcaacgaagaaggcgtttctcctgattctcaagtagaaacttttgttgccgtgcggttatttattaatacgtggcggtggtcaggagttcccatctacatccgggctggaaagaaattacctgttaaaactactgaggtgatggtcaagctcaagtgtccacctttagatgtgttccaggagggaggaaaagaaaacgctaattatgttcgttttttactagatccagaggtaattgtgggattgggcgctcgcactaaaatccctggagaagatatgagtggctctgcggttgaactcctggctttttacggaggtggcgacgagatggaaccctatgagcgtctattgggtgatgccatgcggggcgatcccaccttgtttgtacgagaagataccgtagaagaagaatggcggattgttcaaccaatccttgataacgtcacacccgtttacgagtatgagccaaatacatggggcccacctgagtcagataaactgctctcgccaatagatgattggtacaatcccttgggtagagagtag

SEQ ID NO: 2217 - protein, 459 aa, Nostoc punctiforme PCC 73102
MGTPDSDALVFFGATGDLAYKKIFPSLQAMVRRGNLNVPVIGVAGRPWTTDQLRERARDSLEHNGGIDRDAFEKLSGLLQYVAGDYNKPETYEKLRQALGDTTHPLYYLAIPPSLFAQVASGLGKSGCAKNARVVIEKPFGRDLKSARELNQILASVFPESSIYRIDHYLGKEPLLNLLYFRFGNSFLEPIWNRNYVESIQIVMAEDFGIQGRGRFYEETGAIRDVVENHMLQVLASVCMDAPASTAADSIRDEKARILKAIPSLQPDDIIRGQFSDYRNEEGVSPDSQVETFVAVRLFINTWRWSGVPIYIRAGKKLPVKTTEVMVKLKCPPLDVFQEGGKENANYVRFLLDPEVIVGLGARTKIPGEDMSGSAVELLAFYGGGDEMEPYERLLGDAMRGDPTLFVREDTVEEEWRIVQPILDNVTPVYEYEPNTWGPPESDKLLSPIDDWYNPLGRE

SEQ ID NO: 2218 - DNA, 1539 bp, Bifidobacterium longum DJO10A
  CDS (1)..(1539): transl_table=11
atgagtgaatcccccaattggagcaatcccctgcgcgactcgcgcgacctcagactgccccgtatcgccggcccatgcagcctcgtcattttcggtgtcacgggcgatctggcacaaaagaaactgctgccggccgtctacgacctggcgaaccgtggcctactgccgccgagcttcggtctgaccggcttcgcccgccgcgactggacacaggaacggttcatcgaattcgtcaaggccgccgtccaggcgcattgccgtacgccgttcaaggagtcaacttggcgcaatctggccgccggcatccgcttcgtgcagggtacgttcgacgacccggaggccttcgagcgtctgagcgccaccgtgcaggagcttgaccgcgaccgcggcacgcagggtaaccatgccttctacatgtcggtgccgccgcgcgccttcccacaggttgccaagcagttggccgcctccggcctgtcgcgctcgtccgagggcgcatggcgccgcgtgatcatcgagaagccgttcggccatgatctggccagtgccaaggaactcgacagcgtggtatccgaagtgttcgacccgagctccgtgttccgcatcgaccactacctcggcaaggaaaccgtgcagaacctgctggccctgcgtttcgccaacgccatgtacgagccgatctggaacgccaactatgtggaccacgtgcagatcacgatggccgaggacatcggcatcggcggccgcgccggctattacgacggcatcggcgccgcacgcgacgtcatccagaaccacctgcttcagctcatggctctgaccgccatggaggagccggtgagcttcaccgccaaggacctgaccgccgaaaagaccaaggtgctttccgccgtgcgcctgcccaaggacctcgctgccaacaccgcgcgcggccagtacgccaagggctggcagggctcgcacgaagtggtcggctacttggaggaaaaaggcatcgaccccaagagcaccactgaaacgtacgccgccatccgcctcgatatcgacacccgccgctgggctggcgtgccgttctacctgcgttgcggcaagcgcctcggcaagcgtgtaaccgaaatcgccgtggtgttcaagcgcgccccgcatctgccgttcgagcagaccgccgtgcgcgaactcggcaagaacgccatcgtgattcgcgtgcagcccgacgagggcgtcaccatgcgcttcggagccaaggtgccgggcggctccaccatggaggtccgtgacgtgaacatggacttcagctacggccgctccttcaccgagaactcgccggaagcctatgagcgactgattctggacgtgctgctcggtgatccgccgttgttcccgaccaccgaagaggtgaacctcagctgggagatcctcgatccgattgaacaattctggtccacgcttggccagccgcaggcctaccgcgccggtacgtggggtccggcacaggccgacgaaatgctggcgcgcgacggccgccactggaggatgccatga

SEQ ID NO: 2219 - protein, 512 aa, Bifidobacterium longum DJO10A
MSESPNWSNPLRDSRDLRLPRIAGPCSLVIFGVTGDLAQKKLLPAVYDLANRGLLPPSFGLTGFARRDWTQERFIEFVKAAVQAHCRTPFKESTWRNLAAGIRFVQGTFDDPEAFERLSATVQELDRDRGTQGNHAFYMSVPPRAFPQVAKQLAASGLSRSSEGAWRRVIIEKPFGHDLASAKELDSVVSEVFDPSSVFRIDHYLGKETVQNLLALRFANAMYEPIWNANYVDHVQITMAEDIGIGGRAGYYDGIGAARDVIQNHLLQLMALTAMEEPVSFTAKDLTAEKTKVLSAVRLPKDLAANTARGQYAKGWQGSHEVVGYLEEKGIDPKSTTETYAAIRLDIDTRRWAGVPFYLRCGKRLGKRVTEIAVVFKRAPHLPFEQTAVRELGKNAIVIRVQPDEGVTMRFGAKVPGGSTMEVRDVNMDFSYGRSFTENSPEAYERLILDVLLGDPPLFPTTEEVNLSWEILDPIEQFWSTLGQPQAYRAGTWGPAQADEMLARDGRHWRMP

SEQ ID NO: 2220 - DNA, 1605 bp, Crocosphaera watsonii WH 8501
  CDS (1)..(1605): transl_table=11
ttgtgtaatgacttaccttctccccataaagttctcggtaaactagagactattgaaggagccaaaaagaagcctatggtaacgctgttagaaaacccattccgcgttggactgcgccaagaaagaaccccagaacccttaatactcgtaatttttggagcatctggtgaccttacccaacgcaaactcgttcccgccctctacaagatgaaacaggaacgtagactgcccccagaattaaccgtggttggggttgcccgtagagattggagccacgactattttagagaaaaaatgcgggagggcatcgaagaattctccgacggcattaaaaatgaagaattatggaatgattttgccgaaggattgtactattgctccggcaatatggacgatactgaaagttatcaaaaattaaaagcctttttagaagaattagacgggaaacgaggcaccagaggcaaccgtgtcttctatctttccgtttctcctcagtttttccccccaggtatcaaacagttaggggccgccggaatgttgagcgatcccctgaaacaccggatcgttatcgagaaaccctttgggaaagacctcagttcggcacaagttcttaaccgtgttgtccagaatgtctgcaaagaagaacaggtttatcgtattgaccactacttaggtaaagaaaccgttcaaaacctgttagtgttccgctttgccaacgctatttttgaacccctctggaaccgtcaatttgtggatcacgtccaaattacggtagcggaaaccgtcggggtagaagatcgtgccggatactacgacacctctggtgccttgcgagatatgttgcaaaaccacttgatgcagctattctgtttaaccgcaatggaaccccccaatgcgttaaatgccgatagtatccgtaacgaaaaagttaaggtattacaagcaacccatctctttgacgttcataacctggaaaaatctgctattcggggacaatataaagcaggatggatgaaaggaaaacccgtcccaggctatttagaagaacccggtgtcggagaaaactcctctactcctacttatgtagccatgaaactgatggtagataactggcggtggaaaggggttcctttctacctgagaacaggaaaacgtctacccaaaaaagtaacagaaatttctatccagtttaaagatgtacccttactcatcttccagtcagcggcacatcaaaccaaccctaacgtcctcagtatgaggatacaacccaacgaaggtattgccctcaagtttgaagcgaaaatgccaggatctgaactaagaacccgttccgtggaaatggactttagctacggttcttcctttggtatggctagtgctgacgcttatcaccgtctcttattagatgccatgttaggggatcaaaccctatttacccgcgccgatgaagtagaagaagcttggcgtgtagttactcctgtgttatctgcctggaatggaccggccgaaccctatagcgtcccccaatacgaagctggaacctgggaacccaccgaggcggaatttttaatgaaccgtgatggccgtcgttggagacgtttataa

SEQ ID NO: 2221 - protein, 534 aa, Crocosphaera watsonii WH 8501
MCNDLPSPHKVLGKLETIEGAKKKPMVTLLENPFRVGLRQERTPEPLILVIFGASGDLTQRKLVPALYKMKQERRLPPELTVVGVARRDWSHDYFREKMREGIEEFSDGIKNEELWNDFAEGLYYCSGNMDDTESYQKLKAFLEELDGKRGTRGNRVFYLSVSPQFFPPGIKQLGAAGMLSDPLKHRIVIEKPFGKDLSSAQVLNRVVQNVCKEEQVYRIDHYLGKETVQNLLVFRFANAIFEPLWNRQFVDHVQITVAETVGVEDRAGYYDTSGALRDMLQNHLMQLFCLTAMEPPNALNADSIRNEKVKVLQATHLFDVHNLEKSAIRGQYKAGWMKGKPVPGYLEEPGVGENSSTPTYVAMKLMVDNWRWKGVPFYLRTGKRLPKKVTEISIQFKDVPLLIFQSAAHQTNPNVLSMRIQPNEGIALKFEAKMPGSELRTRSVEMDFSYGSSFGMASADAYHRLLLDAMLGDQTLFTRADEVEEAWRVVTPVLSAWNGPAEPYSVPQYEAGTWEPTEAEFLMNRDGRRWRRL

SEQ ID NO: 2222 - DNA, 1548 bp, Prosthecochloris aestuarii DSM 271
  CDS (1)..(1548): transl_table=11
atgcgctgttcagacgctaccgttcgcgctctcacgataatttttccgataaggtcgttgcagctcttcgtcatgagttcggtggccacggttttactcctaaatcctgactgtatggctcctgctgagagagaaatttcaaattttacgcttgtcctgttcggggcaaacggtgaccttgcgttaaggaagctgttcccttcaatgtatgaacttgcccgatgggggcagatgccggataaataccggattatcggtgtcggccgttctgatatcggtcacgatgggttccgcgagctggtccgggaggcaatggtcgctcatgcaccacatattgataccggttccggacatttcagtgattttattcagagtctgttctacgttcaggtcgatctgacaacggtcgagggctaccatcgtctcagggaagagatccggaccggtcatgggcgggaggggacttgcagtaatctgcttttttacctttcgactcccccgagtctggctccttttattgtccggtttctcgacgaggctggccttggcggcaaatcgccatcgtgccagggatggcggaaaatcattattgagaagccctatggtcacgatcttcagagtgcgcgtgaactcaatgtgattgtcggggaagtgtttcacgaggagcagatctatcgcatagatcattatctcggcaaggaaccggttcagaatatcctggtattccgcttttctaatggtatgttcgaaccgctctggaatcgtcattatatcgacaacgtcagcattaccatcgccgaagatttcggtatcagggggcgggggtcgttttatgaagaggccggactgcttcgcgatatcatccagaatcacggtctgcagcttctcgcctcggtggctatggagcctcctgtcgatctgagcgcagacgcagtcagagatgaaaaagagaaggtttttcgttcacttcgtcgcttcactgtcgagagtgccagagagcatgtcgtgcttggtcagtatgacggataccgtcaggaaaacaatgtggcttctgattcactggtcgaaacctttgcttccatacggttttttatcgataactggcgctggaaaggggttcctttttatatgaaggccggaaaaaatcttgccaggagcctgactgaaattgttatcaccttctcatgcccgcctcagaattttttcgggccgcctgaaagttgcagttataccgccaaccagatcgtcattcagatccagccggaacaaaccattgcgatccgtttcgggacaaagcgacccggtgaagcgctggttaccgacccggtgtttatgaaattcgattaccgcgcatcattcgaaaaggaggggatgacaccctatcaccgccttcttgtcgatgcgatggccggtgatcagatgcattttatccgtcaggactctgtcgagagcagctggtcggtgattgacagcatcaaatcgtctttgcagggaagcgtgccacagccctacgcggtgcattcctgggggcctgaaacaggtttctga

SEQ ID NO: 2223 - protein, 515 aa, Prosthecochloris aestuarii DSM 271
MRCSDATVRALTIIFPIRSLQLFVMSSVATVLLLNPDCMAPAEREISNFTLVLFGANGDLALRKLFPSMYELARWGQMPDKYRIIGVGRSDIGHDGFRELVREAMVAHAPHIDTGSGHFSDFIQSLFYVQVDLTTVEGYHRLREEIRTGHGREGTCSNLLFYLSTPPSLAPFIVRFLDEAGLGGKSPSCQGWRKIIIEKPYGHDLQSARELNVIVGEVFHEEQIYRIDHYLGKEPVQNILVFRFSNGMFEPLWNRHYIDNVSITIAEDFGIRGRGSFYEEAGLLRDIIQNHGLQLLASVAMEPPVDLSADAVRDEKEKVFRSLRRFTVESAREHVVLGQYDGYRQENNVASDSLVETFASIRFFIDNWRWKGVPFYMKAGKNLARSLTEIVITFSCPPQNFFGPPESCSYTANQIVIQIQPEQTIAIRFGTKRPGEALVTDPVFMKFDYRASFEKEGMTPYHRLLVDAMAGDQMHFIRQDSVESSWSVIDSIKSSLQGSVPQPYAVHSWGPETGF

SEQ ID NO: 2224 - DNA, 1503 bp, Xylella fastidiosa Ann-1
  CDS (1)..(1503): transl_table=11
atgttgctcacgcaaacaaaaacacccccacaccaaccaacgttaacatccgaatccgagaccaggtccatgcacaacaccctcttattgtttggcgccaccggcgacctcgcccaacgctatctcttcccctccttactgcaactgtttactgatggcttattgccacaagacttccgcattcgtgctctggccttgtcgccccataacaccacacaattccgcgacatcctgcgcccgcgcttggaacaagcactacccatcgccaacaccgcacacatccaagccctactacaacgtgtcgactacctttccgtagacttgaacgacccaacatcaatcgccgaagcagtccgagatctgacggaacatccctgcatcagctacttggcaatcccaccaggcctgtataccaacaccgccctaggattggcacaaggaggggcactgcagacaccacaccgattgatgctggaaaaaccgatcggacgcgactcaataaacgcacgcgaaatcctaaacaccatcggcacactgattgacgaagatcgcatcttccgcgtagaccactatctaggcaaagcagcagtgcagaacctcgtcgcactgcgcttcggaaacaccctgctagaagcggtatggaaccgaaaccacattgagtccgtacacatcctcatcgccgaaaccgaaggcgtcgatggccgcaatgcttactacgcacgtgctggcgcactacgcgacatgatgcaaagccacatcctgcaactcctatgcctggtcgccatggaacccccggcctctctggaagccgaccgcatacgcgacgaaaaagtcaaagtcctgcgcgcactacgcccactgaacgcccaaaacgccgcaatgcacagcgtgcgcggacgctacagcgcgggcaccattaacagccaaccagtgccagcctatcaaccaccggaaggcagcaatgtagagacctttgtcggtgtcaccgcatacatcgacaactggcgctgggcgggtgtaccgttccatctatgcacagggaaacgcttggccgaacgctcaacccagatcgtcgtcaccctcaaacccgtcacacactggctatttgaacgtccaaaccggaacaatgcagcaccaaaccgcctgtgcttcaaactacagccccaggaaaatatcgaactaaacctgatgagcagcctggccggtcccgaatggggaaccctagaactgcaaccgctggaattggagttatccgtcccgaccgggaaacatcgccacatcgcctatgagcgcctgttcctcgacgcattcaacggcaaccctgcgctatttgtacgtcacgacgaagtcacagccgcctgggcttggatcgacagcatcagcaatgcctgggaactgtccgacttaccactgcaaccctaccccgccggcggctggggcccacctcaagcccaccaatttctgccgccattggggattgatggccatggaaacaacgcatga

SEQ ID NO: 2225 - protein, 500 aa, Xylella fastidiosa Ann-1
MLLTQTKTPPHQPTLTSESETRSMHNTLLLFGATGDLAQRYLFPSLLQLFTDGLLPQDFRIRALALSPHNTTQFRDILRPRLEQALPIANTAHIQALLQRVDYLSVDLNDPTSIAEAVRDLTEHPCISYLAIPPGLYTNTALGLAQGGALQTPHRLMLEKPIGRDSINAREILNTIGTLIDEDRIFRVDHYLGKAAVQNLVALRFGNTLLEAVWNRNHIESVHILIAETEGVDGRNAYYARAGALRDMMQSHILQLLCLVAMEPPASLEADRIRDEKVKVLRALRPLNAQNAAMHSVRGRYSAGTINSQPVPAYQPPEGSNVETFVGVTAYIDNWRWAGVPFHLCTGKRLAERSTQIVVTLKPVTHWLFERPNRNNAAPNRLCFKLQPQENIELNLMSSLAGPEWGTLELQPLELELSVPTGKHRHIAYERLFLDAFNGNPALFVRHDEVTAAWAWIDSISNAWELSDLPLQPYPAGGWGPPQAHQFLPPLGIDGHGNNA

SEQ ID NO: 2226 - DNA, 1488 bp, Streptococcus suis 89/1591
  CDS (1)..(1488): transl_table=11
atgtcatcacatgtattgtttacaatttttggtgctagtggcgaccttgccaaacgcaaactttacccatctttatttcgcctctataaggctggacacatcaaggaaaactttgcagtaattggtacagctcgcagaccctggaccaaggaattttttgagcaaaccgtcattgaatcactaggtgatctgcctgacacaccacgtcaagctcatgaatttgcaagtcatttctactaccaaagccacgatgtcaatgacacggaacattatgtagctcttcgtaaattgcaggacgacttgtgtgaaaaatacaatacccagcacaacaaggtcttcttcctctctatggcgcctgaatttttcggaaccattgccaaacacctcaaatctgagcaaatcgttgatggacaaggttttgagcgtttgattatcgaaaaacctttcggaacaagccttgaaactgcaagcaaactcaatgatgaattagccgctgccttcaatgaagaccaaatctaccgtatcgaccattacctaggcaaggaaatggtacaaaatatctttgcggttcgctttgccaatattatttttgagcatatttggaaccgcgattacatcgataacgtccaaattacatttgctgaagcgattggtgttgaggatcgtgggggctactacgatcattctggcgccttaaaagacatggtgcaaaaccatgcccttcaagtcctatcccttctagcaatggataagccagccagcttcaaagaggaagatgtccgcgctgaaaagattaaggtcttccaacaccttcgtcagccttctgatgaggacctcaaacgcaacttcatccgtggtcaatatgcagcaggttccatcgacggaaaagactacgttagctacttggatgaaccaaatattgccgaaggttctcagacagaaacctttgcaggaggtgtcttcttcgttgatactgaccgtttccgtgatgtacctttcttcttccgtacaggtaaacgtctgacagaaaagggcacgcgcgtgaccatcaccttcaagcatgcggaagatatttttggtcagccttctgaggccaatgtattgaccatcttcatccagccaacagaaggcttcatgctctctatcaacggcaaggaagttggttcccactttgctcttactcctgccaaactcaacttccgccacaatgcaactgctcttggaaattcacccgaagcctacgaaaaactatttttcgatgtcttgaacggcgactctaccaactttagccattgggaagaagtgaaagcaagctggagcttgattgaccgcattgttgatttgtgggcaagcaaccaagtcccactccacacctatccagctggaactatgggacctgaggcaacctttgatttgctagaaagctacggttgcaagtgggtttggacaccagatgtatggtatcgtgaacgtggcttattgaaatag

SEQ ID NO: 2227 - protein, 495 aa, Streptococcus suis 89/1591
MSSHVLFTIFGASGDLAKRKLYPSLFRLYKAGHIKENFAVIGTARRPWTKEFFEQTVIESLGDLPDTPRQAHEFASHFYYQSHDVNDTEHYVALRKLQDDLCEKYNTQHNKVFFLSMAPEFFGTIAKHLKSEQIVDGQGFERLIIEKPFGTSLETASKLNDELAAAFNEDQIYRIDHYLGKEMVQNIFAVRFANIIFEHIWNRDYIDNVQITFAEAIGVEDRGGYYDHSGALKDMVQNHALQVLSLLAMDKPASFKEEDVRAEKIKVFQHLRQPSDEDLKRNFIRGQYAAGSIDGKDYVSYLDEPNIAEGSQTETFAGGVFFVDTDRFRDVPFFFRTGKRLTEKGTRVTITFKHAEDIFGQPSEANVLTIFIQPTEGFMLSINGKEVGSHFALTPAKLNFRHNATALGNSPEAYEKLFFDVLNGDSTNFSHWEEVKASWSLIDRIVDLWASNQVPLHTYPAGTMGPEATFDLLESYGCKWVWTPDVWYRERGLLK

SEQ ID NO: 2228 - DNA, 1470 bp, Sulfitobacter sp. EE-36
  CDS (1)..(1470): transl_table=11
atggtatcacgcgtcattccggtcgatccttttgatctggtgattttcggcggcacaggcgatctggcgcgccgcaagatcctgccgggcttgttccggcgcttttgcgcagggcagatgcccgaaaacgcccgtgtcatcggtgccgcgcgcacagaaatggaccgcgcgggctaccagcagatgatccgcgaggcgattgccgaattcaacggcgacttcgggcacgagaaggcgcagctggacgggttcatcgaccggctggaatatgtcgcgatcgacgcgaaaggcgaggacggctgggccgagttgcaaaagctcatggccgggaccgaacgggtagaggcctattatttctctgtctcgcccgcgttgttcggtgatctggcggaacgtctgcaacaatggggcatggctgacgcgcaaagccggatcgtcgtcgaaaagccctttggccgcgacctgaaaaccgcgcaggcgctcaacgccacgctcgccaagtatttcgacgaaagccagatctaccggatcgaccactatctaggcaaagagacagtgcaaaacctgatggctgtgcggtttggcaacatgctgttcgagccgctgtggaacagccaatatgtcgatcacatccagatcaccgtggctgaaaccgtcggcgtcgggggcaggggcgaatattacgacaaatcgggtgccatgcgcgatatggtgcaaaaccacctgatgcagcttttgtgcctgatcgcgatggagccgcccgcgcggtttgaccccgacgcggtacgcgatgaaaagctcaaggtgatccgcgcgcttgaccctgtgctgccgcatcatatcgcccgcggtcaatatcaagcggaaccgtgcaacgaggccgaacaacccggttaccgtaccgctgtgggggatccacgctcgcgcaccgaaagcttcgtcgcgctgaaaacccacatcagtaactggcggtgggctggcacgcctttttatctacgtaccggcaaacgcatggcggcgcggtcctccgagatcacggtcgtcttcaaggaaacaccccattcgatttttgccgaagacgcaggccgccaccgcaatgttctgtcgatccgtttgcagccgaacgaaggcatcacccttggcgtgacgatcaaggaaccgggcccgggcggcatgcgtttggtggacgtgcccttggacatgacattcgccgacgctttggggcctgaaggctccgaacaggtagacgcctatgaacgtctgatcatggacgtgatccgtggcaaccagaccctgttcatgcgcggcgacgaggtagaggccgcttgggcctggaccgacccgatcatccagggctgggaagcgcgcaatgacgtgcccaaaccctacgacagcgggtctgacggcccgacagatgccaacgaactgatgcgccgtgaccagcgccaatggcgggagtattctgcatga

SEQ ID NO: 2229 - protein, 489 aa, Sulfitobacter sp. EE-36
MVSRVIPVDPFDLVIFGGTGDLARRKILPGLFRRFCAGQMPENARVIGAARTEMDRAGYQQMIREAIAEFNGDFGHEKAQLDGFIDRLEYVAIDAKGEDGWAELQKLMAGTERVEAYYFSVSPALFGDLAERLQQWGMADAQSRIVVEKPFGRDLKTAQALNATLAKYFDESQIYRIDHYLGKETVQNLMAVRFGNMLFEPLWNSQYVDHIQITVAETVGVGGRGEYYDKSGAMRDMVQNHLMQLLCLIAMEPPARFDPDAVRDEKLKVIRALDPVLPHHIARGQYQAEPCNEAEQPGYRTAVGDPRSRTESFVALKTHISNWRWAGTPFYLRTGKRMAARSSEITVVFKETPHSIFAEDAGRHRNVLSIRLQPNEGITLGVTIKEPGPGGMRLVDVPLDMTFADALGPEGSEQVDAYERLIMDVIRGNQTLFMRGDEVEAAWAWTDPIIQGWEARNDVPKPYDSGSDGPTDANELMRRDQRQWREYSA

SEQ ID NO: 2230 - DNA, 1455 bp, Roseovarius nubinhibens ISM
  CDS (1)..(1455): transl_table=11
atggtttcacgcgtcatcccagtcgaggctttcgacctggtgatcatcgggggcacgggcgatcttgcccggcgcaagatcctgcctgcgctctatcagcggttcaacgcgggtcagatcggcaagaagagccagatcatcggcgcggcgcggggcgagatgaccagcgaggcttaccgcgcttttgccgaggaggcgatccgcgagtttctcgacaagagcgatgtgaaggtgcgcgcgctcaaatcctttctcaagttgctgagctatgtcacgcttgacgccaagggcgagaccggctgggaggaactggccggcaagatgcatagcgaccgcatccgggcgatctatttctcggtggggccgagcctctttggcgatctggccaagcggttgcacaagcatgggatggcgggcgaaggcacgcggctggtggtggaaaagccctttggccgcgatctggcctcggccaaggagctcaaccagatgctggcgcggcatttcgacgagagccagatttaccggatcgaccattatctcggcaaggagacggtgcagaacctgatggcggtgcggtttggcaatatgctcttcgagccgctgtggaacagccaatatgtcgatcacatccagatcaccgtggccgagagtgtcggggtcggcacgcggggcggctattacgaccggtcgggggcgatgcgggatatggtgcagaaccatctcatgcagcttctgtgtctcatcgcgatggagccgccggccaagttcgacccggatgcggtgcgcgacgaaaagctcaaggtgatccgggcgctcgatcctgtagagcccgacaatatcgtgcgcggtcaatatgagggcgatggcgagcggccgggctatcgcaaccaggtggagagccgcgacagcaccaccgagacctttgtcgcgctcaaggcgcatatcagcaattggcgctgggccgggacgccgttttacctgcgcaccggcaagcggctcaaggatcgggcgagcgagattgccatcatcttcaaggacgcgccgcattcgattttcgaagaggatgggcagcgccataacaatatcctgacgatccggctgcagcccaatgaggggatcgagcttggcgtgacgatcaaggaaccggggccggggggaatgcgtcttgtggatgtgccgctcgacatgagtttcgcggaggtgctcgggcccgatgaggcggatttcccggatgcctatgagcggctgatcatggatgtgatccggggcaaccagacgctgttcatgcgcggcgacgaggtcgaggcggcctgggcctggaccgatccgatcatcgcggagtgggacgggtcggggcaggcgcccgaaccctatgcgccgggcagttccggaccggagagcgccatgttcctgatgcatcgggacgggcgccgttggcgggagataaagccatga

SEQ ID NO: 2231 - protein, 484 aa, Roseovarius nubinhibens ISM
MVSRVIPVEAFDLVIIGGTGDLARRKILPALYQRFNAGQIGKKSQIIGAARGEMTSEAYRAFAEEAIREFLDKSDVKVRALKSFLKLLSYVTLDAKGETGWEELAGKMHSDRIRAIYFSVGPSLFGDLAKRLHKHGMAGEGTRLVVEKPFGRDLASAKELNQMLARHFDESQIYRIDHYLGKETVQNLMAVRFGNMLFEPLWNSQYVDHIQITVAESVGVGTRGGYYDRSGAMRDMVQNHLMQLLCLIAMEPPAKFDPDAVRDEKLKVIRALDPVEPDNIVRGQYEGDGERPGYRNQVESRDSTTETFVALKAHISNWRWAGTPFYLRTGKRLKDRASEIAIIFKDAPHSIFEEDGQRHNNILTIRLQPNEGIELGVTIKEPGPGGMRLVDVPLDMSFAEVLGPDEADFPDAYERLIMDVIRGNQTLFMRGDEVEAAWAWTDPIIAEWDGSGQAPEPYAPGSSGPESAMFLMHRDGRRWREIKP

SEQ ID NO: 2232 - DNA, 1458 bp, Oceanicola batsensis HTCC2597
  CDS (1)..(1458): transl_table=11
atggtatcccgcgttattccagtcgaaccctttgatctcgttatattcggcggcaccggcgatctcgcgcgccgcaagatcctgccggcgctgttccgccgcttctgctcgggccagatgggagaggaatcgcgcatcatcggcgccgcccgctccgaccacaccgccggagagttccgccagatggtcagcgaggccatcgaggagttcaacacgacgacgcagtgcgaggggggcacgctcgacgcctttctcgagcgcatcgactatgtccatgtcgatgcgaggggagaggaggggtggcagaccctctcggatatgatgatccccggccgggtccgcgccttctacttttccgtggcgcccagcctcttcggcgatctcgccgagcgtctgcacgcccatggcatggccgacagcgacagccgcatcgtggtcgagaaacccttcgggcgcgatctcgagaccgcccgggcgctgaacgaaacgctggcccgccacttcgacgaaagccagatctaccggatcgaccactatctcggaaaggagacggtccagaacctgatggccgtccgcttcggcaatatgctgttcgagccgctgtggaactcgcaatacgtcgaccacatccagatcaccgtggccgaaaccgtgggcgtcgggggccggggcgagtattacgaccgctcgggcgcgatgcgcgacatggtacagaaccacctgatgcagcttctctgcctgatcgcgatggaaccgcccgccaagttcgaccccgacgccgtgcgcgacgaaaagctcaaggtgatccgcgcgctcgacccggtcgagacgggcaatatcgtgcgcggacagtacggaccggaacgcaagggcgggccggattacctcgacgatgtcgagaacccgcgcgccaccagcgaaagcttcatcgcgatgcgcaccaccatctcgaattggaggtgggcggggacgcccttctacctccgcacaggcaagaagctgaaggcgcgcgccagcgagatcgcggtgatcttcaaggaaaccccgcattccatcttcggtcccgaggccgggcggcaccgcaacatcctgacgatccggcttcagccgaacgagggcatggatctcgacgtcacgatcaaggaaccgggcccggggggaatgcggctggtcgacgtgccgctggacatgaccttcgctgaggcgctcggccccgatggcgaggacgtgccggatgcctatgaacggctgatcatggacgtcatccgcggcaaccagacgcttttcatgcgcggcgacgaggtcgaggccgcctgggcctggaccgatcccatcatcgaggggtgggaaagccgcggcgacaggcccgtcacctacgaacccggttcgtccggccccgaggacgccctggcccttgtgcatcgcgacgggcgccgctggcgggagatccgggcatga

SEQ ID NO: 2233 - protein, 485 aa, Oceanicola batsensis HTCC2597
MVSRVIPVEPFDLVIFGGTGDLARRKILPALFRRFCSGQMGEESRIIGAARSDHTAGEFRQMVSEAIEEFNTTTQCEGGTLDAFLERIDYVHVDARGEEGWQTLSDMMIPGRVRAFYFSVAPSLFGDLAERLHAHGMADSDSRIVVEKPFGRDLETARALNETLARHFDESQIYRIDHYLGKETVQNLMAVRFGNMLFEPLWNSQYVDHIQITVAETVGVGGRGEYYDRSGAMRDMVQNHLMQLLCLIAMEPPAKFDPDAVRDEKLKVIRALDPVETGNIVRGQYGPERKGGPDYLDDVENPRATSESFIAMRTTISNWRWAGTPFYLRTGKKLKARASEIAVIFKETPHSIFGPEAGRHRNILTIRLQPNEGMDLDVTIKEPGPGGMRLVDVPLDMTFAEALGPDGEDVPDAYERLIMDVIRGNQTLFMRGDEVEAAWAWTDPIIEGWESRGDRPVTYEPGSSGPEDALALVHRDGRRWREIRA

SEQ ID NO: 2234 - DNA, 1524 bp, Synechococcus sp. RS9917
  CDS (1)..(1524): transl_table=11
atgagcgcaacgatcacgaacccgctgcgggtcggcctgcgtcaggaacgggtcatcgccccccagtgcctgatcatctttggcgccagcggtgacctgacccaccgcaagctggtgccggccctgttcgaactgttccagcaacggcgtcttcccagcgaattcgccctgctcggctgtgcccgccgcccctggagcgacgaggagttccgccagaagatggcggaggccatgggcgcgaaagtcagcgacaaccggatggcctgggaccagttctcagccggcatgttttatgaaccggtcgacctgcagcagccggaggatctggtgaagctggggcatcgcctccaggagatcgatcggttgcgggcgacgcggagcaaccgcaccttttacctctcggtatcaccgaagttttacggcagcggctgccgcgccctggcggatgccgggctgctcaaggatccggatcgcagtcgcgtcgtgatcgagaagcccttcggccgcgactacagcagcgcccaggcgctcaacaaggtggtgcaggcctgcggccaggagaagcagatcttccgcatcgaccactacctgggcaaggagacggtgcagaacatcatggtgctgcgcttcgccaacaccatcttcgaaccgatctggaatcggaattacatctccagcgttcagatcaccgccgccgaaacggtgggggtggaggagcgggccgggtactacgagacctccggcgccctgcgcgacatggtgcagaaccacctcacccagatgctggcgatcaccgccatggaaaccccgggtcggtttgacccggaggcgatccgcagcgagaaggcgaaggtgctgcaggccgctcgcctcgccgacgaacaggaaccctggaactgctgcattcgtggtcagtacggaccgggcggcagccaggtcgctcccctggccggctaccgccaggaacctggcgtggatccgaacagcaccacggagacctacgtggcgatgaagctgttcatcgacaactggcgctggcagggggttcccttctacgtgcgcacgggcaaacgcctgcccaaacggctgagcgaagtggtgctcaccttccgggaggccccggtgcatctctttgatgccgccggtggcagccccacagccaatcagctgatcctgcgcatccagccggatgagggggcggaattccgcttcgatgtgaaatcccccggctcaggcatgcgcagccgtccggtggagatggagttctcctacgacgaatccttcggtgaaccctccgatgagggctacgtccgtctgctggccgacgcgatgctcggcgatcccaccctgttcacccgcagcgatgaggtggaagcagcctggcggctgtacacccccctgctggaactgattgaagacagtccctggcagctcccgatccatccctacgaatcgcgcacctggggaccggccgcatcggatgccctgctggcccgcgacggtctgctctggcgccgcccctga

SEQ ID NO: 2235 - protein, 507 aa, Synechococcus sp. RS9917
MSATITNPLRVGLRQERVIAPQCLIIFGASGDLTHRKLVPALFELFQQRRLPSEFALLGCARRPWSDEEFRQKMAEAMGAKVSDNRMAWDQFSAGMFYEPVDLQQPEDLVKLGHRLQEIDRLRATRSNRTFYLSVSPKFYGSGCRALADAGLLKDPDRSRVVIEKPFGRDYSSAQALNKVVQACGQEKQIFRIDHYLGKETVQNIMVLRFANTIFEPIWNRNYISSVQITAAETVGVEERAGYYETSGALRDMVQNHLTQMLAITAMETPGRFDPEAIRSEKAKVLQAARLADEQEPWNCCIRGQYGPGGSQVAPLAGYRQEPGVDPNSTTETYVAMKLFIDNWRWQGVPFYVRTGKRLPKRLSEVVLTFREAPVHLFDAAGGSPTANQLILRIQPDEGAEFRFDVKSPGSGMRSRPVEMEFSYDESFGEPSDEGYVRLLADAMLGDPTLFTRSDEVEAAWRLYTPLLELIEDSPWQLPIHPYESRTWGPAASDALLARDGLLWRRP

SEQ ID NO: 2236 - DNA, 1470 bp, Pseudoalteromonas tunicata D2
  CDS (1)..(1470): transl_table=11
atgctaaacccatttgatattattatttttggtggtggtggtgatttatcactacgtaaactcctaccggcatggtatcgcgcttatcaagaaggtaatttgcctgctggtagtcgtattatgccaacagtaagagaattagctgatcgagccgaatttattgaaaaagtagacaacgccttgcaagcccatttaagcactggcgaatataacaaaaaagattgggctgtatttgcagagtttattcatccgatagcgattaatgttacagagattgatgaaaactggactttattaaaagaacgtcttgaagccgaagcctcagatcgttcgcgggtgttttatttatctttaccgccagctgtttacggtcgttgttgtgagttgttgtcgcagatggagcttattactgaaacttcgcgtgtcgtggtggaaaagccaatcggttactgcggtgcttctgctgaagaaattaactctcaagtggctctgtattttaaagaagagcaaattttccgtattgaccattatttaggtaaagagacagtacaaaatttaatggcattgcgtttttcgaacgtattgtttgagaatttatgggatgctaaaacgattgataatattcaaattagtatttcagaaaccgttggtttagaaactcgtgctggtttttatgacaaagcaggtgcactgcgagacatggtgcaaaaccacttattacaacttttatgtttagttgcgatggaatcgccgcataaattgaatgcgaatagtattcgagctgaaaaattaaaagtacttgaagcgctacgccctatagtaggtaaagaagttaaagagaacattgtgcgtgggcaatatgtacctggaacaatgaatggtaaagtggtacctggttatttagaagaattaggtgataactccaccacagaaacctttgttgctattcgcgctcacattgataactggcgttgggcaggtgtgccattttatttaagaacgggcaagcgtttgaaaaagcgttgcgctgagattgtggttgaatataaatcggtttcacataatgtttatgagcaaaatgtcggtccaattcaacctaatcgtctggtgatccaaattcaaccagaagaaagtattcaactaactttgatgtcaaaacgtcttgatagtctagaaatgcaacttgaacctgtaacgttaaacatcgaattagcggaagattataataataactatcaaggtgatgcttataagcgtttaatgcttgatgcagcagccaataatcctgcgttatttattcatcgtgacgaagttcgtcaagcgtggaagtggattgatcctattgttgaacaatggcaaaaatcaggtgttccagcgctttatcgagctggttcttggggcccaattgatgctgatgagttattagctgagcgaaatcatacttggtacaacgcaggagataatgtttaa

SEQ ID NO: 2237 - protein, 489 aa, Pseudoalteromonas tunicata D2
MLNPFDIIIFGGGGDLSLRKLLPAWYRAYQEGNLPAGSRIMPTVRELADRAEFIEKVDNALQAHLSTGEYNKKDWAVFAEFIHPIAINVTEIDENWTLLKERLEAEASDRSRVFYLSLPPAVYGRCCELLSQMELITETSRVVVEKPIGYCGASAEEINSQVALYFKEEQIFRIDHYLGKETVQNLMALRFSNVLFENLWDAKTIDNIQISISETVGLETRAGFYDKAGALRDMVQNHLLQLLCLVAMESPHKLNANSIRAEKLKVLEALRPIVGKEVKENIVRGQYVPGTMNGKVVPGYLEELGDNSTTETFVAIRAHIDNWRWAGVPFYLRTGKRLKKRCAEIVVEYKSVSHNVYEQNVGPIQPNRLVIQIQPEESIQLTLMSKRLDSLEMQLEPVTLNIELAEDYNNNYQGDAYKRLMLDAAANNPALFIHRDEVRQAWKWIDPIVEQWQKSGVPALYRAGSWGPIDADELLAERNHTWYNAGDNV

SEQ ID NO: 2238 - DNA, 1500 bp, Photobacterium sp. SKA34
  CDS (1)..(1500): transl_table=11
atggttcaaccagaaaataactcaattgtaatttttggtgcgtcaggcgacttgacacaccgaaagttaatacctgcgttttatcacctttatgctaatggtttattgcctgaagattttgcaattctaggggtaagtcgtacatcatatagcgatcaagaatttcgtgataagttaaagcaatctttgacagaaaatgaaaaaatcgatgaagaaacattggttaacttttgtcagcacctttactaccaagcattaaatacgtctgataaagatgaatatgcagtattgaaagaacgcttagacacattcaaagaaacgcataatacccaaggtaatgccgttttctacctcgcgacaccaccaagcctttacggcgtgatccctgaatgtctagccgcgcatggcctaaatgatgaaactgaaggttggaaaaacctgattgttgaaaaaccatttggttatgatctagagtcagcgatctcattagacaagcaaattcatgcttgtttccaagaacatcaaatctaccgtatcgatcactacctaggcaaagaaacggtgcaaaatcttcttgtattccgctttgcaaacggcatgtttgagccgctttggaatcgtaactttattgattacgttgaaatcactgcgtctgaatcattaggcgttgaagatcgtggtggctactatgacggtgcaggtgctgttcgagatatgttccaaaaccatttgctgcaagtattagcaatggtcggtatggaatctcctgctgcaattaatgctgattctatccgtgatgaagtggttaaagtgatgcaaagctttaaaccattatcagaagatgatcttaaaaataacttagtgttgggtcagtacactgaatcagatgctcgtggtaagcatttcttaggttatcgccaagaaccaggtgtagcagaagactctcgtactgaaacttacgttggtatgaagatgtttattcaaaactggcgttggaatggtgtgccattctacgttcgtacaggtaaacgactaccaacgcgtgtgacggaagtggttatccactttaagaaaacaccgcacccagtctttggtgaaaatgcacctgagaacaagttgattatccgtattcagcctgatgaagggattctaatgagcttcggtcttaaaaaaccgggggcaggttttgaatctcaagaagtatcaatggatttccattacgacaagcttgaagaaactaatatgctaacggcatacgaacgcttacttcttgactgtatgaagcaagatgcaactttgtttgcacgtacagatgctgttcgcgcttgttggaaattcgttcaaccaattcttgaatacaaagaaaacccagagcacttatttggttatgccgcaggtacgtggggaccaaaacaagctgatgacttacttgcatcaagtaatcgtgagtggcgttttccttgtaagaatttagcaaacactgactattgtgagctataa

SEQ ID NO: 2239 - protein, 499 aa, Photobacterium sp. SKA34
MVQPENNSIVIFGASGDLTHRKLIPAFYHLYANGLLPEDFAILGVSRTSYSDQEFRDKLKQSLTENEKIDEETLVNFCQHLYYQALNTSDKDEYAVLKERLDTFKETHNTQGNAVFYLATPPSLYGVIPECLAAHGLNDETEGWKNLIVEKPFGYDLESAISLDKQIHACFQEHQIYRIDHYLGKETVQNLLVFRFANGMFEPLWNRNFIDYVEITASESLGVEDRGGYYDGAGAVRDMFQNHLLQVLAMVGMESPAAINADSIRDEVVKVMQSFKPLSEDDLKNNLVLGQYTESDARGKHFLGYRQEPGVAEDSRTETYVGMKMFIQNWRWNGVPFYVRTGKRLPTRVTEVVIHFKKTPHPVFGENAPENKLIIRIQPDEGILMSFGLKKPGAGFESQEVSMDFHYDKLEETNMLTAYERLLLDCMKQDATLFARTDAVRACWKFVQPILEYKENPEHLFGYAAGTWGPKQADDLLASSNREWRFPCKNLANTDYCEL

SEQ ID NO: 2240 - DNA, 1563 bp, delta proteobacterium MLMS-1
  CDS (1)..(1563): transl_table=11
atgattgagaaccgggaaaatcctgagcggcggtcggacgatgcgggggactgcaccttgcttaatggggccgatctgccctcctgcaccatcgtgatcttcggggcatctggcgaccttaccgctcgtaagctgattcccgccctgcagaatcttttccgccagggctgtttgccaccccggtggaatatcgtgggctgcggccgcagccccatggaccatgaagagttccgccagagcctggtcgcgttccatgagcaggccaatcccgatgccgaggagtggcggcgggattggccccaattcgccgccaatattttctatcaggagctgagctacgaccgggccgaggattaccgggctctggccaccctccttgaccgcctggatcgagagcgcggcagcgcccccaaccgggtcttctacctggcggtgcccccggccctctatcccctgatcggcgaacaactgggggcggccgggctggcgacggcggccgataactgctggtcccggatcgtggtggaaaaaccattcggccatgatctgccctcggcggtggccctggacggggtgttgcacggcagcttcaccgagcagcagatcttccggatcgaccactacctggccaaggagacggtgcagaatatcctgatgctccgctttgccaacaccatcttcgagcccctctggaaccgcagctatatcgactatgtgggaattatcagctctgaaaagctgggggtggagcaccgagccgggttttacgagagcgccggggtgctgcgcgacatgttccagaatcacatgatgcaactgctggccctgaccgccatggaaccgccctcccgcttcgaggccgcccaggtccaggatgaaaaggtaaagatcttccgggccctcaagcccttcgaccgggccaacctggcggctcatctggttctaggccagtacgggcccggcacaatcgacggcaggccggtggcgggttatcggcaggagcccgaggtggcggccgactccgccacccccacctttgccgccatgaaactgctgatcgataactggcgttggcggggagtccccttctacctggtctccggcaaacggatgccggccaaggagacccggatcgtgattcagttcaaggaggtgccccactccatgtttcgccgggagctggccgccagtatcatggccaaccgcctggtgctggggatccatcccgaggagaagatctccctcaacttccaggccaaaaaccccggcaccaaggagtgcctgcaaccggtgaccatggatttcaactatgaacggcgccaaagcccacatccccacttcgatgcctacgagatggtgctgctcgactgtatcctgggcgaccacatgctcttctggcgccaggacgggatcgaactctcctggtccttcctcgatccgatcctgcgggcctgtgaagagtgcaacaacccggaaaagctgctgcaaagctacccggccggcagccccggccccgaagcggcccacccctggctgcggctcttaaacgattttaatgggtaa

SEQ ID NO: 2241 - protein, 520 aa, delta proteobacterium MLMS-1
MIENRENPERRSDDAGDCTLLNGADLPSCTIVIFGASGDLTARKLIPALQNLFRQGCLPPRWNIVGCGRSPMDHEEFRQSLVAFHEQANPDAEEWRRDWPQFAANIFYQELSYDRAEDYRALATLLDRLDRERGSAPNRVFYLAVPPALYPLIGEQLGAAGLATAADNCWSRIVVEKPFGHDLPSAVALDGVLHGSFTEQQIFRIDHYLAKETVQNILMLRFANTIFEPLWNRSYIDYVGIISSEKLGVEHRAGFYESAGVLRDMFQNHMMQLLALTAMEPPSRFEAAQVQDEKVKIFRALKPFDRANLAAHLVLGQYGPGTIDGRPVAGYRQEPEVAADSATPTFAAMKLLIDNWRWRGVPFYLVSGKRMPAKETRIVIQFKEVPHSMFRRELAASIMANRLVLGIHPEEKISLNFQAKNPGTKECLQPVTMDFNYERRQSPHPHFDAYEMVLLDCILGDHMLFWRQDGIELSWSFLDPILRACEECNNPEKLLQSYPAGSPGPEAAHPWLRLLNDFNG

SEQ ID NO: 2242 - DNA, 1473 bp, Alteromonadales bacterium TW-7
  CDS (1)..(1473): transl_table=11
atgcttaatccttttgatatcataatttttgggggcggtggtgatcttgcgttacgcaaattactacctgcaatgtacagagcatatcaagaagggaacctacctgaaggctcacgcatcctgccaacagttcgtgaagaaagcaaacgtgccgaatacattgaaacagcgcacaaagcactgcaagagtttttaagtaaaggtgaatttaacgccaaagattggaaagcattttctacttatttagtgccagtggtgagtaatgttactgaagctgacgataactgggatgtacttaaagagatcttagatgagcacgatagcactaaatctcgcgtgttttacttatctttgccaccagccgtttatggcaagtgttgtgaaattctttctacaaaaaatttgattacgccaacatcgcgtgtagtagtagaaaaaccaatcggttactgtggtgaatctgcagaagcaataaacgctaaaattgctgaattttttgaagaagaccaaattttccgtatagaccattacttaggtaaagaaacagtacaaaacctaatggcactgcgtttttcaaattcattatttgaaaacatgtgggatgctaaatcgattgataatattcaaattagtctttctgaaaccgtaggccttgagagcagagctgggttttacgacaaagccggtgcacttcgtgatatggttcaaaatcacttattacagcttttgtgccttgttgcaatggaagcacctaataagcttaatgctaatagtattcgtaacgaaaaactaaaagtactcgaagcgcttcgtccactttttgattcagatgttgatagcaacatagtacgcggccaatatgtaccgggcgatttaaacggaaaaatagttcctggctacctagaagagctaaacgaaggcgctagtaaaacagaaacctttgttgctattcgtgcacacattgataattggcgctgggctggcgtaccattttaccttcgtacaggtaaacgcatggcaaaacgttgtgctgaaatagtggttgagtacaaaaaagtatcgcacaatatttatgaagaaaatgttggcaacattgaaccaaaccgcttagttattcgtcttcagcctgaagaaacgatacagctaacgcttatgtcaaaacgtttggataaccttgaaatgcaattagagccggtaacgatgaacattgagttatcacaagcttacagtaacggtttccattctgatgcatataaacgtttaatgcttgatgcggctgcaaataacccatcattgtttattcaccgtgatgaggttcgtcaagcatggaaatggattgacccgattgttgagcgttggcaagaaaaaggtaagcctgcactttaccgcgccggtacgtgggggcctgatgatgccgatgaactattagcagaaaacaaccatgtgtggtttaacacaggtgataaggcataa

SEQ ID NO: 2243 - protein, 490 aa, Alteromonadales bacterium TW-7
MLNPFDIIIFGGGGDLALRKLLPAMYRAYQEGNLPEGSRILPTVREESKRAEYIETAHKALQEFLSKGEFNAKDWKAFSTYLVPVVSNVTEADDNWDVLKEILDEHDSTKSRVFYLSLPPAVYGKCCEILSTKNLITPTSRVVVEKPIGYCGESAEAINAKIAEFFEEDQIFRIDHYLGKETVQNLMALRFSNSLFENMWDAKSIDNIQISLSETVGLESRAGFYDKAGALRDMVQNHLLQLLCLVAMEAPNKLNANSIRNEKLKVLEALRPLFDSDVDSNIVRGQYVPGDLNGKIVPGYLEELNEGASKTETFVAIRAHIDNWRWAGVPFYLRTGKRMAKRCAEIVVEYKKVSHNIYEENVGNIEPNRLVIRLQPEETIQLTLMSKRLDNLEMQLEPVTMNIELSQAYSNGFHSDAYKRLMLDAAANNPSLFIHRDEVRQAWKWIDPIVERWQEKGKPALYRAGTWGPDDADELLAENNHVWFNTGDKA

SEQ ID NO: 2244 - DNA, 1479 bp, marine gamma proteobacterium HTCC2143
  CDS (1)..(1479): transl_table=11
atgactgatccttttgatatagttatttttggcggtacgggcgatcttgcgctacggaaactaattccagcgctataccgtgcatttctggcagcgcaattgccggatgggacacgtgttattgctagttgtcggagtcaagatgatatcgataattacttggacaccgcagcattagcgcttcagcaacaccttacccctgaagagtttagcgtagctgcttgggagcaatttaaggcttatcttaatccggtgatgctggacatttcggtgttagatgataactggacatcattaaagggcgtgatggatattgcgcccgataaggtaagagttttttatctggcgacaccgccggatatctttggtgtcacctgtcgctatctcaatgagatgactttaattaccgccaaaagccgtttagttgtcgagaaaccattgggctatgatgccgtgtctgctaacgccatcaatactgagattgctcaatatttcaaagaagataatatttatcgaattgatcattatttgggtaaggagaccgttcagaacttaatggcgttgcgatttaccaatattatttttgaacagttgtggaatgctaaatcgattgaccatgtgcagattagtatttccgaaacggtcgggttagaagggcgagcggggttttataatgatgcgggtgcactgcgtgatatggtgcaaaatcatctgctgcagctactttgccttgtggcaatggagtcgccaaataaggttgacgcaaaaagtatacaggcagaaaagataaaggttttagaggcattgcgtcctatacggggcgaagacgtggccctgcatacagtgcgaggtcagtatgtggcaggtagctatctgggtgaattggtgccgggatatttagaggagttgaactcgtctaacagtaccacagagacatttgtcgctattcgtgcctacatcgataactggcgctgggcacgcacgccgttctacctgcgtactggtaaaagaatgaagtctcggggtgcagagatcgttattcagttcaaagatgttccacaccgggtatatgaggattcagcggggccgttggagcctaatcgtttagtgattcgtttgcagccagaagaattgattcagatgacagtgatgtcaaaaaatctagaaaatatggacatgcaattaaaaccggcaaccctaaatttgaatttttctgatacttatactcagtttcgcagtgatgcctataagcggcttatccttgatgcagcggcagcgaatacgagcctgtttattcatcgcgatgaagtatccagtgcctggcagtggattgatccgattgccgaagcatggcaggagggtaaagcgatccctcacttataccgtgcaggtacttgggggccagaagagtctgacgagttgttagcgcagtcaggtcatcgctggttcaattcaggtgaaaaagagtcgaaatcatga

SEQ ID NO: 2245 - protein, 492 aa, marine gamma proteobacterium HTCC2143
MTDPFDIVIFGGTGDLALRKLIPALYRAFLAAQLPDGTRVIASCRSQDDIDNYLDTAALALQQHLTPEEFSVAAWEQFKAYLNPVMLDISVLDDNWTSLKGVMDIAPDKVRVFYLATPPDIFGVTCRYLNEMTLITAKSRLVVEKPLGYDAVSANAINTEIAQYFKEDNIYRIDHYLGKETVQNLMALRFTNIIFEQLWNAKSIDHVQISISETVGLEGRAGFYNDAGALRDMVQNHLLQLLCLVAMESPNKVDAKSIQAEKIKVLEALRPIRGEDVALHTVRGQYVAGSYLGELVPGYLEELNSSNSTTETFVAIRAYIDNWRWARTPFYLRTGKRMKSRGAEIVIQFKDVPHRVYEDSAGPLEPNRLVIRLQPEELIQMTVMSKNLENMDMQLKPATLNLNFSDTYTQFRSDAYKRLILDAAAANTSLFIHRDEVSSAWQWIDPIAEAWQEGKAIPHLYRAGTWGPEESDELLAQSGHRWFNSGEKESKS

SEQ ID NO: 2246 - DNA, 1446 bp, marine gamma proteobacterium HTCC2080
  CDS (1)..(1446): transl_table=11
atgaccggagttgacctaattatttttggcgcttccggagacctttcagcaagaaagctctttcccgcactgtttcaactcgatcgcgccgaattactgcccagcgacctgcgcatcacagcaattgctagagatcaggtcgacgtaaatacttttttggaaggcctaagacagcgaatgcatgcctacatgggctctgagtcgccttcccatgccgagtggcagcactactcacgacattttcaatatgtgggcgccgacttcgccaacgctgacagctattccagtatcagggcaactctagatgatacccgtatcagcttattttacttggctacaccacccagcatcttcgccctaatttgcaacaatctggccactaacaattgcctcaccggcgactgccgaatcgtactcgaaaagcccattggcgaatgtctagcctcgtcaaaggaggtcaatgaaacgctggctcgctactttgacgaggaatctatttatcgcatagatcactacctgggaaaggagaccgttcaaaacttactcgcgctgcgctttgcaaaccgatttattaatagtcagtgggatgccaactgtatcgaccatgttcaaatcaccgttggcgaaatcgtcggtattgagggtcgctggtcttactatgaccgcgtcggccagctccgcgacatggttcaaaaccaccttatgcagttactctgtctcgttgctatggagccccccaatagcctagaagccgatagcatccgcgacgaaaaagtcaaaatcgtcaaggccttgagacgcatcgactctgatcaggtctctgagcacgtgattaaagggcaatacagccagggttggtcttcaggtgcggccgtgcctgggtaccttgaggagcccggttgcgagcgccctgacagcgataccgagacgtttatcgcgatcaaagctcatgtagacaactggcgctgggccggcgttccattttacctgcgaacaggaaaacgcgttcctgaaaaattaactgaaatcatcattcagtacaaagaccttccccacaacatttttagcggcggcaccagcgcgaacaagttaatcattcggttacagcccagggaaggcatcgagctaacaatggcatcgaaacgccagacgctgcgagaaaaactgtccttacagaaccataccttggatttagattttcgggaaaccaccggcatgaatcgaattcccgacgcctacgaacgattatttcttgatgcaattaatggcgatcagtcgctgtttgtaggtcgagaggagatcgaagaaagctggcgctggtgtgatgaactgattgacgcctgcaaccaaaagaacatagagaccaagccctatcacgctggatcttggggcccacctaaagccgagcttttaattgaaaaggatgggcgtagctggcatgtctga

SEQ ID NO: 2247 - protein, 481 aa, marine gamma proteobacterium HTCC2080
MTGVDLIIFGASGDLSARKLFPALFQLDRAELLPSDLRITAIARDQVDVNTFLEGLRQRMHAYMGSESPSHAEWQHYSRHFQYVGADFANADSYSSIRATLDDTRISLFYLATPPSIFALICNNLATNNCLTGDCRIVLEKPIGECLASSKEVNETLARYFDEESIYRIDHYLGKETVQNLLALRFANRFINSQWDANCIDHVQITVGEIVGIEGRWSYYDRVGQLRDMVQNHLMQLLCLVAMEPPNSLEADSIRDEKVKIVKALRRIDSDQVSEHVIKGQYSQGWSSGAAVPGYLEEPGCERPDSDTETFIAIKAHVDNWRWAGVPFYLRTGKRVPEKLTEIIIQYKDLPHNIFSGGTSANKLIIRLQPREGIELTMASKRQTLREKLSLQNHTLDLDFRETTGMNRIPDAYERLFLDAINGDQSLFVGREEIEESWRWCDELIDACNQKNIETKPYHAGSWGPPKAELLIEKDGRSWHV

SEQ ID NO: 2248 - DNA, 1443 bp, Pseudomonas putida GB-1
  CDS (1)..(1443): transl_table=11
ttgactattccttgcgacattctggtgttcggtggcacgggcgacctggccctgcacaaattgcttccggcgctctaccatttgtatcgcgaggcgcgcctgaacaacgcggtacgcatcattgccctcgcccgccgcaacatcagccgtaacgaatacctcaagctcgcagaacggcattgccgggcgcagattgcccgcaccgacttcgacgaagatgtgtggcaacgctttgccgcgcgcctcgactacttccccatggatgcctcgcaaagcgccgacttcggtcgcctggcgcgctacctcggcgagcctggcgggctgacccgcgtcttctacctggccaccgcgccctccctgttcgtgccaatcgccaaccacttgcgtatttccgggctggccgacagcgaggcgcgcattgtgctggaaaagcccattggccattcacagcactcggccaccgccatcaacgaagcgatcggcgccgtgttcgaagaaccccaggtgtttcgcattgatcactacctgggcaaggaaaccgtgcagaacctcatggcgctgcgctttgccaacgccctgcttgaacctgtgtggcgcaacggccaggtcgatcatgtgcagatcagcgcctgcgaaaccctcggtgtagagaaccgcggcgggtactacgaccgtgccggggcaacccgcgacatgctccagaaccacttgctgcagctgctgtgcctggtggccatggagccacccgcgcagttcgaagccgaggccgtgcgcgacgagaaagtgaaggtcctgcgtgccctcaagcccattactgggcaggacgtacaggacaagaccgtgcgtggtcagtacggtgccggctacatcggtggccaggaagtgccggcctattacttcgaaaaggacgtggacaacgacagcgataccgaaacctttgtggccgttcaggcgcacatcgacaattggcgctgggctggcgtgccgttctacctgcgcaccggcaagcgcatggcgcggcgcacttcgcagatcgtcatccagttcaagcctgtgccccatgagcttttcagcggcggccaggtcaaccagctgttgatccagctgcaaccggacgaacgcatcagcctgcgcatgatgaccaaaagccccggcaaaggcatgcgactggagccggtggacctggacctcaacctggcccaggtgttcggccagacccgtcgttggggtgcttacgaacgcctgctgctggacatcctggaaggcgactcgacgctgttcatgcggcgtgatgaagtggaagcggcctgggcgtgggtcgacccgatcatcaagggctgggaagagcactttcaggcgccacgccattacccggcgggcaacaacggcccggagcaggccaacagcctactggcgcggcatggcaggcactggcacagctga

SEQ ID NO: 2249 - protein, 480 aa, Pseudomonas putida GB-1
MTIPCDILVFGGTGDLALHKLLPALYHLYREARLNNAVRIIALARRNISRNEYLKLAERHCRAQIARTDFDEDVWQRFAARLDYFPMDASQSADFGRLARYLGEPGGLTRVFYLATAPSLFVPIANHLRISGLADSEARIVLEKPIGHSQHSATAINEAIGAVFEEPQVFRIDHYLGKETVQNLMALRFANALLEPVWRNGQVDHVQISACETLGVENRGGYYDRAGATRDMLQNHLLQLLCLVAMEPPAQFEAEAVRDEKVKVLRALKPITGQDVQDKTVRGQYGAGYIGGQEVPAYYFEKDVDNDSDTETFVAVQAHIDNWRWAGVPFYLRTGKRMARRTSQIVIQFKPVPHELFSGGQVNQLLIQLQPDERISLRMMTKSPGKGMRLEPVDLDLNLAQVFGQTRRWGAYERLLLDILEGDSTLFMRRDEVEAAWAWVDPIIKGWEEHFQAPRHYPAGNNGPEQANSLLARHGRHWHS

SEQ ID NO: 2250 - DNA, 1470 bp, Pseudomonas putida GB-1
  CDS (1)..(1470): transl_table=11
atggctgcgatcagtgtcgaaccttgcacctttgccctgtttggcgccctcggcgacctggcattgcgcaagctgtttcctgcgctctaccagctcgaccgggccaacttgctgcatccggacacccgcctgctggccttggcccgcgaggccggcagtgcgcaggtgcatctggacaccatcgaggcgcacttgcgccggcatgtgcccgaagccgatatcgagcctgcttcgctggggcgcttccttgcccggctgagctaccagcacctggacttccttcagcccgagggctaccaggccctggccgagcaactgcccggcgagcagccgttgatcgcttacttcgccaccgcggcagtggtgtacggggccatttgcgaaaacctcgacaaggtcgggctggccccgcgcacgcgcgtggtactggaaaagcccatcggccacgaccttgagtcgtcgcgccgggtcaacgatgccgtggcgcgcttcttccctgaaaaccgggtctaccgcatcgaccactacctgggcaaagagaccgtgcaaaacctcattgccctgcgcttcgccaacagcctgttcgaaacccagtggaaccagaattccatctcccacgtggagataaccgtcgcggaaaaggtcggtatcgaaggccgttggggttatttcgacaaggccggccagctgcgcgacatgattcagaaccacctgctgcaactgctgtgcctgatcgccatggacccgcccagcgagctgtccgccgatgccattcgcgacgaaaaggtgaaagtgctcaaggccctggcaccgatcaccggcgacggcctgagcacccgtgtggtgcgcggccagtacattgccggctacagcgaaggcaaaccggtgcctggttacctggaagaagacaacgccaacgcccagagcgacaccgaaacgttcgttgccctgcgcgccgacatccgtaactggcgctggtcgggtgtgccgttctacctgcgaaccggcaagcgcatgccgcagaagctgtcgcagatcgtcatccacttcaaggaaacgccgcactacatcttcgccccggagcagcgtttgcagatcggtaacaagctgatcatccgcctgcaaccggacgaaggcatttctttacgggtgatgaccaaggagcaaggcctggacaagggcatgcaactgcgcagtggccctttgcaattgaatttttccgacacctggcgcagcgcaagaattccggatgcctacgagcggcttttgctcgaagtgatgcgcggcaaccagaacctgttcgtgcgcaaggacgaaatcgagtatgcctggaagtggtgcgaccagttgatcgccggctggcgtaacgcgggcgatgcgcccaagccttacgctgcgggctcctgggggccgatgagctcgattgcactgatcacacgcgatgggagggcgtggtatggggatatctga

SEQ ID NO: 2251 - protein, 489 aa, Pseudomonas putida GB-1
MAAISVEPCTFALFGALGDLALRKLFPALYQLDRANLLHPDTRLLALAREAGSAQVHLDTIEAHLRRHVPEADIEPASLGRFLARLSYQHLDFLQPEGYQALAEQLPGEQPLIAYFATAAVVYGAICENLDKVGLAPRTRVVLEKPIGHDLESSRRVNDAVARFFPENRVYRIDHYLGKETVQNLIALRFANSLFETQWNQNSISHVEITVAEKVGIEGRWGYFDKAGQLRDMIQNHLLQLLCLIAMDPPSELSADAIRDEKVKVLKALAPITGDGLSTRVVRGQYIAGYSEGKPVPGYLEEDNANAQSDTETFVALRADIRNWRWSGVPFYLRTGKRMPQKLSQIVIHFKETPHYIFAPEQRLQIGNKLIIRLQPDEGISLRVMTKEQGLDKGMQLRSGPLQLNFSDTWRSARIPDAYERLLLEVMRGNQNLFVRKDEIEYAWKWCDQLIAGWRNAGDAPKPYAAGSWGPMSSIALITRDGRAWYGDI

SEQ ID NO: 2252 - DNA, 1506 bp, Pseudomonas putida GB-1
  CDS (1)..(1506): transl_table=11
atgaccaaacagaccattcccgctgcacccccttgtaccctgttcctgttcggcgccaatggcgacctggtcaagcgcctgctgatgccggcgctgtataacctcagccgcgacggcctgctggaccgtaacctgcgcatcgtcggcgtcgaccacaacgcggccagcgccgcgaatttcgctgagcggctgcaggcgttcatgcgcgagcgtgacaaaggccgcgagggcggcgaccagtgcctcgacgataagctctgggcccgcttggccaagcgcctggattaccagacaggcgacttcctcgacccggcgacttaccaagccattgccaagcgcatcgaaaagaccagccacggcaacgccatcttctacctggccacgtcgccgcgcttcttccccgaagtggcgcagcgcctcgggcaggccggtttgcttgacgagtctgccggcggctttcgccgagtggtggtggaaaagcccttcggcaccgacctggccagcgccgaggcgctcaacgcttgcctgctgaaggtgatgggcgagcggcagatctaccgcatcgaccattatctgggcaaagaaacggtgcagaacattctggtcagccgcttctccaacggcctgttcgaatcgttctggaacaaccactacatcgaccatgtgcagatcaccgcagcagaaaccgtcggcgtcgagacccgtggtgcgttctatgacagcaccggcgccttgcgtgacatggtacccaatcacctgttccagttgctggcgatggtggccatggagccgccggccgcgttcggcgccgatgcggtacgcggtgaaaaggccaaagtggtcggtgccatccgcccatggtcggcaaaaatggccctgaagaactccgtgcgtggccagtacagtgccggcaagcaggggcgcaagcaactgcccggttaccgccaggaggccaacgtcgcgcctgagagccagaccgaaacctacgtggcgctgaaggtgatgatcgacaattggcgctgggccggcgtgccgttctacctgcgcaccggcaagcgcatgagcgtgcgcgacaccgagatcgccatttgcttcaagcccgcgccgtatgcgcagtttcgcgagtcggagctggagcggcccaagcccaactacctgaaaatccagatccagcccaacgaaggcatgtggttcgacctgcaggcaaagcggcccgggccggagctggtgatggagaatgtcgagctgggctttgcctacaaggacttcttcaagatgaccccggcgaccggctacgagacgctgatctacgactgcctgaccggtgaccagaccctgttccagcgggccgacaacatcgaaaacggctggcgagcggtgcagccgtttctcgatgcctgggcccagggcggcgatgtgcatggctacccggccggcgaagatgggcccgaagcgggcaatgaattgctggcgcgggacaagcgcgagtggcaccggttggggtaa

SEQ ID NO: 2253 - protein, 501 aa, Pseudomonas putida GB-1
MTKQTIPAAPPCTLFLFGANGDLVKRLLMPALYNLSRDGLLDRNLRIVGVDHNAASAANFAERLQAFMRERDKGREGGDQCLDDKLWARLAKRLDYQTGDFLDPATYQAIAKRIEKTSHGNAIFYLATSPRFFPEVAQRLGQAGLLDESAGGFRRVVVEKPFGTDLASAEALNACLLKVMGERQIYRIDHYLGKETVQNILVSRFSNGLFESFWNNHYIDHVQITAAETVGVETRGAFYDSTGALRDMVPNHLFQLLAMVAMEPPAAFGADAVRGEKAKVVGAIRPWSAKMALKNSVRGQYSAGKQGRKQLPGYRQEANVAPESQTETYVALKVMIDNWRWAGVPFYLRTGKRMSVRDTEIAICFKPAPYAQFRESELERPKPNYLKIQIQPNEGMWFDLQAKRPGPELVMENVELGFAYKDFFKMTPATGYETLIYDCLTGDQTLFQRADNIENGWRAVQPFLDAWAQGGDVHGYPAGEDGPEAGNELLARDKREWHRLG

SEQ ID NO: 2254 - DNA, 1476 bp, Marinobacter sp. ELB17
  CDS (1)..(1476): transl_table=11
atgaccaaattagacaatactcgctgcgacttgatgatttttggcgccttaggcgacctggccaaccgcaaactgtttccggcgctctaccagcttgagcgcgcggaattgtttgctgaaggaagccgtgttctggcactggcccggcacgagcacagcaacgacgacgtgcgccagcagattgccgataatttgcgccagcgggttccggccgaagaatttgaacaatcggttgtagagcgtctggtacagcgggtggaataccgcagccttgatttcagccgccgcgagagttacccggagttgaacggttggcgcgacagcgtcaataacaatctgattgtgtacatggccacgccgccgtcgttgtacggggtgattgcgcgcaatctacgagattccgactgttgcagtgagcacatccgggtagtggttgagaaacccattggccatgatctgcaatcgtcgcgggtcatcaatgatgcactgggcgaggtatacgctgaaagtgagctgttccgcattgaccattatctgggcaaagagaccgtacaaaatctgattgctctgcgtttcgccaacaatctttttgcctcccagtgggatcagaaccacatttcccacgtggaaatcactgtggccgaaagcttgggtattgaagggcgatggggctatttcgacaaggccgggcaattgcgtgacatgattcagaaccacctgctgcaactgctgtgcctgattgccatggatccaccgtctgatttgtcggcagacagcattcgcgatgaaaaagtgaaagtgctgaaagctctgcgcaaaattacgcccgccatgatggaacattacgcggtgcgcgggcagtacaccgcaggttccagcgagggcaaggcggtgcccggataccttgatgaaaaaggtgctgataaatccagtgataccgaaacttttgtcgccctgaaagtagaaatcgataactggcgctggtctggtgtgccattttacatccgcacgggtaaacggctgcctgaaaagttttcccaaatcgtgattcatttcaaaccggcaccgcactacatatttgacccagaccagaagcatctggccaacaataaattgattatccgcctgcagccagacgaaggcatggcgctgaaaatactcaccaaagaccaaggcctggataaaggcatgcgcctgcgccaggggccgctggaactgaccttcgccgaaacctttgccaaggttcgcatccccgaagcctatgaacggctgctgtgggaagttatgaaaggtcaccagtacctgtttgtgcgccgcgacgaagttgaacacgcctggcgctggatagaccagatcatcaccaattggcaagacagcggcgagccgccaaaacgttacgccgcaggtggttgggggccggtggcatcggtggctttgataacccgtgacggacgaagctggtatgaagatgtctaa

SEQ ID NO: 2255 - protein, 491 aa, Marinobacter sp. ELB17
MTKLDNTRCDLMIFGALGDLANRKLFPALYQLERAELFAEGSRVLALARHEHSNDDVRQQIADNLRQRVPAEEFEQSVVERLVQRVEYRSLDFSRRESYPELNGWRDSVNNNLIVYMATPPSLYGVIARNLRDSDCCSEHIRVVVEKPIGHDLQSSRVINDALGEVYAESELFRIDHYLGKETVQNLIALRFANNLFASQWDQNHISHVEITVAESLGIEGRWGYFDKAGQLRDMIQNHLLQLLCLIAMDPPSDLSADSIRDEKVKVLKALRKITPAMMEHYAVRGQYTAGSSEGKAVPGYLDEKGADKSSDTETFVALKVEIDNWRWSGVPFYIRTGKRLPEKFSQIVIHFKPAPHYIFDPDQKHLANNKLIIRLQPDEGMALKILTKDQGLDKGMRLRQGPLELTFAETFAKVRIPEAYERLLWEVMKGHQYLFVRRDEVEHAWRWIDQIITNWQDSGEPPKRYAAGGWGPVASVALITRDGRSWYEDV

SEQ ID NO: 2256 - DNA, 1449 bp, Erythrobacter sp. SD-21
  CDS (1)..(1449): transl_table=11
atgcccgaggtaatgttcgacgcggacgggctgctcctgttcggcgccacgggagatttgtcgcagcgcatgttgctgccttcgctctgcgccttgcacgccgacggcctcctcgatcccgatctgtgcatcgtggcgaccgcacgttcggaaatgaccacgaaggagttccgcgacttcgcccggcaggcgctggagaaatacctgcccaagaaccggcgtggcccgatggcggatttcctcaaccggctgagctatgtcccggtcgatgcgacgacgcctgaaggctatgacgaacttgcgaggcaagtcggcgagtacaagggtctcgcgatcttcctctcgaccgcgccgagcctgttcgagccgaccatcgccggcctgaaaagcgccggtctgaccaacggcaacgcgcgcatcgcgctcgaaaagccgctcggcaccgatcttgcctccagctgcgagatcaacgatgcggtcgccaaggccttcagcgaagaccgcatcttccgcatcgatcactatctcggcaaggaaacggtccagaacctcctcgccctgcggttcgccaacatcctgctcgagccggtgtggaattccaattacgtcgaccacgtccagatcaccgtcgccgagacggtcgggctcgaaagccgggtcgcctattacgacgacagcggtgcgcttcgcgacatggtccagaaccacatgctgcagctcctcgcgctcgtggcgatggagccgcccaccagcttcgacgccaccgccgtgcgcgacgagaaggtgaaggtcctgcgcgcgctgcgcccggcccagtcgaacgaggtcgtcaccggccagtaccgcgccggggccgtcgatgggaaaagcgtgcctggctatgacgaggagctgggcaagccaagcgacacggaaacctatgtcgcgctcaaagcccatgtcgacaactggcgctggcgcggcgtgccgttctacctgcgccacggcaagaggatgccgcgccgggtcacggaaatcgtgatccagttcaaatgcatcccgcattcgatcttcgaaggccgcggcgccaagaccgaacccaaccgcatggtcatcgaaatccagccggaagaaaacatccagctgaccatgatggcgaaggtccccggccttggcagcgacgggctgcgcctgcgccccgtcccgctcgacatcgccatgcccgacgccttttccgatgtggtccgccggatcgcctacgagcgcctgctgctcgatctcatccatggcgaccagacgctgttcgtccgccgcgacgaggtggaggcccagtgggacttcatcgaccacatccgcgcgctgtgggcggaaaacgagacacaacccaagacctatgccgcgggcacatggggacccagcgccgccgtggcgcttgccgaacgcgacggggtgacctggcacgatgactaa

SEQ ID NO: 2257 - protein, 482 aa, Erythrobacter sp. SD-21
MPEVMFDADGLLLFGATGDLSQRMLLPSLCALHADGLLDPDLCIVATARSEMTTKEFRDFARQALEKYLPKNRRGPMADFLNRLSYVPVDATTPEGYDELARQVGEYKGLAIFLSTAPSLFEPTIAGLKSAGLTNGNARIALEKPLGTDLASSCEINDAVAKAFSEDRIFRIDHYLGKETVQNLLALRFANILLEPVWNSNYVDHVQITVAETVGLESRVAYYDDSGALRDMVQNHMLQLLALVAMEPPTSFDATAVRDEKVKVLRALRPAQSNEVVTGQYRAGAVDGKSVPGYDEELGKPSDTETYVALKAHVDNWRWRGVPFYLRHGKRMPRRVTEIVIQFKCIPHSIFEGRGAKTEPNRMVIEIQPEENIQLTMMAKVPGLGSDGLRLRPVPLDIAMPDAFSDVVRRIAYERLLLDLIHGDQTLFVRRDEVEAQWDFIDHIRALWAENETQPKTYAAGTWGPSAAVALAERDGVTWHDD

SEQ ID NO: 2258 - DNA, 1482 bp, Moritella sp. PE36
  CDS (1)..(1482): transl_table=11
atggtaaaacctgagaataacagtatcgtcatttttggtgcttcgggtgatttaacaaaacgaaagttactccccgcgctttatcacctttatgtcaatgaactgttacctgaagatttttctattttgggtgcgagtaaaacagcattcacggatgattcatttcgtgagaaagtaactaatgatttaatcaaaagtgaaggcgtctctcagcagcaagctgaagaattctgtcaacatttgtattatatatcgatggatatgacagatgctgatagttatgttgcctttaaagaacgcttagaaatattatctgagaagcataatacggttggcaatgctatttattacatggcaacgccaccaagcctatatgcagccatctcaactaatttagctaaacataaattgaataaagaccgtaacggttggaaacgattaatcgttgagaaaccgtttggttatgatcttgcgtcagccaacgagttagatgaacatctacatacttgtttccgtgaacgtcaggtttaccgtatcgatcattacctaggtaaagaaacagtacagaacctattagtattccgcttttcaaatggtttctttgaaccactttggaaccgtagttttattgattacgtggaaattactgccgcagagagtttaggtgttgaagagcgaggtggttattatgatcattctggcgcggttcgagacatgctgcaaaatcatctgttacaggtactagccttagttgcgatggaaccgcctgcggttattaacgcggatgcgatgcgtaacgaagtggttaaagttattcaaagcttacgtccacttgaagaacaagatttaaaagagaatctagtacttggtcaatatacaaagagtgttgtaaatggcgaagaattgcctggttaccgtagtgaaaaagacgttgatgaagattcacgtacacctacgtatgtaggcatgaagatgatgattgataactggcgttggaacggtgtacctttctatgtacgtaccggtaaacgtatgccagaacgtctaactgaaattgtggttcattttaagaaaaccccacatccagtgttcggtcaaaatgccccagagaataagttgatcttacgtattcaaccaaatgaatcgattcagatggattttggtttgaaaaaaccgggtgcaggttttactgcgcaacaggtatcaatgagctttaattataatagcctggaagaaaataatttattaacggcttatgagcgcttgctactggattgtatgaaaggcgatgcgactttatttgctcgttccgatgcggttaaagcgtgttgggaatacgtgcagccaatcttagattacaaaaaagaagtgaaatctttatttggatataagtgtggtacttggggtccgaaccgagcagatgagatgttagaaaaagacggccgtgaatggcgcttttctagcgaagaagtaattaattaa

SEQ ID NO: 2259 - protein, 493 aa, Moritella sp. PE36
MVKPENNSIVIFGASGDLTKRKLLPALYHLYVNELLPEDFSILGASKTAFTDDSFREKVTNDLIKSEGVSQQQAEEFCQHLYYISMDMTDADSYVAFKERLEILSEKHNTVGNAIYYMATPPSLYAAISTNLAKHKLNKDRNGWKRLIVEKPFGYDLASANELDEHLHTCFRERQVYRIDHYLGKETVQNLLVFRFSNGFFEPLWNRSFIDYVEITAAESLGVEERGGYYDHSGAVRDMLQNHLLQVLALVAMEPPAVINADAMRNEVVKVIQSLRPLEEQDLKENLVLGQYTKSVVNGEELPGYRSEKDVDEDSRTPTYVGMKMMIDNWRWNGVPFYVRTGKRMPERLTEIVVHFKKTPHPVFGQNAPENKLILRIQPNESIQMDFGLKKPGAGFTAQQVSMSFNYNSLEENNLLTAYERLLLDCMKGDATLFARSDAVKACWEYVQPILDYKKEVKSLFGYKCGTWGPNRADEMLEKDGREWRFSSEEVIN

SEQ ID NO: 2260 - DNA, 1548 bp, Boophilus microplus
  CDS (1)..(1548)
atgcctcaaacatcgttcccgccttctctctctcctcagtgcatcgctctcctgaaggaatcgatacacctgttcgaggagcctgtgcaggagggacagcaacacatcttcgtcgtgctcggcgcttcgggggacttggcaaagaaaaaaatttacccaacgttatgggcactgttccgagacggtttattaccacagaaaacaaagttcgttggctatgctcgcaccaagatgaccttggaggagctgtgggcgaagattgttccttttctaaaagtgaaggacgaagaaaagagccggtttgccgagttcacccgtgccaactcgtacttgtcgggcaaatacgatgagagcagtgactttgtagttctcaacaaggcgatggaaaaacttgaaggcaattccggtggtaatcggatgttttacatggccctgccaccaacagttttccagcaagttgccagcaacatcaagcagcattgcatgagcaagcagggctggacccgtgttgtgattgagaagccatttggccgggactcgcaatcatcagccgaactttccaaccacctggccgcgctatttgaagagtctcagatataccgcatcgaccactatcttggcaaggagatggtccagaatctcatggcaattaggtttgccaaccagatcttcggtcctacgtggaacagaaacaacattgccagtattgtcatatcattcaaagagccatttggaacgcaaggccgaggtggttactttgacaactttggtattatcagggacgtcatgcagaaccacctgctgcaaattatgtctctcgtcgccatggagaggccagtgtccacaaatgcagaagacatcaggaatgagaaggtaaaggtgctcaagtgcgttcccccgatcaccatggacaacgtggtattgggccagtatgtgggtaaaccaggcggcactggagaggagacccagggctacctggacgaccccactgtgccaaagggctcccacacggccacttatgccacagcagtagcctacatcaacaacgagcgctgggaaggagtgcccttcatccttcgatgtggcaaggcactgaatgagcgtaaggcagaagtgcgaatccagtacaaggaagttgctggcgacctctttgccggggagagcaagcgcaacgaattggtattgagggtgcagcctgatgaggccatctacgtcaagttcatgaccaagaaacctggaatggccttcgacattgaggagaccgagctggatctcacctatggcagtcgctacaagggtatggtcatgccggatgcttacgaacgtctcattctggatgcgttctacggcagtcaggtgcactttgtgcgcagcgatgaattggccgaggcgtggcgtattttcacacccctcctgcatcaaattgataaggagaagcccaaaccagtgccttacgagtatggcagccgaggcttcaaggaggcggacgatctctggaaaagggcgggcttcaagttttacggcacataccgttggactaaagcttaa

SEQ ID NO: 2261 - protein, 515 aa, Boophilus microplus
MPQTSFPPSLSPQCIALLKESIHLFEEPVQEGQQHIFVVLGASGDLAKKKIYPTLWALFRDGLLPQKTKFVGYARTKMTLEELWAKIVPFLKVKDEEKSRFAEFTRANSYLSGKYDESSDFVVLNKAMEKLEGNSGGNRMFYMALPPTVFQQVASNIKQHCMSKQGWTRVVIEKPFGRDSQSSAELSNHLAALFEESQIYRIDHYLGKEMVQNLMAIRFANQIFGPTWNRNNIASIVISFKEPFGTQGRGGYFDNFGIIRDVMQNHLLQIMSLVAMERPVSTNAEDIRNEKVKVLKCVPPITMDNVVLGQYVGKPGGTGEETQGYLDDPTVPKGSHTATYATAVAYINNERWEGVPFILRCGKALNERKAEVRIQYKEVAGDLFAGESKRNELVLRVQPDEAIYVKFMTKKPGMAFDIEETELDLTYGSRYKGMVMPDAYERLILDAFYGSQVHFVRSDELAEAWRIFTPLLHQIDKEKPKPVPYEYGSRGFKEADDLWKRAGFKFYGTYRWTKA

SEQ ID NO: 2262 - DNA, 1605 bp, Boophilus microplus
  CDS (1)..(1605)
atggctggccgcgcggcgagtgaagaaaccctgttggaaatcatccacagcagtctctgctcggcggaagagagctcctactccagtgaagacaggtgcatcgctctcctgaaggaatcgatacacctgttcgaggagcctgtgcaggagggacaacaacacatcttcgtcgtgctcggcgcttcgggggacttggcaaagaaaaaaatttacccaacgttatgggcactgttccgagacggtttattaccacagaaaacaaagttcgttggctatgctcgcaccaagatgaccttggaggagctgtgggcgaagattgttccttttctaaaagtgaaggacgaagaaaagagccggttcgccgagttcacccgtgccaactcgtacttgtcgggcaaatacgatgagagcagtgattttgtagttctcaacaaggcaatggaaaaacttgaaggcaattccggtggtaaccgaatgttttacatggccctgccaccaacagttttccagcaagttgccagcaacatcaagcagcattgcatgagcaagcagggctggacccgtgttgtgattgagaagccatttggccgggactcgcaatcatcggccgaactttccaaccacctggccgcgctatttgaagagtctcagatataccgcatcgaccactatcttggcaaggagatggtccagaatctcatggcaattaggtttgccaaccagatcttcggtcctacgtggaacagaaacaacattgccagtattgtcatatcattcaaagagccatttggaacgcaaggccgaggtggttactttgacaactttggtattatcagggacgtcatgcagaaccacctgctgcaaattatgtccctcgtcgccatggagaggccagtgtctacaaatgcagaggacatcaggaatgagaaggtaaaggtgctcaagtgcgttcccccgatcaccatggacaacgtagtattgggccagtacgtgggtaaaccaggcggcactggagaagagacccagggctacctggacgaccccactgtgccaaagggctcccacacggccacttatgccacagcggtagcctacatcaacaacgagcgctgggaaggagtgcccttcatccttcgatgtggcaaggcactgaatgagcgcaaggcagaagtgcgaatacagtacaaggaagttgctggcgacctctttgccggggagagcaagcgcaacgaattggtattgagggtgcagcctgatgaggccatctatgtcaagttcatgaccaagaaacctggaatggccttcgacattgaggagaccgagctggatctcacctatggcagtcgctacaagggtatggtcatgccggatgcttacgagcgtctcattctggatgtgttttacggcagtcaggtgcactttgtgcgcagcgatgaattggccgaggcgtggcgtatttttacacccctcctgcatcaaattgataaggagaagcccaaaccagtgccttacgagtatggcagccgaggcttcaaggaggcggacgatctctggaaaagggcgggcttcaagttttacggcacataccgttggactaaagcttaa

SEQ ID NO: 2263 - protein, 534 aa, Boophilus microplus
MAGRAASEETLLEIIHSSLCSAEESSYSSEDRCIALLKESIHLFEEPVQEGQQHIFVVLGASGDLAKKKIYPTLWALFRDGLLPQKTKFVGYARTKMTLEELWAKIVPFLKVKDEEKSRFAEFTRANSYLSGKYDESSDFVVLNKAMEKLEGNSGGNRMFYMALPPTVFQQVASNIKQHCMSKQGWTRVVIEKPFGRDSQSSAELSNHLAALFEESQIYRIDHYLGKEMVQNLMAIRFANQIFGPTWNRNNIASIVISFKEPFGTQGRGGYFDNFGIIRDVMQNHLLQIMSLVAMERPVSTNAEDIRNEKVKVLKCVPPITMDNVVLGQYVGKPGGTGEETQGYLDDPTVPKGSHTATYATAVAYINNERWEGVPFILRCGKALNERKAEVRIQYKEVAGDLFAGESKRNELVLRVQPDEAIYVKFMTKKPGMAFDIEETELDLTYGSRYKGMVMPDAYERLILDVFYGSQVHFVRSDELAEAWRIFTPLLHQIDKEKPKPVPYEYGSRGFKEADDLWKRAGFKFYGTYRWTKA

SEQ ID NO: 2264 - DNA, 1815 bp, Petroselinum crispum
  CDS (1)..(1815)
atggccaccctttcttcagctaccaattgtcgctcctcctcctcctcctcctattcctcttcatcttctctctttccaaggattcatcatcaacaacacttcatcgtttcgttggcttctcccaaacctctattcaacaagctttctttccattccaatcaaccttctttttccttcactcctgctcctgctcctgctgctgcatcccaagatggtgcaatatccacaacggtgccacatattgaaaatgaaactccactcaagaaagtcaagaatgcaaatttatcagttccaccccctcaggagtccaaaggcattactccttttcgtctcaacaaagacaagtcctctgtcactatcactgtcgtcggagcttctggggacctggccaagaagaagatatttcctgcactttttgcactttattacgaggactgcctacctgagcacttcacaatttttggttatgcccgaagtaagatgactgatgctgaacttagggacatggtgagcaagaccctcacttgcaggattgataagagggcaaactgtggggaaaagatggaacaatttttgaaacgatgcttctatcattctggtcaatatgattctgaagccaattttgccgaacttgacaaaaaactgaaggaacacgaggctggaacaattgccaatcgtcttttctatctatcaattccaccaaacatttttataaatgctgtaaaatctgcaagcatatccgcttcttctgcaaatggctggacaagggtcatcgtagagaaaccatttggtcgggattctgaatcctctgctgcactgacaacagctctcaaacagtatctggaggaagatcaaatattcaggatagatcactatcttggaaaagagctagtggagaatctttctgtccttcgattctccaatctcatatttgaacctttatggtctagacagtttattagaaacgtgcagctgatattttctgaagattttggaaccgaaggcaggggagggtactttgataactatggaatagtcagagacataatgcaaaaccatctgctacaaattttggcactctttgccatggaaacacctgttagtttggatgcagaagatatcaggaatgaaaaagtcaaagttctccgatcaatgaggcccattcaacttgatgatgtggttatagggcagtataagagccacacaaggggaggtgtcaattaccctgcatacaccgacgacaagactgtcccccataatagtctgacaccaacatttgctgcagccgccctttttatagataatgcaagatgggatggtgtaccgtttttaatgaaagctggaaaagccctccatgataggaggactgagataagagtacagtttagacatgtacctggtaatctatacaaacggaactttggaacaaatcttgaccatgagaccaatgagcttgttattcgcgtacaacctgatgaagctatatatctgaagattaataataaggtgccaggtttaggaatgagactggatcgcagcaatctgaatctcttatattcgacaaggtactcgggggagatccccgatgcatacgaaaggcttcttcttgatgccgtcgaaggtgaaaggagactgtttatccgcagtgacgaactggatgctgcttggtcgctctttacacccgtattgaaagatctagaagacaagaaaactgttcccgaatattacccttatgggagtcgaggacccgttggtgctcactatcttgcagccaaatataaagttaggtggggagattttgcaggagatcaatga

SEQ ID NO: 2265 - protein, 604 aa, Petroselinum crispum
MATLSSATNCRSSSSSSYSSSSSLFPRIHHQQHFIVSLASPKPLFNKLSFHSNQPSFSFTPAPAPAAASQDGAISTTVPHIENETPLKKVKNANLSVPPPQESKGITPFRLNKDKSSVTITVVGASGDLAKKKIFPALFALYYEDCLPEHFTIFGYARSKMTDAELRDMVSKTLTCRIDKRANCGEKMEQFLKRCFYHSGQYDSEANFAELDKKLKEHEAGTIANRLFYLSIPPNIFINAVKSASISASSANGWTRVIVEKPFGRDSESSAALTTALKQYLEEDQIFRIDHYLGKELVENLSVLRFSNLIFEPLWSRQFIRNVQLIFSEDFGTEGRGGYFDNYGIVRDIMQNHLLQILALFAMETPVSLDAEDIRNEKVKVLRSMRPIQLDDVVIGQYKSHTRGGVNYPAYTDDKTVPHNSLTPTFAAAALFIDNARWDGVPFLMKAGKALHDRRTEIRVQFRHVPGNLYKRNFGTNLDHETNELVIRVQPDEAIYLKINNKVPGLGMRLDRSNLNLLYSTRYSGEIPDAYERLLLDAVEGERRLFIRSDELDAAWSLFTPVLKDLEDKKTVPEYYPYGSRGPVGAHYLAAKYKVRWGDFAGDQ

SEQ ID NO: 2266 - DNA, 1488 bp, Petroselinum crispum
  CDS (1)..(1488)
atgacatctgataaatggagtatagagaaaagagcacctcttagaaatgattctgttttgaaagaagaaaatgtgccagaaattggatgtctttcaattgttgttcttggtgcttctggtgatcttgccaagaaaaagacttttccagcacttttcaatctttatcgtcaggggtttttgcaatcacatgaagtctacattttcggctatgcaaggacaaagatatcggacgaagagttgagagatcgaattcgtggatatcttgttccaagcaagaatactgtggaggggcatgaagaagatttaactaactttctgcaattgatcaaatatgtttgcggatcttatgacaccgaggaggggtatcaattactggataaagaaatatctgagcacgaaatatacagaaattgcacggaaggatcatcccgtagactattttaccttgctcttcctccatcagtatatcctcctgtctgcaagatgatcaggaaatgctgcatgaataaatctgatcttggtggatggactcggattgttgttgaaaagccctttggcagggatttggagtcggctgagcaactcagtaaccagataggggagttgtttgaagagccccagatttaccgtattgatcattatctgggaaaagaattggtgcagaacttgttggtacttcgtttcgcaaatcgtttcttcatgccactttggaatcgtgacaacattgacaatattcagattgtatttagggaggattttggaactgatggccgtggtggatattttgatcagtacggaattatccgcgatatcatccaaaaccatctattgcaggtcctatgccttgttgccatggagaagcctgtctctcttaagcctgagcatattcgagatgagaaagtgaaggttcttcaatctgtagttcctataaaagatgaagaggttgtgctcggacagtacgatggctatttggaagacccgacagttcctgatggctcgtacactcccacatttgctactatggttttaagaatacacaatgagagatgggaaggtgtaccctttatactcaaggccgggaaagctttgaattctagaaaggcagaaatccgggttcagttcaaggatgttcctggtgatatattcaaaagtaagaagcaaggaaggaacgaatttgtaatacgcctgcaaccttcagaggcaatgtatatgaagcttacagtcaaacaaccaggacttaagatgtcaactgtgcaaagtgagatggacttgtcatacggacagcgttatcaggacgttaccattccagaagcttatgaacgtctgattcttgatacgataagaggtgaccaacaacattttgttcggagagatgaacttaaggcggcctgggagattttcactcctctcctgcacagaatcgacaagggagagtttaaatcacttccgtacaagccaggcagcagagggccagaggaaagcggataa

SEQ ID NO: 2267 - protein, 495 aa, Petroselinum crispum
MTSDKWSIEKRAPLRNDSVLKEENVPEIGCLSIVVLGASGDLAKKKTFPALFNLYRQGFLQSHEVYIFGYARTKISDEELRDRIRGYLVPSKNTVEGHEEDLTNFLQLIKYVCGSYDTEEGYQLLDKEISEHEIYRNCTEGSSRRLFYLALPPSVYPPVCKMIRKCCMNKSDLGGWTRIVVEKPFGRDLESAEQLSNQIGELFEEPQIYRIDHYLGKELVQNLLVLRFANRFFMPLWNRDNIDNIQIVFREDFGTDGRGGYFDQYGIIRDIIQNHLLQVLCLVAMEKPVSLKPEHIRDEKVKVLQSVVPIKDEEVVLGQYDGYLEDPTVPDGSYTPTFATMVLRIHNERWEGVPFILKAGKALNSRKAEIRVQFKDVPGDIFKSKKQGRNEFVIRLQPSEAMYMKLTVKQPGLKMSTVQSEMDLSYGQRYQDVTIPEAYERLILDTIRGDQQHFVRRDELKAAWEIFTPLLHRIDKGEFKSLPYKPGSRGPEESG

SEQ ID NO: 2268 - DNA, 1605 bp, Petroselinum crispum
  CDS (1)..(1605)
atgaaatcagcagtgtgtgacatagttcataagatgtcggataaatggtgcttagaggaaagagcccctgttgttgaggatagtgccggagatcctattgttaaagatactcaaccaccaccacccgtgtctgaagatggttgcctatcaattgttgtgcttggtgcttctggtgatcttgccaagaaaaagacttttcctgctctctttaacctttaccgccagggtttcttgcagtcacatgaagtatacatttttggctatgccaggaccaagatttctgatgatgacttgagagaccgcattcgtggatatcttactccaaacaagaacactgcagaaggacacacagaagatgtatcaaaatttctgcaactgatcaaatacgtctgtggttcttatgacgcagcggagggttttcagtgtttggataaggaaatatctgagcatgaaatatcaagaaacagtattgaaggatcgtcccggagactattttaccttgcacttcctccttcagtatatcctcctgtctgcaaaatgattaagacttactgcatgaataaatctgatcttggtggatggactcgtattgttgttgagaagccctttggtagggacttggagtcagctgagcatctcagtaaccagataggagaactgtttgaggagccacagatatatcggattgatcactatttgggaaaagagctggtgcagaatttgttggtgcttcgttttgctaatcgtttcttcctgccttcatggaatcgtgacaacatcagtagtgtgcagattgtcttccgagaggattttggaactgaaggccgtggcggatattttgatcagtatggaatcatccgggatattatccaaaatcatctcttgcaggttctttgcctcgttgctatggaaaaacctatttctcttaaacctgagcacattcgagatgagaaagtgaaggttcttcaatctgtagctccacttaatgatgaagaggttgtgcttggacaatatgatggttacttggatgatcccactgtgcccgctggctctaacactccaacttttgcaaccatggtattgcgtatacacaatgaaagatgggaaggtgttcctttcgtacttaaggctggaaaagcattggaatctagaaaggcagaaattcgtatccaattcaaggaagtcccgggtgatatatttaaatgtcaaaagcaggggagaaatgaatttgtgatacggttacaaccttcagaggccatgtatatgaaacttacagtcaagaagcctggacttgagatgtctactgctcagagtgagctcgacttgtcatatgggcagcgttatcaggatgtaaccataccggaggcttatgaacgacttattcttgacactataaggggtgatcagcagcattttgttcgcagagatgagttgaaggcagcctgggagattttcacccctcttcttcacagaatagataaaagtgaacttaaatcagtttcatacaaaccaggcagccgaggcccagaggaagcggatgagttgctgaaaaaagttggctatgttcagacacatggctatacatggattcctccaaccctataa

SEQ ID NO: 2269 - protein, 534 aa, Petroselinum crispum
MKSAVCDIVHKMSDKWCLEERAPVVEDSAGDPIVKDTQPPPPVSEDGCLSIVVLGASGDLAKKKTFPALFNLYRQGFLQSHEVYIFGYARTKISDDDLRDRIRGYLTPNKNTAEGHTEDVSKFLQLIKYVCGSYDAAEGFQCLDKEISEHEISRNSIEGSSRRLFYLALPPSVYPPVCKMIKTYCMNKSDLGGWTRIVVEKPFGRDLESAEHLSNQIGELFEEPQIYRIDHYLGKELVQNLLVLRFANRFFLPSWNRDNISSVQIVFREDFGTEGRGGYFDQYGIIRDIIQNHLLQVLCLVAMEKPISLKPEHIRDEKVKVLQSVAPLNDEEVVLGQYDGYLDDPTVPAGSNTPTFATMVLRIHNERWEGVPFVLKAGKALESRKAEIRIQFKEVPGDIFKCQKQGRNEFVIRLQPSEAMYMKLTVKKPGLEMSTAQSELDLSYGQRYQDVTIPEAYERLILDTIRGDQQHFVRRDELKAAWEIFTPLLHRIDKSELKSVSYKPGSRGPEEADELLKKVGYVQTHGYTWIPPTL

SEQ ID NO: 2270 - DNA, 1533 bp, Nicotiana tabacum
  CDS (1)..(1533)
atggcagcatcatggtgcattgaaaaaagaggttctcttcggctcgactcttttagagagaatgataatatacctgaaaccgggtgtctttccattattgttcttggcgcttctggtgatcttgccaagaagaaaacttttcctgctctcttcaacctctaccgacagggattcctgcaatccaatgaagttcacatttttggctatgcaaggacaaaaatttctgacgatgacttgagaagccgtatccgtgggtatctttctaaggggaaagaatatgaagaagtatcggagtttctgcaactgattaaatacgtcagtggctcttatgattctggggagggctttagtttactggacaaggcgatagctgagcacgaattcgcaaaaaatagcacggaaggatcatccagaagactcttctactttgctcttcctccatcagtatatccctctgtttgcaggatgataaaaaactattgtatgaacaaatctgatcttggtggttggactcgcattgttgttgagaagcccttcggcaaggatttagcttcagctgagcaactaagttcccagataggagaactatttaatgaaccccaaatttaccggattgaccattatttggggaaggagttggttcagaatgtgttggttctgcgttttgcaaaccgcttctttttgccgctctggaatcgtgacaacattgataatatacagattgtctttagggaggactttggaactgaaggccgcggtggatattttgatgaatatgggattatacgtgacattattcagaatcagctactgcaggtcctttgccttgttgctatggagaagcccgtgtctcagaagcccgagcacgtccgggatgagaaagttaaggttcttcaatcaatgcttccaatcaaagatgaagaggtcgttcttgaacaatatgaaggctataaggatgacccaacggttcctggcaactcaaatactcctacttttgcaactatggttttacgcatacacaatgaaagatgggaaggtgtgccctttataatgaaggctggaaaagcactaaattcaagaaaagcagaaatacgagtgcagtttaaggatgttcctggtgatatatttagatgtaaaaagcaggggagaaatgagtttgttatacgcctccagccttcagaagccatgtacatgaagcttacggtcaagaagcctgggcttgaaatgtcaactgttcaaagtgaattagacctgtcatatgggcagcgttatcaaggggttgtcattccagaggcttatgaacgtctgattctcgacacaataagaggggatcagcagcattttgtgcgcagagatgagctcaaggccgcttgggagatttttaccccacttttgcatagaattgacgatggagagatcaagccaattccatacaagccgggcagcagaggtcctgctgaagcagatgagttgctgcaaaatgtcggttacgttcaaactcatggctatatatggattcctcccacattataa

SEQ ID NO: 2271 - protein, 510 aa, Nicotiana tabacum
MAASWCIEKRGSLRLDSFRENDNIPETGCLSIIVLGASGDLAKKKTFPALFNLYRQGFLQSNEVHIFGYARTKISDDDLRSRIRGYLSKGKEYEEVSEFLQLIKYVSGSYDSGEGFSLLDKAIAEHEFAKNSTEGSSRRLFYFALPPSVYPSVCRMIKNYCMNKSDLGGWTRIVVEKPFGKDLASAEQLSSQIGELFNEPQIYRIDHYLGKELVQNVLVLRFANRFFLPLWNRDNIDNIQIVFREDFGTEGRGGYFDEYGIIRDIIQNQLLQVLCLVAMEKPVSQKPEHVRDEKVKVLQSMLPIKDEEVVLEQYEGYKDDPTVPGNSNTPTFATMVLRIHNERWEGVPFIMKAGKALNSRKAEIRVQFKDVPGDIFRCKKQGRNEFVIRLQPSEAMYMKLTVKKPGLEMSTVQSELDLSYGQRYQGVVIPEAYERLILDTIRGDQQHFVRRDELKAAWEIFTPLLHRIDDGEIKPIPYKPGSRGPAEADELLQNVGYVQTHGYIWIPPTL

SEQ ID NO: 2272 - DNA, 1536 bp, Nicotiana tabacum
  CDS (1)..(1536)
atggcagcatcatggtgcattgaaaaaaggggttctattcggctcgactcttttagagataatgataatatacctgaaactgggtgtctttccattattgttcttggtgcttctggtgatcttgccaagaagaaaacttttcctgcgctcttcaacctctaccggcagggatttctgcaatccaatgaggttcacatttttggctatgcaaggaccaaaatttctgacgacgacttgagaggccgtatccgtgggtatctttctcaggggaaagaaaatgaagaagaagtatcggagtttctgcagctgattaaatacgtcagtggctcttatgattctggggagggctttagtttactggacaaggctatagctgagcacgaaattgcaaaaaatagcacagaaggatcatccagaagactcttctactttgctcttcctccatcagtatatccctccgtttgcagaatgataaaaaattactgtatgaacaaatctgatcttggtggttggactcgcattgttgttgagaagcccttcggcaaggatttagcttcagctgagcaactaagttctcagataggagaactatttgatgaaccacaaatttaccggattgaccattatttgggaaaggagttggtgcagaatttgttggtgctgcgttttgcaaatcgcttctttttgccgctctggaatcgtgacaacattgataatatacagattgtctttagggaggactttggaactgaaggtcgctgtggatattttgatgaatatgggattatacgtgacattattcagaatcagctattgcaggtcctttgccttgttgccatggagaagcctgtgtcccagaagcccgaacacattcgggatgagaaagttaaggttcttcaatcaatgcttccaattaaagatgaagaggttgttcttggacaatatgaaggctataaggatgacccaacggttcctgacaactcaaatactcctacttttgcaactatggttttacgcatacacaatgaaagatgggaaggtgtgccctttataatgaaggctggaaaagcactaaattcaagaaaagcagaaatacgagtgcagtttaaggatgttcctggtgatatatttagatgtaaaaagcaggggagaaatgagtttgttatacgcctccagccttcagaagccatgtacatgaagcttacggtcaagaagcctgggcttgaaatgtcaactgttcaaagtgaattagacctgtcatataggcagcgttatcaaggggttgtcattccagaggcttatgaacgtctgattctcgacacaataagaggggatcagcagcattttgtgcgcagagatgagctcaaggccgcttgggagatttttaccccacttttgcatagaattgacgatggagaggtcaagccaattccatacaagccaggcagcagaggtcccgctgaagcagatgagttgctgcaaaatgtcggttacgttcaaactcatggctatatatgtattcctcccacattataa

SEQ ID NO: 2273 - protein, 511 aa, Nicotiana tabacum
MAASWCIEKRGSIRLDSFRDNDNIPETGCLSIIVLGASGDLAKKKTFPALFNLYRQGFLQSNEVHIFGYARTKISDDDLRGRIRGYLSQGKENEEEVSEFLQLIKYVSGSYDSGEGFSLLDKAIAEHEIAKNSTEGSSRRLFYFALPPSVYPSVCRMIKNYCMNKSDLGGWTRIVVEKPFGKDLASAEQLSSQIGELFDEPQIYRIDHYLGKELVQNLLVLRFANRFFLPLWNRDNIDNIQIVFREDFGTEGRCGYFDEYGIIRDIIQNQLLQVLCLVAMEKPVSQKPEHIRDEKVKVLQSMLPIKDEEVVLGQYEGYKDDPTVPDNSNTPTFATMVLRIHNERWEGVPFIMKAGKALNSRKAEIRVQFKDVPGDIFRCKKQGRNEFVIRLQPSEAMYMKLTVKKPGLEMSTVQSELDLSYRQRYQGVVIPEAYERLILDTIRGDQQHFVRRDELKAAWEIFTPLLHRIDDGEVKPIPYKPGSRGPAEADELLQNVGYVQTHGYICIPPTL

SEQ ID NO: 2274 - DNA, 1767 bp, Nicotiana tabacum
  CDS (1)..(1767)
atgggtgggcagttgcaattgaatccttgttcttcatcttcagttgctactactttccataatggggcacataagttttgcagaaattttaatattttaccatttaaagcccattcccttgaatcttcagttgctagtactttccataatggaatttattcaagaatccagccaagaaagcattttgagatcatgtcatcaaatggttttcatctgaatgctgtgtctttgctggatggttcggcgtcaaaatctatgccagaacaagtgcctttgacagagttagaaaatgcagagacaactgtcagcataactgttattggagcttcaggtgacctagccaagaagaagattttcacagctttatttgctcttttctatgaagattgtttgcctgagaattttatagtttttggttattcacgaacaaaaatgagtgatgaagagctgagaaacatgatcagcaagaccttaacttgtagaattgatcagagagagaattgcgaggctaaaatggaccactttctggaaagatgcttttaccactccggtcagtaccattctgaggatgattttgcagaactggattacaaattaaaggcaaaggaggggtctagggtttctaataggttgttttacttatcaatacctccaaatatattcgtggatgtggtgagatgtgcaagtcttaaagcttcttcaacaagtgggtggacaagagtcattgttgagaaaccgtttggtcgtgacttagaatcatctagtgagctgaccagatgcctaaagaagtatctaactgaggagcaaatattccgaattgaccattacttgggaaaggaacttgttgagaatctctcagttcttcgtttctcgaatcttgtctttgagcctctctggtccagaaactacatacgcaatgtccaattcatattttccgaggactctggtaccgagggacgaggagggtactttgacaattacgggatcatccgagatataatgcaaaatcatctccttcaaatattagcattgtttgctatggaaacacctgtcagcatggatgccgaggacatcagaaatgaaaaggttaaagttttaaggtcaatgaggccattgcagcttgaagatgtggtacttggccagtataaaggtcatagcaagggtggtaaattatatccagcttatacagacgatccaactgtgccaaacggtagtgtcactccaacgttttctgctgctgcactctttattaataatgcacgctgggacggcgttcctttcctcatgaaagctggaaaagctctccatactaggagggcggagatcagggtacagttcagacatgttcctggaaatttgtacaaaaggaactttggaactgatctagataaggccacaaatgagctagttctgcgcttacaacctgatgaagccatatatctgaagatcaacaacaaggttcctggtcttggaatgagacttgaccggagtgaccttaatcttctttacaaagcaaagtatcgaggtgaaataccagatgcatatgagcggcttctgttagatgcaatagaaggagagcgaagattgttcattagaagtgatgagctggatgctgcatgggctctatttacaccattgctgaaggagctagaagagaagaagattgcgccagagctttatccgtatggcagtaggggtccagtaggagcacattatctagctgcaaagcacaacgttcgttggggagatctgtctggtgatgattga

SEQ ID NO: 2275 - protein, 588 aa, Nicotiana tabacum
MGGQLQLNPCSSSSVATTFHNGAHKFCRNFNILPFKAHSLESSVASTFHNGIYSRIQPRKHFEIMSSNGFHLNAVSLLDGSASKSMPEQVPLTELENAETTVSITVIGASGDLAKKKIFTALFALFYEDCLPENFIVFGYSRTKMSDEELRNMISKTLTCRIDQRENCEAKMDHFLERCFYHSGQYHSEDDFAELDYKLKAKEGSRVSNRLFYLSIPPNIFVDVVRCASLKASSTSGWTRVIVEKPFGRDLESSSELTRCLKKYLTEEQIFRIDHYLGKELVENLSVLRFSNLVFEPLWSRNYIRNVQFIFSEDSGTEGRGGYFDNYGIIRDIMQNHLLQILALFAMETPVSMDAEDIRNEKVKVLRSMRPLQLEDVVLGQYKGHSKGGKLYPAYTDDPTVPNGSVTPTFSAAALFINNARWDGVPFLMKAGKALHTRRAEIRVQFRHVPGNLYKRNFGTDLDKATNELVLRLQPDEAIYLKINNKVPGLGMRLDRSDLNLLYKAKYRGEIPDAYERLLLDAIEGERRLFIRSDELDAAWALFTPLLKELEEKKIAPELYPYGSRGPVGAHYLAAKHNVRWGDLSGDD

SEQ ID NO: 2276 - DNA, 1539 bp, Chlamydia trachomatis
  CDS (1)..(1539): transl_table=11
atactaggttgtaccttggaagaaattaaagactttggccccacattaccagcctgccctccctgtatcgtggttatttttggtgctacaggagacttgacctctaggaagctctttcctgctttatacaatttaacaaaggaaggacgtctatccgaaaactttgtttgtgttgggtttgctaggcgacctaagtctcatgagcaatttctcgaagaaatgaagcttgccgttcagcatttctctcactcatcggaaatagatattcgagtttgggaaagtctggaaaatagaatcttttaccaccaagctaatttttctgatgccgaaggctactctgctctgaaagcttatttggagcaactagatcaacaatatggaacacaagggaatcgtcttttttatttatcaacaccaccagattatttccaggaaatcatccgcaatttaaatcggcatcagctattctatcatgaacaaggagcacaacagccttggtctcggctaattatagaaaagccttttggagttaatttagaaacagctcgagagcttcaacaatgcattgatgccaatattgatgaagagtcggtttatcgaatagaccattatttaggaaaagaaacggttcaaaacattctgactattcgttttgctaatactctctttgagtcttgctggaattctcagtacatagatcatgtgcaaatcagcgttagcgaatcaattggtataggatctcgagggaatttcttcgaaaagtcgggcatgctacgagacatggtacagaatcatttgacgcagctgctatgtctactgactatggaacctccttctgaattttcttcagaagaaataaaaaaagaaaaaattaaaattctaaagaaaattcttcctatccgcgaagaagatgctgttcgtggccaatatggtgaagggattgtgcaagatgtttcagttctgggctatcgggaggaagaaaatgtcgatccgaattcttcagtagaaacctacgttgcattaaaattatttatcgacaatcctcgctggaaaggggttcccttttacttacaagcagggaaacgtcttactaaaagaacaacagatatcgctgtgatctttaaaaaatccagctacaatttattcaatgcagagaattgtcctttgtgtccgttagaaaatgatttacttattattcgtattcaaccggatgaaggtgttgcgctacaatttaactgcaaggttccaggaacaaataagctcgtacgtcctgtaaaaatggacttccgttacgacagctattttaatactgttactcccgaagcttatgaacggttactgtgcgactgtatccttggggacagaacgctattcactagcaatgaagaagtcttagcatcttgggaactattttctcctctattagaaaaatggtctcaagtacaccctatattccctaactatatggccggatctttacgtcctcaagaagctgatgaactattatctagagatggaaaagcttggcggccctattaa

SEQ ID NO: 2277 - protein, 512 aa, Chlamydia trachomatis
MLGCTLEEIKDFGPTLPACPPCIVVIFGATGDLTSRKLFPALYNLTKEGRLSENFVCVGFARRPKSHEQFLEEMKLAVQHFSHSSEIDIRVWESLENRIFYHQANFSDAEGYSALKAYLEQLDQQYGTQGNRLFYLSTPPDYFQEIIRNLNRHQLFYHEQGAQQPWSRLIIEKPFGVNLETARELQQCIDANIDEESVYRIDHYLGKETVQNILTIRFANTLFESCWNSQYIDHVQISVSESIGIGSRGNFFEKSGMLRDMVQNHLTQLLCLLTMEPPSEFSSEEIKKEKIKILKKILPIREEDAVRGQYGEGIVQDVSVLGYREEENVDPNSSVETYVALKLFIDNPRWKGVPFYLQAGKRLTKRTTDIAVIFKKSSYNLFNAENCPLCPLENDLLIIRIQPDEGVALQFNCKVPGTNKLVRPVKMDFRYDSYFNTVTPEAYERLLCDCILGDRTLFTSNEEVLASWELFSPLLEKWSQVHPIFPNYMAGSLRPQEADELLSRDGKAWRPY

SEQ ID NO: 2278 - DNA, 1614 bp, Ostreococcus tauri
  CDS (1)..(1614)
atgccgccgcttgtgggcgcgcgtgggcgcgtacgagcgcgattaggggtgaatgagacgttcgttgacctcggcgtcgtcgccgatggggtcgaagaggaaagagaggcgaacgtgcgcgcgacggcgggggagggggagatgctgtcgttcgtcgtgttcggcgcgagcggagacttggcgaagaagaaaatctacccggcgttgttcgcgctgtattacgaagggcggttgccgaagaatttcatgatttacggctacgcccggtcgaagatgacgacggaggcgttcaaggataagatcgcggagtccctgacgtgtcggttggattggagcaagcagggcgggagcgactgcgcgcagaagagtgaggaattcttcgaccggtgcgtgtacgtggcgggacagtacgatgtcgcggcggatttcaaggcgcttgatgcgcagatgtgcgaggacgagaagcatgtgagcgcggtgaagcgcgtcttttacctgagcattccgccgagcatctttgttcccgtggcgcaaaacgccgcgcgcgagtgccagtgcaaaaagggagacaccagagtgatcgtggagaaaccgttcgggcgagatctcacgagctcacgcgagctcaccgccgcgctcgcgagtgagctgagcgaagagcaaacctatcgcatcgatcactacctcggcaaggagttgatcgagaatctcaccgtgatgcgcttctccaacatcatgttccaaccgctgtggaacagaaactacatccgcaacgttcagatcaactttagcgaggacttcggcacggaaggccgcgggggttacttcgaccactacgggatcattcgcgacatcatgcaaaaccacctgttgcaaatcttggcgctcttcgccatggaggagccggcgagtctgaacgccgaggacattcgtgacgagaaggtcaaggtgattcgatgcatgcgtccgatcgagatggataacgtcgcgctcggacagtacaagggacgactgacggatgggagaaagtacccggcgtacttggacgacgaaaccgtgcccaaggggtctctctgcccgacgttcgccgccatggcgctcttcatcgacaatgcgcgctgggacggtgtcccgttcttgctcaaggctggcaaggctctacacaagcggcaggctgaaattcgcgtgcagttccgtcacgctccgggtaacctttacggggaacgacaaggacgcgtcgagcacgtcacaaacgaattggtgattcgcatccaaccggacgaagccatctacttgcgcatcaataacaaggtccccggtctcggtcaacgtctcgaccaaacggttctggatcttcaatacaagagcgcgtacggacaagttcaacttccggacgcctacgaacgcctgattttggacgtcatcaacggcgacaagcgcctgttcatccgtaacgacgagctcgaagcggcctggaagctcttcacgccgcttctggataagatcgaacagcaaaagatcgcgcccgagctctacccttacggctctcgcgggcccatcggcgcgcactacctcgcgtcgaggttcaacgttcgatggggtgacacagactag

SEQ ID NO: 2279 - protein, 537 aa, Ostreococcus tauri
MPPLVGARGRVRARLGVNETFVDLGVVADGVEEEREANVRATAGEGEMLSFVVFGASGDLAKKKIYPALFALYYEGRLPKNFMIYGYARSKMTTEAFKDKIAESLTCRLDWSKQGGSDCAQKSEEFFDRCVYVAGQYDVAADFKALDAQMCEDEKHVSAVKRVFYLSIPPSIFVPVAQNAARECQCKKGDTRVIVEKPFGRDLTSSRELTAALASELSEEQTYRIDHYLGKELIENLTVMRFSNIMFQPLWNRNYIRNVQINFSEDFGTEGRGGYFDHYGIIRDIMQNHLLQILALFAMEEPASLNAEDIRDEKVKVIRCMRPIEMDNVALGQYKGRLTDGRKYPAYLDDETVPKGSLCPTFAAMALFIDNARWDGVPFLLKAGKALHKRQAEIRVQFRHAPGNLYGERQGRVEHVTNELVIRIQPDEAIYLRINNKVPGLGQRLDQTVLDLQYKSAYGQVQLPDAYERLILDVINGDKRLFIRNDELEAAWKLFTPLLDKIEQQKIAPELYPYGSRGPIGAHYLASRFNVRWGDTD

SEQ ID NO: 2280 - DNA, 1395 bp, Crassostrea gigas
  CDS (1)..(1395)
atggcggaccgggagaagttggacgcactatcactgctgagggaagggttgcgatacgaggggacaggggcctcgcacgtgttcgtcatccttggggcatcgggagacttggccaagaagaaaatttatcccacattatggtggctgtacagagatggcctggtcccggagaagacgtacttcatcggatacgctcgcagcaaaatgtcaatggaggacattcgacagaaggcgctgccgttcatgaaggtcaaggattctgaaaagcagaaaatggaagagtttttcaaggtcaatgagtatattgccggcagttatgataaaccagacgggtttgcaaaattggacaaagccatcgaagaaaaaggcagctgtaaccgcatcttctatctcgccctacctccctctgtctatgagacggtcacattgaatctcaaggctggctgtatgtccaaaggtgacaaatgggcacgtattgtggtggagaagccgtttggtaaggacctcgagagctctaatcagttatccaatcaccttggagctttgtttaaggaggaggaaatctaccgaatcgaccattatctcggcaaggaaatggtgcagaatctcatggtgttaaggtttgccaacaagattttcagtcccgtgtggaacagagacggaatcgcctcggtcgtcatcagcttcaaggagccgttcgggacccaaggaaggggaggctactttgatgagtttggaatcatcagagatgtgatgcagaatcaccttctacagatcctgaccttggttgccatggagaagcctccatctactggtgccgaggacatcaggaatgagaaggtcaaggttctgaagagtatttcccaagtggagcttgacaatgtcgtcctgggacagtatgtgggaaatcccgagggacagggggacgagaaacagggctacctggatgacccaacagttcctaaaggctccgcgaccccaacctttgtgacagctgtcctgatggtgaaaaatgagagatgggaaggtgtgccattcatactcaggtgtggaaaagccctgaatgagaggaaggctgaggtcaggatacagttcaaggacgtggcaggtgacatcttccctagcagggaggtgaagcggaacgaattagtgatccgtgtccagccagacgaggcagtgtaccttaagatgatgactaaatcgccgggcatgacttttggctgtgaagagacggagcttgacctgtcttataaaagccgatacaaggactccaagcttcccgacgcctatgaacgtctcattctggatgtttttactggttcccaaattcactttgttcgctctgacgaactctacgaggcgtggagaatatttacaccattacttcacaaataa

SEQ ID NO: 2281 - protein, 464 aa, Crassostrea gigas
MADREKLDALSLLREGLRYEGTGASHVFVILGASGDLAKKKIYPTLWWLYRDGLVPEKTYFIGYARSKMSMEDIRQKALPFMKVKDSEKQKMEEFFKVNEYIAGSYDKPDGFAKLDKAIEEKGSCNRIFYLALPPSVYETVTLNLKAGCMSKGDKWARIVVEKPFGKDLESSNQLSNHLGALFKEEEIYRIDHYLGKEMVQNLMVLRFANKIFSPVWNRDGIASVVISFKEPFGTQGRGGYFDEFGIIRDVMQNHLLQILTLVAMEKPPSTGAEDIRNEKVKVLKSISQVELDNVVLGQYVGNPEGQGDEKQGYLDDPTVPKGSATPTFVTAVLMVKNERWEGVPFILRCGKALNERKAEVRIQFKDVAGDIFPSREVKRNELVIRVQPDEAVYLKMMTKSPGMTFGCEETELDLSYKSRYKDSKLPDAYERLILDVFTGSQIHFVRSDELYEAWRIFTPLLHK

SEQ ID NO: 2282 - DNA, 1548 bp, Medicago truncatula
  CDS (1)..(1548)
atgggaacaaatgaatggcatgttgaaagaagagatagcattggtactgaatctcctgtagcaagagaggtacttgaaactggcacactctctattgttgtgcttggtgcttctggtgatcttgctaagaagaagacatttcctgcacttttccacctatataaacaggaattgttgccacccgatgaagttcacatttttggctatgcaaggtcaaagatctctgatgatgaattgagaaacaaattgcgtagctatcttgttccagagaaaggtgcttcccctaaacagctagatgatgtatcaaagtttttacaattggtgaaatatgtaagtggcccttatgattctgaagatggttttcgcttgttggataaagagatttcagagcatgaatatttgaaaaatagtaaagagggttcatctcggaggcttttctatctagcacttcctccttcagtgtatccgtccgtttgcaagatgatcaagacttgttgcatgaataaatctgatcttggtggatggacacgcgttgttgttgagaaaccctttggtagggatctagaatctgcagaagaactcagtactcagattggagagttatttgaagaaccacaaatttatcgtattgatcactatttgggaaaggaactagtgcaaaacatgttagtacttcgttttgcaaatcggttcttcttgcctctttggaaccacaaccacattgacaatgtgcagatagtatttagagaggattttggaactgatggtcgtggtggatattttgaccaatatggaattatccgagatatcattcaaaaccatctgttgcaggttctttgcttgattgctatggaaaaacccgtttctctcaagcctgagcacattcgagatgagaaagtgaaggttcttgaatcagtactccctattagagatgatgaagttgttcttggacaatatgaaggctacagagatgacccaactgtaccggacgattcaaacaccccgacttttgcaactactattctgcggatacacaatgaaagatgggaaggtgttcctttcattgtgaaagcagggaaggccctaaattctagaaaggcagagattcgggttcaattcaaggatgttcctggtgatattttcaggagtaaaaagcaagggagaaatgagtttgttatccgcctacaaccttcagaagctatttacatgaagcttacggtcaagcaacctggactggaaatgtctgcagttcaaagtgaactagacttgtcatatgggcaacgatatcaagggataaccattccagaggcttacgagcgtctaattcttgacacaattcgaggtgatcaacaacattttgttcgcagagacgaattaaaggcatcatggcaaatattcacaccgcttttacacaaaattgatagaggggagttgaagccggttccttacaagccgggaagtagaggtcctgcagaagcagatgagttattagaaaaagctggatatgttcaaacacacggttatatatggattcctcctaccttatag

SEQ ID NO: 2283 - protein, 515 aa, Medicago truncatula
MGTNEWHVERRDSIGTESPVAREVLETGTLSIVVLGASGDLAKKKTFPALFHLYKQELLPPDEVHIFGYARSKISDDELRNKLRSYLVPEKGASPKQLDDVSKFLQLVKYVSGPYDSEDGFRLLDKEISEHEYLKNSKEGSSRRLFYLALPPSVYPSVCKMIKTCCMNKSDLGGWTRVVVEKPFGRDLESAEELSTQIGELFEEPQIYRIDHYLGKELVQNMLVLRFANRFFLPLWNHNHIDNVQIVFREDFGTDGRGGYFDQYGIIRDIIQNHLLQVLCLIAMEKPVSLKPEHIRDEKVKVLESVLPIRDDEVVLGQYEGYRDDPTVPDDSNTPTFATTILRIHNERWEGVPFIVKAGKALNSRKAEIRVQFKDVPGDIFRSKKQGRNEFVIRLQPSEAIYMKLTVKQPGLEMSAVQSELDLSYGQRYQGITIPEAYERLILDTIRGDQQHFVRRDELKASWQIFTPLLHKIDRGELKPVPYKPGSRGPAEADELLEKAGYVQTHGYIWIPPTL

SEQ ID NO: 2284 - DNA, 1524 bp, Populus trichocarpa
  CDS (1)..(1524)
atgggatcaggtcaatggaaggtagagaagagatctagttttagaagtgattcattttcaaaggaatacgagactgttcccgaaactgggtgcctctcaattattgttcttggtgcttctggtgatctagccaagaagaagactttccctgctctctacaatctttatcgccggggatttctgcaatcaaatgaagtttacatttttggatatgcaaggaccaagatttcagatgatgatctcagaaatcgaatccgtggggatattttggcaaagatgcttcagagcactctgaagatgtatcaacagattaaatatgtaagtggttcttatgatactgaggatggctttcggctattggataaggaaatttcagagcatgaagtatcaaaaaacagtgcagaaggatcatctcgaagactattttatcttgcactccccccatcagtgtatccaccagtctgcaggatgatcagaaagtgttgcatgaatagagcggatcttggtggatggactagaattgtcattgagaaacctttcggcaaagatttggaatctgcagaaaaactcagtgcccagattggagagttgtttgaggaaccacaactttaccgaattgatcattacttgggaaaagaattggtgcagaacttgctagtactccgttttgcaaatcgcttctttttacctctttggaaccgcgacaacattcagattgtgttccgagaagattttggaacagaaggccgtggtggatattttgatgaatacgggattatccgtgatattattcaaaatcacttattacagctttgtttggttgccatggagaagcccgtttctctcaaacctgaacatatccgggatgagaaagtgaaggttcttcaatcagtacttccaatcaaagatgaagaggttgttcttggacagtatgaaggctacagagatgacccaacagttcctgatcactcaaataccccaacatttgcaactgttgttctgagaatacataatgaaagatgggaaggggttcctttcatactaaaggccgggaaagcattgaattcaaggaaggcagagatacgtgttcaatttaaggatgttcctggtgatatattcaaatgtcaaaagcaaggaagaaatgagtttgtgatacgcctgcaaccctcagaagccatgtacatgaaacttacggtgaagcagcctggacttgagatgtctactgttcaaagtgaactagacttgtcatataagcaacgttatcaaggggttgccatcccggaggcatatgaacgtctgattcttgacacgattagaggtgatcagcagcattttgttcgcagagatgagttgaaggcggcatgggagattttcacaccccttctgcataggattgatgatggcgagatgaagccattgcaataccaaccaggcagccgaggtccggtcgaagcagatgagttgttggcaaaagctggttatgttcaaacacatggctatatctggattcctcccacattatag

SEQ ID NO: 2285 - protein, 507 aa, Populus trichocarpa
MGSGQWKVEKRSSFRSDSFSKEYETVPETGCLSIIVLGASGDLAKKKTFPALYNLYRRGFLQSNEVYIFGYARTKISDDDLRNRIRGDILAKMLQSTLKMYQQIKYVSGSYDTEDGFRLLDKEISEHEVSKNSAEGSSRRLFYLALPPSVYPPVCRMIRKCCMNRADLGGWTRIVIEKPFGKDLESAEKLSAQIGELFEEPQLYRIDHYLGKELVQNLLVLRFANRFFLPLWNRDNIQIVFREDFGTEGRGGYFDEYGIIRDIIQNHLLQLCLVAMEKPVSLKPEHIRDEKVKVLQSVLPIKDEEVVLGQYEGYRDDPTVPDHSNTPTFATVVLRIHNERWEGVPFILKAGKALNSRKAEIRVQFKDVPGDIFKCQKQGRNEFVIRLQPSEAMYMKLTVKQPGLEMSTVQSELDLSYKQRYQGVAIPEAYERLILDTIRGDQQHFVRRDELKAAWEIFTPLLHRIDDGEMKPLQYQPGSRGPVEADELLAKAGYVQTHGYIWIPPTL

SEQ ID NO: 2286 - DNA, 1536 bp, Populus trichocarpa
  CDS (1)..(1536)
atgggatccggtcaaaggaaggtagagaagagatctggtttagaaaatgattcgtttctaaaggaacatgagactgcgcctgaaagtgggtgcctttcaattattgttcttggtgcttctggtgatctagccaagaagaagactttccctgctctctaccatctttatcgccaggggtttctgcacccagatgaagtccacattttcggatatgcaaggactaggatttcagatgatgaacttagagatcgaatccgtggggatatcttggcaaagaagctgaagttgtatcaaagttcttgcaaccagatcaaatatgtaagtggttcttatgatactgaggatggctttcagctattggataaggaaatttcacagcatgaagtatcaaaaaacagtgcagaaggatcatctcgaagactattttatcttgcacttcccccctcagtgtatccaactgtctgcaggatgatcagaaaatgttgcatgaataaagctgatcatgggggatggactagaattgtcattgagaaaccttttggcaaagatttggaatctgcagaaaatctcagtgcccatattggagagttgtttgaagaagcacaactttttcgtatcgatcactacttgggaaaagaattggtgcagaacttgctagttctccgttttgcaaatcgcttctttttacctctttggaaccgcgacaacatttccaatgttcagattgtgtttcgggaaaattttggaactgaaggtcgtggtggatattttgatgaatatgggattattcgtgatattattcaaaatcacttattacagattctttgtctggttgccatggaaaagcccgtttctctcaaacctgaatatattcgggatgagaaagtgaaggttcttcaatcagtacttccaatcagagatgaagatgttgttcttggacagtatgacggctacagggatgacccaacagttcctgatcaatcaaataccccaacatttgctactgttgttctgagaatacataatgaaagatgggaaggggttcctttcatactaaaggcaggaaaagcattaaattcaagcaaggcagagatacgtgttcaatttaaggacgttcctggtgatatattcaaatgtcaaaagcaaggaaggaatgagtttgtaatacgcctgcaaccctcagaagccatgtacatgaaacttacggtcaagcagcctggactcgagatgtctactgttcaaagtgaactggacttgtcatatatgcaacgttatcaaggggttcccatcccggaggcatatgaacgtctgattcttgacacgattaggggcgatcagcagcattttgttcgcagagatgaattgaaggcagcatgggagatcttcacaccccttctgcacaggattgacaatggtgaaatgaagccaaaggaataccaaccaggcagccggggtccagtcgaagcagatgagctgctggcaaaagctggttatgttcaaacacatggctatatctggattcctcctacattgtag

SEQ ID NO: 2287 - protein, 511 aa, Populus trichocarpa
MGSGQRKVEKRSGLENDSFLKEHETAPESGCLSIIVLGASGDLAKKKTFPALYHLYRQGFLHPDEVHIFGYARTRISDDELRDRIRGDILAKKLKLYQSSCNQIKYVSGSYDTEDGFQLLDKEISQHEVSKNSAEGSSRRLFYLALPPSVYPTVCRMIRKCCMNKADHGGWTRIVIEKPFGKDLESAENLSAHIGELFEEAQLFRIDHYLGKELVQNLLVLRFANRFFLPLWNRDNISNVQIVFRENFGTEGRGGYFDEYGIIRDIIQNHLLQILCLVAMEKPVSLKPEYIRDEKVKVLQSVLPIRDEDVVLGQYDGYRDDPTVPDQSNTPTFATVVLRIHNERWEGVPFILKAGKALNSSKAEIRVQFKDVPGDIFKCQKQGRNEFVIRLQPSEAMYMKLTVKQPGLEMSTVQSELDLSYMQRYQGVPIPEAYERLILDTIRGDQQHFVRRDELKAAWEIFTPLLHRIDNGEMKPKEYQPGSRGPVEADELLAKAGYVQTHGYIWIPPTL

SEQ ID NO: 2288 - DNA, 1578 bp, Ips typographus
  CDS (1)..(1578)
atgtcttctcgtccatttttagagtgtactgatgaaaactcggaagtgtgtctggctttatacagaaagtctctaaaagctattgacttggatcatgaagggacccattttgatggacagtatccccatatatttgtcactctgggggcatcgggtgacttggcgcgcaagaaaatctacccaaccctttggtggctttacagagataatctaataccatcaaatactcactttattggatatgctagaagtaacacgacaatacaagacattaaatccaaatgtgaaccttacatgaaagttaagaaaggcgaagagaagctttatgaagagttttggaagttgaattattacatttccggaaaatacgatgtcagaagtgattttgaaaagctaaaccaagaaataagtcaatatgagaagggacctattgcaaacaggttgttttatctggctttacctccttccgtatttgaagacgttacagttttgattaaaaacacttgtatggctgaaaaaggttggactagaattattattgaaaaaccattcggaagagattccgcttcgtctcaaaaattatctgaccatttatcttctttgtttgacgagcatcaattgtatcgtattgatcattatttggggaaagaaatggttcaaaatctgatgacgcttagatttggaaatcgaatctttggaccagtgtggaatcgcgataatattgcttcaatacaaattacttttaaagaaccatttggaacccaaggaagaggcggttattttgacgaatttggaattataagggatatcatgcagaaccacttgttgcaaattttgactttggctgctatggaaaaacctgctacgattcaccctgatgatattcgtgatgaaaaagtaaaagttttaaaaagtgttaaaactttgactctcaatgatgtagtacttggacaatacgttggcaatccagaaggagagggtgaagctaaaattggatatctagatgatcctacagtgcccgcaggttctgttactcctacctatgctgctgcggtacttagaatagataatgaaaggtgggatggtgttcccttcattttaaaatgtggcaaagctttaaatgaaaggaaagccgaagttcgaatccaatttgaagacgttcctggagatatatttgatggaaaagctaaaagaaacgaacttgttattagagttcaacctggagaagctttgtatgttaagcttatggttaagactcccggaatggcttttgatatggaagaaactgaacttgacctaacttatggacatcgttacgagaatgtaaaacttcccgatgcgtacgaacgtttgattcttgacgtgttttgcgggtcgcaaatgcattttgtaaggtctgacgaacttagcgaagcttggaggatatttacgcctttgttgcatgaaatcgaaggcaaccgcgtccaaccaattccttacacatttggcagccgagggccgaaagaggcagatgagttattgaaaaaacataactttaattatacgggttcctacaagtggtataaatcgaacaagtag

SEQ ID NO: 2289 - protein, 525 aa, Ips typographus
MSSRPFLECTDENSEVCLALYRKSLKAIDLDHEGTHFDGQYPHIFVTLGASGDLARKKIYPTLWWLYRDNLIPSNTHFIGYARSNTTIQDIKSKCEPYMKVKKGEEKLYEEFWKLNYYISGKYDVRSDFEKLNQEISQYEKGPIANRLFYLALPPSVFEDVTVLIKNTCMAEKGWTRIIIEKPFGRDSASSQKLSDHLSSLFDEHQLYRIDHYLGKEMVQNLMTLRFGNRIFGPVWNRDNIASIQITFKEPFGTQGRGGYFDEFGIIRDIMQNHLLQILTLAAMEKPATIHPDDIRDEKVKVLKSVKTLTLNDVVLGQYVGNPEGEGEAKIGYLDDPTVPAGSVTPTYAAAVLRIDNERWDGVPFILKCGKALNERKAEVRIQFEDVPGDIFDGKAKRNELVIRVQPGEALYVKLMVKTPGMAFDMEETELDLTYGHRYENVKLPDAYERLILDVFCGSQMHFVRSDELSEAWRIFTPLLHEIEGNRVQPIPYTFGSRGPKEADELLKKHNFNYTGSYKWYKSNK

SEQ ID NO: 2290 - DNA, 1623 bp, Ips typographus
  CDS (1)..(1623)
atgaaatccgcgtgtgtgatatcgtttttacttattttatttattgtttggtgtgacggtgttgggaacaacactaaagaaaactcggaagtgtgtctggctttatacagaaagtctctaaaagctattgacttggatcatgaagggacccattttgatggacagtatccccatatatttgtcactctgggggcatcgggtgacttggcgcgcaagaaaatctacccaaccctttggtggctttacagagataatctaataccatcaaatactcactttattggatatgctagaagtaacacgacaatacaagacattaaatccaaatgtgaaccttacatgaaagttaagaaaggcgaagagaagctttatgaagagttttggaagttgaattattacatttccggaaaatacgatgtcagaagtgattttgaaaagctaaaccaagaaataagtcaatatgagaagggacctattgcaaacaggttgttttatctggctttacctccttccgtatttgaagacgttacagttttgattaaaaacacttgtatggctgaaaaaggttggactagaattattattgaaaaaccattcggaagagattccgcttcgtctcaaaaattatctgaccatttatcttctttgtttgacgagcatcaattgtatcgtattgatcattatttggggaaagaaatggttcaaaatctgatgacgcttagatttggaaatcgaatctttggaccagtgtggaatcgcgataatattgcttcaatacaaattacttttaaagaaccatttggaacccaaggaagaggcggttattttgacgaatttggaattataagggatatcatgcagaaccacttgttgcaaattttgactttggctgctatggaaaaacctgctacgattcaccctgatgatattcgtgatgaaaaagtaaaagttttaaaaagtgttaaaactttgactctcaatgatgtagtacttggacaatacgttggcaatccagaaggagagggtgaagctaaaattggatatctagatgatcctacagtgcccgcaggttctgttactcctacctatgctgctgcggtacttagaatagataatgaaaggtgggatggtgttcccttcattttaaaatgtggcaaagctttaaatgaaaggaaagccgaagttcgaatccaatttgaagacgttcctggagatatatttgatggaaaagctaaaagaaacgaacttgttattagagttcaacctggagaagctttgtatgttaagcttatggttaagactcccggaatggcttttgatatggaagaaactgaacttgacctaacttatggacatcgttacgagaatgtaaaacttcccgatgcgtacgaacgtttgattcttgacgtgttttgcgggtcgcaaatgcattttgtaaggtctgacgaacttagcgaagcttggaggatatttacgcctttgttgcatgaaatcgaaggcaaccgcgtccaaccaattccttacacatttggcagccgagggccgaaagaggcagatgagttattgaaaaaacataactttaattatacgggttcctacaagtggtataaatcgaacaagtag

SEQ ID NO: 2291 - protein, 540 aa, Ips typographus
MKSACVISFLLILFIVWCDGVGNNTKENSEVCLALYRKSLKAIDLDHEGTHFDGQYPHIFVTLGASGDLARKKIYPTLWWLYRDNLIPSNTHFIGYARSNTTIQDIKSKCEPYMKVKKGEEKLYEEFWKLNYYISGKYDVRSDFEKLNQEISQYEKGPIANRLFYLALPPSVFEDVTVLIKNTCMAEKGWTRIIIEKPFGRDSASSQKLSDHLSSLFDEHQLYRIDHYLGKEMVQNLMTLRFGNRIFGPVWNRDNIASIQITFKEPFGTQGRGGYFDEFGIIRDIMQNHLLQILTLAAMEKPATIHPDDIRDEKVKVLKSVKTLTLNDVVLGQYVGNPEGEGEAKIGYLDDPTVPAGSVTPTYAAAVLRIDNERWDGVPFILKCGKALNERKAEVRIQFEDVPGDIFDGKAKRNELVIRVQPGEALYVKLMVKTPGMAFDMEETELDLTYGHRYENVKLPDAYERLILDVFCGSQMHFVRSDELSEAWRIFTPLLHEIEGNRVQPIPYTFGSRGPKEADELLKKHNFNYTGSYKWYKSNK

SEQ ID NO: 2292 - DNA, 1530 bp, Boophilus microplus
  CDS (1)..(1530)
atggtcaagtccacgggacagtgcatcgctctcctgaaggaatcgatacacctgttcgaggagcctgtgcaggagggacagcaacacatcttcgtcgtgctcggcgcttcgggggacttggcaaagaaaaaaatttacccaacgttatgggcactgttccgagacggtttattaccacagaaaacaaagttcgttggctatgctcgcaccaagatgaccttggaggagctgtgggcgaagattgttccttttctaaaagtgaaggacgaagaaaagagccggtttgccgagttcacccgtgccaactcgtacttgtcgggcaaatacgatgagagcagtgactttgtagttctcaacaaggcgatggaaaaacttgaaggcaattccggtggtaatcggatgttttacatggccctgccaccaacagttttccagcaagttgccagcaacatcaagcagcattgcatgagcaagcagggctggacccgtgttgtgattgagaagccatttggccgggactcgcaatcatcagccgaactttccaaccacctggccgcgctatttgaagagtctcagatataccgcatcgaccactatcttggcaaggagatggtccagaatctcatggcaattaggtttgccaaccagatcttcggtcctacgtggaacagaaacaacattgccagtattgtcatatcattcaaagagccatttggaacgcaaggccgaggtggttactttgacaactttggtattatcagggacgtcatgcagaaccacctgctgcaaattatgtctctcgtcgccatggagaggccagtgtccacaaatgcagaagacatcaggaatgagaaggtaaaggtgctcaagtgcgttcccccgatcaccatggacaacgtggtattgggccagtatgtgggtaaaccaggcggcactggagaggagacccagggctacctggacgaccccactgtgccaaagggctcccacacggccacttatgccacagcagtagcctacatcaacaacgagcgctgggaaggagtgcccttcatccttcgatgtggcaaggcactgaatgagcgtaaggcagaagtgcgaatccagtacaaggaagttgctggcgacctctttgccggggagagcaagcgcaacgaattggtattgagggtgcagcctgatgaggccatctacgtcaagttcatgaccaagaaacctggaatggccttcgacattgaggagaccgagctggatctcacctatggcagtcgctacaagggtatggtcatgccggatgcttacgaacgtctcattctggatgcgttctacggcagtcaggtgcactttgtgcgcagcgatgaattggccgaggcgtggcgtattttcacacccctcctgcatcaaattgataaggagaagcccaaaccagtgccttacgagtatggcagccgaggcttcaaggaggcggacgatctctggaaaagggcgggcttcaagttttacggcacataccgttggactaaagcttaa

SEQ ID NO: 2293 - protein, 509 aa, Boophilus microplus
MVKSTGQCIALLKESIHLFEEPVQEGQQHIFVVLGASGDLAKKKIYPTLWALFRDGLLPQKTKFVGYARTKMTLEELWAKIVPFLKVKDEEKSRFAEFTRANSYLSGKYDESSDFVVLNKAMEKLEGNSGGNRMFYMALPPTVFQQVASNIKQHCMSKQGWTRVVIEKPFGRDSQSSAELSNHLAALFEESQIYRIDHYLGKEMVQNLMAIRFANQIFGPTWNRNNIASIVISFKEPFGTQGRGGYFDNFGIIRDVMQNHLLQIMSLVAMERPVSTNAEDIRNEKVKVLKCVPPITMDNVVLGQYVGKPGGTGEETQGYLDDPTVPKGSHTATYATAVAYINNERWEGVPFILRCGKALNERKAEVRIQYKEVAGDLFAGESKRNELVLRVQPDEAIYVKFMTKKPGMAFDIEETELDLTYGSRYKGMVMPDAYERLILDAFYGSQVHFVRSDELAEAWRIFTPLLHQIDKEKPKPVPYEYGSRGFKEADDLWKRAGFKFYGTYRWTKA

SEQ ID NO: 2294 - DNA, 1800 bp, Arabidopsis thaliana
  CDS (1)..(1800)
atgtcgtctctctcctgccctacctaccgctcccgcacttcgtcttcgtctcctttcttgtcgaatcatcatcattcttcgctgatcaatgttgttgacccacgccgctcactctccttccactacgcttctcctcaggggcttaatctagctgagctctgtgttgttagatcgcagaggaggtccgttcagagttctgttgtcgtgcaagatggatcagtagccaccgagtcaaactcgtccgaggaggcgaaagatgtaggggtgttaacgattccttcacttgaagctgacaaggttgtagcagagtctgatggcggtgaacaactttcaacagttagtatcacggtggtgggagcttctggtgatcttgccaagaagaaaatattcccagctcttttcgcactttactatgaaggctgtcttcctgagcattttaccatttttggctatgcaaggagtaagatgacagatgctgaacttagagttatggtcagcaaaacattgacatgtagaattgataagagggcaaactgcggtgaaaagatggaagagtttctcaagagatgtttttaccattcgggtcagtatgattctcaggaacattttgttgcattggacgagaagctcaaggagcatgagggtggaagactttcgaaccgtcttttctatctttcaatccctccaaatatctttgttgacgcggtgaaatgtgcaagctcatctgcttcatctgtcaatggatggactagggtcattgtcgagaaaccttttggccgggactccaaaacctcggctgcattaacaaagtctcttaagcagtacctggaggaagaccaaatatttaggatagaccattacttagggaaggagctggttgagaacttgtcggttcttcgattctcaaatcttatatttgaaccgctatggtcaaggcagtatataaggaacgtgcaattcattttttctgaggatttcggcactgaaggacgcggagggtacttcgacaattacggaataataagagatataatgcagaatcatctgcttcagatattagctcttttcgccatggaaacacctgtgagtttggatgcagaggatatcagaaatgaaaaggtaaaggtactacgttcaatgagaccaataaaacttgaagatgtggtgataggacagtacaagagccacagcataggaggagtcacttatccaagctatactgatgataaaactgtgccaaaaggtagtctgaccccgacatttgcagctgctgcactcttcatcgacaatgcaagatgggatggtgtaccttttctaatgaaagctgggaaagcactaaacacccgaagtgcggagataagagtccagttcaggcatgtgcctggaaatttatataaccggaattctggtactgatcgtgatcagaccacaaatgagcttgtcatccgcgtccaacctgatgaagctatctatttgaaaatcaacaacaaggtccctggtttaggaatgagattagatcagagtaacttaaatcttctctattcagcaaggtattcaaaggagattccagatgcatatgagaggcttttgttagatgcgatcgaaggtgaacgcagattgttcataagaagcgatgaacttgacgctgcttgggcgcttttcactccattgctcaaagagatagaagaaaagaagacaaccccagaattctatccttacggcagtcgtggtccagtcggtgcccattatctagccgcaaaacacaaggtccaatggggagacctaagtcttgatcagtga

SEQ ID NO: 2295 - protein, 599 aa, Arabidopsis thaliana
MSSLSCPTYRSRTSSSSPFLSNHHHSSLINVVDPRRSLSFHYASPQGLNLAELCVVRSQRRSVQSSVVVQDGSVATESNSSEEAKDVGVLTIPSLEADKVVAESDGGEQLSTVSITVVGASGDLAKKKIFPALFALYYEGCLPEHFTIFGYARSKMTDAELRVMVSKTLTCRIDKRANCGEKMEEFLKRCFYHSGQYDSQEHFVALDEKLKEHEGGRLSNRLFYLSIPPNIFVDAVKCASSSASSVNGWTRVIVEKPFGRDSKTSAALTKSLKQYLEEDQIFRIDHYLGKELVENLSVLRFSNLIFEPLWSRQYIRNVQFIFSEDFGTEGRGGYFDNYGIIRDIMQNHLLQILALFAMETPVSLDAEDIRNEKVKVLRSMRPIKLEDVVIGQYKSHSIGGVTYPSYTDDKTVPKGSLTPTFAAAALFIDNARWDGVPFLMKAGKALNTRSAEIRVQFRHVPGNLYNRNSGTDRDQTTNELVIRVQPDEAIYLKINNKVPGLGMRLDQSNLNLLYSARYSKEIPDAYERLLLDAIEGERRLFIRSDELDAAWALFTPLLKEIEEKKTTPEFYPYGSRGPVGAHYLAAKHKVQWGDLSLDQ

SEQ ID NO: 2296 - DNA, 1533 bp, Populus suaveolens
  CDS (1)..(1533)
atgggatccggtcaatggatggtagagaagagatctggtttagaaaatgattcgtttcgaaacgaacatgagactgcgtctgaaagtgggtgcctttcaattattgttcttggtgcttctggtgatctagccaagaagaagactttccctgctctctaccatctttatcgccaggggtttctggactcaaatgaagtccacattttcggatatgcaaggactaagatttcagatgatgaacttagagatcgaatccgtggatatcttggaaaagaagctgaagttgtatcaaagttcttgcaactgatcaaatatgtaagtggttcttatgatactgaggatggctttcagctattggataaggaagttttacagcatgaagtatcaaaaaacagtgcagaaggatcatctcgaagactattttatcttgcactccccccctcagtgtatccatctgtctgcaggatgatcagaaaatgttgcatgaataaatctgatcttggtggatggactagaattgtcattgagaaaccttttggcaaagatttggaatctgcagaaaatctcagtgcccatattggagagttgtttgaagaagcacaactttttcgtatcgatcactacttgggaaaagaattggtgcagaacttgctagttctccgttttgcaaatcgcttctttttacctctttggaaccgcgacaacatttccaatgttcagattgtgtttcgggaaaattttggaactgaaggtcgtggtggatattttgatgaatatgggattattcgagatattattcaaaatcacttattacagattctttgtctggttgccatggaaaagcccgtttctctcaaacctgaatatattcgagatgagaaagtgaaggttcttcaatcagtacttccaatcagagatgaagatgttgttcttggacagtatgaaggctacagggatgacccaacagttcctgatcaatcaaataccccaacatttgctactgttgttctgagaattcataatgaaagatgggaaggggttcctttcatactaaaggcaggaaaagcattaaattcaagcaaggcagagatacgtgttcaatttaaggacgttcctggtgatatattccaatgtcaaaagcaaggaaggaatgagtttgtaatacgcctgcaaccctcagaagccatgtacatgaaacttacggtcaagcagcctggactcgagatgtctactgttcaaagtgaactggacctgtcatatatgcaacgttatcaaggggttcccatcccggaggcatatgaacgtctgattcttgacacaattaggggcgatcagcagcattttgttcgcagagatgaattgaaggcagcatgggagatcttcacaccccttctgcacaggattgacaatggtgaattgaagccaaaggaataccaaccaggcagccggggtccagtcgaagcagatgagctgctggcaaaagctggttatgttcaaacacatggctatatctggattcctcctacattgtag

SEQ ID NO: 2297 - protein, 510 aa, Populus suaveolens
MGSGQWMVEKRSGLENDSFRNEHETASESGCLSIIVLGASGDLAKKKTFPALYHLYRQGFLDSNEVHIFGYARTKISDDELRDRIRGYLGKEAEVVSKFLQLIKYVSGSYDTEDGFQLLDKEVLQHEVSKNSAEGSSRRLFYLALPPSVYPSVCRMIRKCCMNKSDLGGWTRIVIEKPFGKDLESAENLSAHIGELFEEAQLFRIDHYLGKELVQNLLVLRFANRFFLPLWNRDNISNVQIVFRENFGTEGRGGYFDEYGIIRDIIQNHLLQILCLVAMEKPVSLKPEYIRDEKVKVLQSVLPIRDEDVVLGQYEGYRDDPTVPDQSNTPTFATVVLRIHNERWEGVPFILKAGKALNSSKAEIRVQFKDVPGDIFQCQKQGRNEFVIRLQPSEAMYMKLTVKQPGLEMSTVQSELDLSYMQRYQGVPIPEAYERLILDTIRGDQQHFVRRDELKAAWEIFTPLLHRIDNGELKPKEYQPGSRGPVEADELLAKAGYVQTHGYIWIPPTL

SEQ ID NO: 2298 - DNA, 1602 bp, Nonomuraea sp
  CDS (1)..(1602): transl_table=11
atgacagacccggcagcacccgcggaggaggccgtcaccgtggcggcggccgtcgcgggcaccgccaccaccgaggctgtggcagccgccaacccgctgcgcgacccgcgtgacaagcggttgccccgggtggcgggaccgtgcgtgatggtgttgttcggcgtgacgggtgacctggccaagcgcaagctgctaccggcgatttacgacctgggcaaccgggggctgctgccgcccggcttctcgctggtcggcttcgcccggcgcgattggaaagaccaggatttcgcccagttgacgcacgacgccgtcaaggcgcatgcccggacacccttccgtgaggaggtctggaagcagatccgcgagggcatccatttcgttcccggcgagttctcggacgacggggcgttcgacgcgctggccatggcgttggcagagatcgacgagacccgcggcacgggcggaaactacgctttctacctgtcggtgccgccgaagttcttccccgtggtggtggagcagctcaagcgcaccgggctgtccgacgcgcccgacggctcgtggcggcgggtggtgatcgagaagccgttcgggcacgacctgcagtcggcccacgagctgaacgagatcaccacctcggccttcccggagagctcgatcttccggatcgaccactacctgggcaaggagaccgtccagaacatcatggcgctgaggttcgccaacaacctctacgagccgatctggaaccgcagcttcgtcgaccacgtacagatcacgatggccgaggacatcggcatcggcggccgggccggctactacgacggcatcggcgccgcccgcgacgtgatccagaaccacctgctccagctcctcgcgctcgtcgcgatggaggacccgacctccttcgaggccaactcgctgcggcgggagaaggagaaggtgctcaaggccgtgcggctgcccgcgaacctgggcctgaacaccgcgcgcggccagtactccgcgggctggcagggcggcgagaaggtcgtcggctacctccaggaggagggcatctcgcaggagtccaccaccgagacctacgccgccatcaagctggagatcgccaaccggcgctgggccggcgtgccgttctacctgcgcaccggcaagcgcctgggccgccgcgtcaccgaggtggccgtggtgttccagcgggcgccgcacctgccgttcagcaaggacgacaccgagatcctcggccagaacgcgctggtcgtccgggtccagccggacgagggcatcaccgtgcggttcggctcgaaggtgccggggacggcgatggaggtgcgtgacgtctccatggacttcgcctacggcgagtcgttcctggagtcgtcgccggaggcgtacgagcggctgctgctcgacgtgatgatcggcgatccgccgctcttcccgcaccagcgggaggtggagctgtcgtggaacatcctcgacccgatcgaggagttctgggccacgcaggggcagccggagccgtacgagtccggttcgtgggggcccgagtcggccgacgcgatgatggcccgcgacggccgcgtgtggaggaggctctag

SEQ ID NO: 2299 - protein, 533 aa, Nonomuraea sp
MTDPAAPAEEAVTVAAAVAGTATTEAVAAANPLRDPRDKRLPRVAGPCVMVLFGVTGDLAKRKLLPAIYDLGNRGLLPPGFSLVGFARRDWKDQDFAQLTHDAVKAHARTPFREEVWKQIREGIHFVPGEFSDDGAFDALAMALAEIDETRGTGGNYAFYLSVPPKFFPVVVEQLKRTGLSDAPDGSWRRVVIEKPFGHDLQSAHELNEITTSAFPESSIFRIDHYLGKETVQNIMALRFANNLYEPIWNRSFVDHVQITMAEDIGIGGRAGYYDGIGAARDVIQNHLLQLLALVAMEDPTSFEANSLRREKEKVLKAVRLPANLGLNTARGQYSAGWQGGEKVVGYLQEEGISQESTTETYAAIKLEIANRRWAGVPFYLRTGKRLGRRVTEVAVVFQRAPHLPFSKDDTEILGQNALVVRVQPDEGITVRFGSKVPGTAMEVRDVSMDFAYGESFLESSPEAYERLLLDVMIGDPPLFPHQREVELSWNILDPIEEFWATQGQPEPYESGSWGPESADAMMARDGRVWRRL

SEQ ID NO: 2300 - DNA, 1467 bp, Gluconobacter oxydans
  CDS (1)..(1467): transl_table=11
atggaacatttccagcaggtcgagcctttcgactatgtcatcttcggtgccactggcgatctcacgatgcgcaagctgctgcccgcgctctacaaccgccttcggatgggccagattccggatgatgcgtgcatcatcggagccgcccgtacggagctggaccgggaggcctatgtcgcgcgggcccgagacgcccttgagcggtttcttccctcagacatcctgggcccggggctggtcgagcgtttcctcgcccgtctcgattacgtgacgctggacagcagccgcgagggcccgcagtgggacgccctgaagtccctgctggccaaggcacagcctgaccgggtgcgcgtctatatttcgcaaccgcaccgcagcttacggcagcatctgcgagacctgaaccgctacgagctgatcacccccacgtcgcgggttgttctcgaaaagccgatcggtacgaacatggccaccgccaccgccatcaatgacggggtcggccagtattttccggaaaagcagatctaccggatcgatcattatctcgggaaagagacggtccagaacgttctcgccctgcgttttgcaaacccgctcatgaacgctgcctggtccggcgagcatatcgagagcgtgcagatcacggcggtcgagaccgtgggcgtcgaaggtcgtgcggcctattacgacacgtctggcgcgcttcgcgacatgatccagaaccacctgctccaggtactgtgtctggttgcgatggaagcccccgattcccttgaggccgatgccgtccgcaacgccaaactggccgtcctgaacgccctgcgccccatcacggatgccacagccgccaccgagacggtgcgcgcgcagtacacggcaggcgtggtcgatggcgagaatgttccgggttatcttgaagagctcggcaagcccagcgcgacggaaacctatgccgcaatccgcgcctgggtggacacgccgcgctggaagaacgtgccgttctacatccgcacggccaagcggtccggcaagaaggtcagcgagatcgtcgtgacgttccgcccggctgcgaccaccatgttcggcgccaccccggccagcaacaggctggtcctgcgcatccagcccaacgaaggcgtggacctgcgtctgaacgtcaagaaccctgcgctggatgtcttcaacctgcggacggcggatcttgatacctccatccgcatggaaggcggcctgcccttcccggattcctatgagcggcttcttctggatgccgtgcggggtgatccggtactgttcatccgccgcgacgaggtcgaggccgcatggcgctgggtcgagcccatccttgaggcctggaaacatgacaaggcgcccatgcagacctacagtgcgggttcctatgggccggaacaggcaacacaactgctcgccagccatggcgacacctggcatgaagcgtcggagtaa

SEQ ID NO: 2301 - protein, 488 aa, Gluconobacter oxydans
MEHFQQVEPFDYVIFGATGDLTMRKLLPALYNRLRMGQIPDDACIIGAARTELDREAYVARARDALERFLPSDILGPGLVERFLARLDYVTLDSSREGPQWDALKSLLAKAQPDRVRVYISQPHRSLRQHLRDLNRYELITPTSRVVLEKPIGTNMATATAINDGVGQYFPEKQIYRIDHYLGKETVQNVLALRFANPLMNAAWSGEHIESVQITAVETVGVEGRAAYYDTSGALRDMIQNHLLQVLCLVAMEAPDSLEADAVRNAKLAVLNALRPITDATAATETVRAQYTAGVVDGENVPGYLEELGKPSATETYAAIRAWVDTPRWKNVPFYIRTAKRSGKKVSEIVVTFRPAATTMFGATPASNRLVLRIQPNEGVDLRLNVKNPALDVFNLRTADLDTSIRMEGGLPFPDSYERLLLDAVRGDPVLFIRRDEVEAAWRWVEPILEAWKHDKAPMQTYSAGSYGPEQATQLLASHGDTWHEASE

SEQ ID NO: 2302 - DNA, 1767 bp, Oryza sativa subsp
  CDS (1)..(1767)
atggcgctctcctgcatgaggtgctccccggccgccggcgccgtacgacgaggattggcatcggcggctccgccggcggcgctctcctttgccagatgcggcctccgtagagcggccgcgctcgggtggcgcgtcgccgccgtcgccactacgggagtgcaaggtgccaaggatgctggtctggagaaagctgccagaagtgcttcccaatcaaaggtggaaaatggctcaccttcagaaatcattttagatgattttgaagacttgagccctctatcagaaaatgatgactccactgttagtatcactgtagtcggagcatctggtgaccttgccaagaagaagatatttcctgcactttttgctctatactatgaagattgtcttccaaagcatttcactatcttcggatatgcacgcagcaagatgacagatgctgaattgagaaacatggtcagcaaaacactgacatgcagaatagataaaagggaaaactgtaatgagaagatggaagagtttttaaagagatgcttctatcattcaggccaatatgattcagaggagcatttcatggaccttgacaagaagctgaaacaacatgagggttccagagtttctaaccgtcttttctacttgtcaataccaccaaatatattccttgatgttgtaaaatgtgcaagcaaatcagcatcatctgggaatggttggacaagggtaattgttgagaaaccttttggtcgtgactcagattcatcttctgcattaacaaggggtctgaagcagtacctggtagaggaccaaatcttcaggattgaccactacttgggaaaggaactagtggagaacctgtctgtccttcgcttctcaaatcttgtttttgaacctctatggtcaaggcagtatataaggaatgtgcagctgatattctcagaggatttcggcactgaaggacgaggagggtactttgataggtatggtattatccgtgacataatgcagaatcatcttcttcagatactagccctatttgcaatggaaactcctgttagcttggaggcagaggacataagaaacgaaaaggttaaagttttgcgttccatgaagcccctgcaactggaagatgtggtgataggacagtacaaaagtcatacaaagggtggtaccacataccctggatacactgaagataagacggtgcccaaggatagtgtcaccccaacatttgctgcagctgcacttttcataaataatgctagatgggatggagttccttttcttatgaaagctgggaaggctttacatacaaaaggggctgagattagagtacagttccgacatgttcctggtaatctttataagaggagttttgggactgatcttgatacagccactaatgaacttgtcatacgtgtgcaacctgatgaagctatctacttgaagattaacaacaaaattcctggtcttggtatgagactagatagaagtaatttgaatcttcactatgcagcaaggtactccaaggagataccagatgcttatgagaggctcttacttgatgccattgaaggagagcgaaggctttttatccgttctgatgagttggatgccgcatgggagctcttcactcccttactcaaggagctggaagagaagcggatagcccctgagctatacccttatggaagccgcggtcctgtaggggctcactaccttgcagcaaagtacaacgtcagatggggtgatttgaccacagaacagaaggcatga

SEQ ID NO: 2303 - protein, 588 aa, Oryza sativa subsp
MALSCMRCSPAAGAVRRGLASAAPPAALSFARCGLRRAAALGWRVAAVATTGVQGAKDAGLEKAARSASQSKVENGSPSEIILDDFEDLSPLSENDDSTVSITVVGASGDLAKKKIFPALFALYYEDCLPKHFTIFGYARSKMTDAELRNMVSKTLTCRIDKRENCNEKMEEFLKRCFYHSGQYDSEEHFMDLDKKLKQHEGSRVSNRLFYLSIPPNIFLDVVKCASKSASSGNGWTRVIVEKPFGRDSDSSSALTRGLKQYLVEDQIFRIDHYLGKELVENLSVLRFSNLVFEPLWSRQYIRNVQLIFSEDFGTEGRGGYFDRYGIIRDIMQNHLLQILALFAMETPVSLEAEDIRNEKVKVLRSMKPLQLEDVVIGQYKSHTKGGTTYPGYTEDKTVPKDSVTPTFAAAALFINNARWDGVPFLMKAGKALHTKGAEIRVQFRHVPGNLYKRSFGTDLDTATNELVIRVQPDEAIYLKINNKIPGLGMRLDRSNLNLHYAARYSKEIPDAYERLLLDAIEGERRLFIRSDELDAAWELFTPLLKELEEKRIAPELYPYGSRGPVGAHYLAAKYNVRWGDLTTEQKA

SEQ ID NO: 2304 - DNA, 1746 bp, Solanum tuberosum
  CDS (1)..(1746)
atggtaaccctttattcttccccttccactaactgttctggggctttttcatcttactccaattcttctattggcttctacaattatcacaacaacttccctatttcatccagaaagtttggttctcacaagatttctttgcaaattaatgccattcgcatgcaagatggtgctgttgtggctcaacctagcaaaacccaagatgaaactcctttgaagaaattaaaagatggaattttgtcaaaggagcagaaacatacatttgattttgatagcaacaaagataaatcaactgtcagtattactgttgttggtgcttcaggagatcttgccaaaaaaaagatatttcctgcactttttgcactttattatgagggttgcttaccggagcatttcactatttttggttatgcccggagtaagatgactgatgatgaactcaggaacatggtcagcaagacacttacttgcaggattgataagagggaaaattgtggtgaaaagatggaacagtttctagaaaggtgtttctaccatagtggacaatatgattcccaagaaaactttgcagagcttgataaaaaactgaaagaacatgaggctggaaggttttccaatcgtctgttttacttgtccattccaccaaatatttttataaatgctgtacgatgtgcaagccttgcgtcatctgctcatggatggactagagtcattgtagagaaaccctttggtcgggattctgaatcctctgctgcattaacaggagcacttaagcagtacttgaaggaagatcaaattttcaggattgatcactatttagggaaggagcttgtggaaaacctttctgtccttcgtttctccaacttgatatttgaacccttatggtcaaggcagtatataaggaacgtgcaatttattttctctgaagattttggcactgaaggaaggggaggttattttgatcattatgggataattagagacattatgcaaaaccatttgcttcaaattcttgccctctttgccatggaaacacctgtcagtttggatgcagaagatatcaggaatgaaaaggtaaaagttctgcgttctatgagacctttacaactagatgatgttattgtcgggcagtacaaaagtcacacaaaagggggtgttaactatcctggttataccgacgacaagactgtacccaaggacagtctaaccccaacttttgctgcagctgctcttttcatagataatgcaagatgggatggtgtgcctttccttatgaaggctggaaaagctttacataccaggagtgcggaaataagagtacaattcaggcacgtgccaggaaacttatacaataagaactttggctcggatctagatcaggcaacaaacgagcttgttatccgtgttcaacctgacgaagctatatacctaaagatcaataacaaagttcccggtttaggaatgagattggatcgcagtaatcttaatctgctttactcagcaagatactcaaaggagatccctgatgcatatgagcggctacttcttgatgccatagaaggtgaacgtaggctttttatccgtagtgatgaactggatgctgcttggtctcttttcacaccagtgttgaaagaccttgagcataagaaaatagtaccggaaagctacccctatggaagtcgaggacctattggagcacattaccttgcagcacgatataaagtaagatggggtgatcttgcttag

SEQ ID NO: 2305 - protein, 581 aa, Solanum tuberosum
MVTLYSSPSTNCSGAFSSYSNSSIGFYNYHNNFPISSRKFGSHKISLQINAIRMQDGAVVAQPSKTQDETPLKKLKDGILSKEQKHTFDFDSNKDKSTVSITVVGASGDLAKKKIFPALFALYYEGCLPEHFTIFGYARSKMTDDELRNMVSKTLTCRIDKRENCGEKMEQFLERCFYHSGQYDSQENFAELDKKLKEHEAGRFSNRLFYLSIPPNIFINAVRCASLASSAHGWTRVIVEKPFGRDSESSAALTGALKQYLKEDQIFRIDHYLGKELVENLSVLRFSNLIFEPLWSRQYIRNVQFIFSEDFGTEGRGGYFDHYGIIRDIMQNHLLQILALFAMETPVSLDAEDIRNEKVKVLRSMRPLQLDDVIVGQYKSHTKGGVNYPGYTDDKTVPKDSLTPTFAAAALFIDNARWDGVPFLMKAGKALHTRSAEIRVQFRHVPGNLYNKNFGSDLDQATNELVIRVQPDEAIYLKINNKVPGLGMRLDRSNLNLLYSARYSKEIPDAYERLLLDAIEGERRLFIRSDELDAAWSLFTPVLKDLEHKKIVPESYPYGSRGPIGAHYLAARYKVRWGDLA

SEQ ID NO: 2306 - DNA, 1548 bp, Methylobacterium extorquens
  CDS (1)..(1548): transl_table=11
atgatccacccgaacaccgcccccaaggcgggcgccgcgaaaccggcgccggactgcacgcttgtcatcttcggcgtcaccggcgacctgacgcaccggctcttgatgccggcgctctacaacctcgcgcggtggaagctcctgcccgaacggttcgccatcgtcggcgttggccgcagcgagatgggcaccgacgggctgcgccacgacctcaccaggaccatgcagggcttcgtcgccgagaggggcggcgagttctcagccgacagcctcgaccgggaggcctggaaccgggtcgtcggccggctggactatctcgccggcgatgtcgaagacccggcgacttacgaagagctgtcgcggcgcatcggggtctcgcgagatgcccaggccgccggcggcaacgtgctgttctaccttgcggtcgcggcccgcctcttcggtccggtggtgacgcgactcggcgaagcggggctcacccgagaaggggagggcgcctggcggcgggtgatcatcgaaaaacccttcggccacgatctcgcctcggccaaggcgctcaaccgggaggtcctcgcggccctaagcgaggaccagatcttccggatcgaccacttcctcggcaaggagaccgtccagaacatcatggtcttccggttcggcaacggcctgttcgagccgttgtggaaccgcgaccgcatcgaccacgtccagatcacggtcgctgagacggttggggtcgagaagcgcggctcgttctacgacgcgaccggcgccctccgcgacatggtgccgaaccacctcttccagctcttcaccatgacggccatggagccgccgatctccttcgacgcccacgccgtgcgcgacaagaaggaggaggtgctcatggccgtgcaccagctctccgaggacgcggccgtgcgcgaggcggtgcgcgggcgatacacggcaggcgcggtgcgcggccagcccgtccgcagctaccgcgacgagccggacgtggacccggcctcgcagaccgagacctacgtcgcgctgcgcctcatggtcgacaactggcgctgggccggcgtgccgttctacctccgcacgggcaaggcgatgacgaggcgcgacacggagatcgccatccagttcaagcaggcgccgctggcgctgttccgcggcaccgccgtcgaggcctgcatcccgaactggctcgtgctgcagatccagccggacgagggcatctccctgcagttcggcgccaaggtgccgggcaccgaggtgcggctcggcgccgtcaacatggacttcctctacaaggactacttccagacccagccgagcaccggctacgagacgctcatctacgacgccatgatcggcgacgcgacgctgttccagcgcgccgacaatatcgaggccggctggcgggccgtgcagcccgtgctcgacgcctggtcgagcgggcgcgccccgatggccgcctacccggccggcagcgcaggcccgaaggaggcggacgacctcctcgcccgcgacggtcgcgcctggcgccctctgtga

SEQ ID NO: 2307 - protein, 515 aa, Methylobacterium extorquens
MIHPNTAPKAGAAKPAPDCTLVIFGVTGDLTHRLLMPALYNLARWKLLPERFAIVGVGRSEMGTDGLRHDLTRTMQGFVAERGGEFSADSLDREAWNRVVGRLDYLAGDVEDPATYEELSRRIGVSRDAQAAGGNVLFYLAVAARLFGPVVTRLGEAGLTREGEGAWRRVIIEKPFGHDLASAKALNREVLAALSEDQIFRIDHFLGKETVQNIMVFRFGNGLFEPLWNRDRIDHVQITVAETVGVEKRGSFYDATGALRDMVPNHLFQLFTMTAMEPPISFDAHAVRDKKEEVLMAVHQLSEDAAVREAVRGRYTAGAVRGQPVRSYRDEPDVDPASQTETYVALRLMVDNWRWAGVPFYLRTGKAMTRRDTEIAIQFKQAPLALFRGTAVEACIPNWLVLQIQPDEGISLQFGAKVPGTEVRLGAVNMDFLYKDYFQTQPSTGYETLIYDAMIGDATLFQRADNIEAGWRAVQPVLDAWSSGRAPMAAYPAGSAGPKEADDLLARDGRAWRPL

SEQ ID NO: 2308 - DNA, 1566 bp, Chlorella vulgaris
  CDS (1)..(1566)
atggccgcaattgcagagtctccgtcaaccgagttgcagggcgaggcctctggttacagcaatcgcgatgagtggcactgcgggttctcagaggaactttgcctgaccatcgtggttgcgggggcctctggtgacctggctcgtaagaagacctaccccgcgctgcagttcctcttccagcatggcttcttgccaagcaatgtggccatcattggctatgcccgcaccgacatgaacgacgacaagctgcgggagaagctgaagccaaagctggtgggcagcgacgatgacattgataagttcctgaagcgctgcacatatgtggcagggtcgtatgatggtgccgagggatggcaagggctggcaaaagtgctggacaagcgcgagtcaaagtgcagcaagaaccctgctggccgcctctactaccttgcactgccgccctcagtctacccccaagtgtgcgctggcctgaaggagcattgcgacaacctacggagcgtggagggctcctggattcgagtcattgttgagaagccttttgggcacgacctgcagagctctgagcagctggcagaccagctggggaagctgtacccagagcaccagctgtatcgcatcgaccattacctgggcaaggagatggcgcagaacctgtttgtgatgcggcatgccaacatgtttttggcgcctgtttggaaccggacctgcatctccaatgtccaaatcacctttaaggaggatttcgggacagagggccgtggcggctacttcgacacatttggtatcctgagggatgtgctgcagaaccacttggctcagatgctggccatggttgcaatggagaagcctctgtctgtgcacccagatgatttgcgagatgagaaggtcaaggtgctgcggtgcatcaagcctgtggagccgcataatgttgtactggggcagtacactgccgctaatggacaaccgggctacacagatgatcccaccgtgccggatgatagcaagacgcccacctttgctgctgtcacgctgtacattgacaatgatcggtgggcgggggttccctttgtgttgaaggcgggcaaggcgctgaacgagcggaaggcggagatcagggtgcagctgcgtgcgacgccccactttgtattcaatggagagccagagtcgatgcgcaacgagcttgtggtgcggctgcagccggacgaggcgatttacttgaagatgattgtgaagaagccaggcctggagtttgatgccgccatcagcgagctggacctggactacagccgccagtaccctgaagtggacataccagatgcctacccccgcctcattctcgactccatccgtggcgaccagcaacactttgttcgcagggatgagctgcgcgcggcatggggcatcttcacgccgctgctccacaaaatcgacgctggcgaggttgaggtgcacccctacccttacggcagcaggggcccggcggaggcggatgagctgcttgcacgagctgactttgtgaagaacgtggcatacaattggaaggatcccgggagctgcaagttgtga

SEQ ID NO: 2309 - protein, 521 aa, Chlorella vulgaris
MAAIAESPSTELQGEASGYSNRDEWHCGFSEELCLTIVVAGASGDLARKKTYPALQFLFQHGFLPSNVAIIGYARTDMNDDKLREKLKPKLVGSDDDIDKFLKRCTYVAGSYDGAEGWQGLAKVLDKRESKCSKNPAGRLYYLALPPSVYPQVCAGLKEHCDNLRSVEGSWIRVIVEKPFGHDLQSSEQLADQLGKLYPEHQLYRIDHYLGKEMAQNLFVMRHANMFLAPVWNRTCISNVQITFKEDFGTEGRGGYFDTFGILRDVLQNHLAQMLAMVAMEKPLSVHPDDLRDEKVKVLRCIKPVEPHNVVLGQYTAANGQPGYTDDPTVPDDSKTPTFAAVTLYIDNDRWAGVPFVLKAGKALNERKAEIRVQLRATPHFVFNGEPESMRNELVVRLQPDEAIYLKMIVKKPGLEFDAAISELDLDYSRQYPEVDIPDAYPRLILDSIRGDQQHFVRRDELRAAWGIFTPLLHKIDAGEVEVHPYPYGSRGPAEADELLARADFVKNVAYNWKDPGSCKL

SEQ ID NO: 2310 - DNA, 1455 bp, Corynebacterium glutamicum
  CDS (1)..(1455): transl_table=11
atggtgatcttcggtgtcactggcgacttggctcgaaagaagctgctccccgccatttatgatctagcaaaccgcggattgctgcccccaggattctcgttggtaggttacggccgccgcgaatggtccaaagaagactttgaaaaatacgtacgcgatgccgcaagtgctggtgctcgtacggaattccgtgaaaatgtttgggagcgcctcgccgagggtatggaatttgttcgcggcaactttgatgatgatgcagctttcgacaacctcgctgcaacactcaagcgcatcgacaaaacccgcggcaccgccggcaactgggcttactacctgtccattccaccagattccttcacagcggtctgccaccagctggagcgttccggcatggctgaatccaccgaagaagcatggcgccgcgtgatcatcgagaagcctttcggccacaacctcgaatccgcacacgagctcaaccagctggtcaacgcagtcttcccagaatcttctgtgttccgcatcgaccactatttgggcaaggaaacagttcaaaacatcctggctctgcgttttgctaaccagctgtttgagccactgtggaactccaactacgttgaccacgtccagatcaccatggctgaagatattggcttgggtggacgtgctggttactacgacggcatcggcgcagcccgcgacgtcatccagaaccacctgatccagctcttggctctggttgccatggaagaaccaatttctttcgtgccagcgcagctgcaggcagaaaagatcaaggtgctctctgcgacaaagccgtgctacccattggataaaacctccgctcgtggtcagtacgctgccggttggcagggctctgagttagtcaagggacttcgcgaagaagatggcttcaaccctgagtccaccactgagacttttgcggcttgtaccttagagatcacgtctcgtcgctgggctggtgtgccgttctacctgcgcaccggtaagcgtcttggtcgccgtgttactgagattgccgtggtgtttaaagacgcaccacaccagcctttcgacggcgacatgactgtatcccttggccaaaacgccatcgtgattcgcgtgcagcctgatgaaggtgtgctcatccgcttcggttccaaggttccaggttctgccatggaagtccgtgacgtcaacatggacttctcctactcagaatccttcactgaagaatcacctgaagcatacgagcgcctcattttggatgcgctgttagatgaatccagcctcttccctaccaacgaggaagtggaactgagctggaagattctggatccaattcttgaagcatgggatgccgatggagaaccagaggattacccagcgggtacgtggggtccaaagagcgctgatgaaatgctttcccgcaacggtcacacctggcgcaggccataa

SEQ ID NO: 2311 - protein, 484 aa, Corynebacterium glutamicum
MVIFGVTGDLARKKLLPAIYDLANRGLLPPGFSLVGYGRREWSKEDFEKYVRDAASAGARTEFRENVWERLAEGMEFVRGNFDDDAAFDNLAATLKRIDKTRGTAGNWAYYLSIPPDSFTAVCHQLERSGMAESTEEAWRRVIIEKPFGHNLESAHELNQLVNAVFPESSVFRIDHYLGKETVQNILALRFANQLFEPLWNSNYVDHVQITMAEDIGLGGRAGYYDGIGAARDVIQNHLIQLLALVAMEEPISFVPAQLQAEKIKVLSATKPCYPLDKTSARGQYAAGWQGSELVKGLREEDGFNPESTTETFAACTLEITSRRWAGVPFYLRTGKRLGRRVTEIAVVFKDAPHQPFDGDMTVSLGQNAIVIRVQPDEGVLIRFGSKVPGSAMEVRDVNMDFSYSESFTEESPEAYERLILDALLDESSLFPTNEEVELSWKILDPILEAWDADGEPEDYPAGTWGPKSADEMLSRNGHTWRRP

SEQ ID NO: 2312 - DNA, 1518 bp, Oryza sativa subsp
  CDS (1)..(1518)
atgtcaggaggatcttcaccaaggtcaagacgaagcagctttaattctttatcaagagatctcgaactcccttcagagcaaggttgtctctctgttattgtcctcggggcttctggagacctagccaagaagaaaactttcccggcactcttccatctttttgcacagggatttatacaatcaggtgaagtgcatatatttgggtatgcgagatcaaacctttctgatgatgggttaagggaacgcattcgtggatacctcaaaggagcctcagaagaacatctctcagactttttgcaacatataaaatatgtcagtggttcctatgacagcggagaaggatttgagaaattgaacaaggaaatttcagagtatgagaagtcaaacaaatcagaaagccctcgcaggctcttctatttggcattgcctccatctgtctacccttcagtctgcaaaatgatcagaacatattgcatgaatccatctggatggactagagtcattgttgagaagccatttggaaaggacttggactcttcagaagaattaagtgcccaacttggggagctatttgacgaaaaccaactctacagaattgatcactacttgggaaaagagttggtccaaaacctgcttgtgcttcgttttgccaaccgcttgttcttgcctctttggaaccgcgacaatattgataatatacagattgtattcagggaggactttgggactgacgggcgtggtggatattttgatcaatatggaatcattcgtgacatcatccagaaccatttgttacaggttttctgtttggttgcaatggaaaagcctgtctctcttaagcctgagcacattagagatgagaaagtcaaggttctgcagtccgtgaaccctataaagcatgatgaggttgtccttggacaatacgaggggtacaaggatgaccctacagtgccagatgactcaaacaccccaacttttgcatctgtcgtgtttcgggtacacaatgaaagatgggagggtgttcctttcattcttaaagctggtaaagcactaagctcaaggaaagcagaagtccgtgtgcagttcaaagatgttcctggtgacatctttaaatgtaaaaggcaaggaagaaatgagtttgtcatacgccttcagccatcagaagccatgtacatgaaacttactgtcaaaaaacctggattggagatggccaccgagcagagtgaacttgatctgtcatacgggatgcggtaccaaaacgtcaaaattccagaggcatgcgagcgtctcatattggatacgatacgaggagaccaacagcacttcgttcgccgagatgagctgaaggctgcttggcagatcttcactcccctgctgcacgacatcgacgaaggcaaggtgaagtctattccataccagcctggcagccgaggccccaaggaagccgatgaactgagcgagagggttgggtatatgcagacccacggttacatatggataccacccacccttgcatag

SEQ ID NO: 2313 - protein, 505 aa, Oryza sativa subsp
MSGGSSPRSRRSSFNSLSRDLELPSEQGCLSVIVLGASGDLAKKKTFPALFHLFAQGFIQSGEVHIFGYARSNLSDDGLRERIRGYLKGASEEHLSDFLQHIKYVSGSYDSGEGFEKLNKEISEYEKSNKSESPRRLFYLALPPSVYPSVCKMIRTYCMNPSGWTRVIVEKPFGKDLDSSEELSAQLGELFDENQLYRIDHYLGKELVQNLLVLRFANRLFLPLWNRDNIDNIQIVFREDFGTDGRGGYFDQYGIIRDIIQNHLLQVFCLVAMEKPVSLKPEHIRDEKVKVLQSVNPIKHDEVVLGQYEGYKDDPTVPDDSNTPTFASVVFRVHNERWEGVPFILKAGKALSSRKAEVRVQFKDVPGDIFKCKRQGRNEFVIRLQPSEAMYMKLTVKKPGLEMATEQSELDLSYGMRYQNVKIPEACERLILDTIRGDQQHFVRRDELKAAWQIFTPLLHDIDEGKVKSIPYQPGSRGPKEADELSERVGYMQTHGYIWIPPTLA

SEQ ID NO: 2314 - DNA, 1521 bp, Enterococcus mundtii
  CDS (1)..(1521): transl_table=11
atgaatgaaaaaaacgtattatttactatatttggcggtacaggagatttagcacaacgtaaattgtatccttccctttttcgtttatacaaaaagggcaacttgagcgaacattttgctgtgatcggtacagcacgtcgtccttggagcgatgaacactatcgtgaagtggttaaaggaacaatcaaaacattgaatccttctgccgaagaagccgaacgatttgccagccatttttattatcaatcccatgatgtcaatgattcttctcattaccaaacattaaaagaattatctgatcgtttagatgaaaaataccacttgaatggtaatcgaatgtactatttagccatggctccacaatttttcggtacgatcgtttcacatttgaaatctcagaaaatcatcactgaagctggcttcaaccgattgattatcgaaaaaccttttggttctgatttccattctgcctttgaattgaatgaaaaaattcgacaagtctttccagaagatgatattttccgtattgaccattatttaggtaaagaaatgatccaaaatatctctgcgattcgctttgccaataatatttttgagtctcaatggaacaatcgttacatcgacaacatccaaatcacttttggtgagagtttaggtgttgaagatcgtggcggctattatgaccacagtggtgcgttaaaagatatggtccaaaatcatatccttcaagtattagctttacttgcgatggaaccaccagttgccttttccgaaaaagaaatccgatcagaaaaaatcaaagcgttaaaagctattcgtatttatgaaaaaaaagaagtcttagaaaattttgtacgtgggcaatatgctgcaggtcaattagatgatcagacattcaaaggctatcgtgaagaagacaacgttgatccagaatcaacaactgaaacatttgttgctggaaaattcacgatcgataacttccgttggtctggcgtaccgttttatgtacggactgggaaacgtcttactgaaaaaggtacacgaatcaatatcgtctttaaacaagtacctgtcaatgtatttaaaacatcgatcgacgaaccttgtaatgatccaacgttaccaccaaatgttttgactatctatattcaaccaacagaaggtttttcatttacattaaatggaaaaaaagttggtcaaggcttcgccaccgatccaatcaaactggaatatcgcaatagtgctgaaatggtcgaaaatagtcctgaagcgtatgaaaagcttatgttagatgcattgaacggtgatagtacaaacttctctcattgggaagaagtcgcacaatcttggcatatcgttgacgtgatccgccaagtttgggatcaagtacaaccggatttcccgaattataaagctggttctatgggtcctgaagcagcattcgagcttttagaaaaagacgggttcgaatggatctggcaaccagatcattggtaccgtgaacgtggtaaattggattag

SEQ ID NO: 2315 - protein, 506 aa, Enterococcus mundtii
MNEKNVLFTIFGGTGDLAQRKLYPSLFRLYKKGNLSEHFAVIGTARRPWSDEHYREVVKGTIKTLNPSAEEAERFASHFYYQSHDVNDSSHYQTLKELSDRLDEKYHLNGNRMYYLAMAPQFFGTIVSHLKSQKIITEAGFNRLIIEKPFGSDFHSAFELNEKIRQVFPEDDIFRIDHYLGKEMIQNISAIRFANNIFESQWNNRYIDNIQITFGESLGVEDRGGYYDHSGALKDMVQNHILQVLALLAMEPPVAFSEKEIRSEKIKALKAIRIYEKKEVLENFVRGQYAAGQLDDQTFKGYREEDNVDPESTTETFVAGKFTIDNFRWSGVPFYVRTGKRLTEKGTRINIVFKQVPVNVFKTSIDEPCNDPTLPPNVLTIYIQPTEGFSFTLNGKKVGQGFATDPIKLEYRNSAEMVENSPEAYEKLMLDALNGDSTNFSHWEEVAQSWHIVDVIRQVWDQVQPDFPNYKAGSMGPEAAFELLEKDGFEWIWQPDHWYRERGKLD

SEQ ID NO: 2316 - DNA, 1470 bp, Pseudomonas putida
  CDS (1)..(1470): transl_table=11
atggctgcgatcagtgtcgatccttgcacgtttgccctgtttggcgcccttggcgacctggcgttgcgcaagctgtttcctgcgctctaccagctcgaccgggccaacctgctgcacccggacacccgcctgctggcgctggcccgcgaggcaggcagcgcgcaggagcacctgaacagcatcgaagcccacctgcgccggcatgtgcccgaggccgatatcgagcctgctgcattgggccgcttcctggcccggttgagctaccagcacctggacttcctgcaacctgagggttaccgggccctggccgagcagttgccgggcgacctgccgctgatcgcctacttcgccacggcggcagcggtgtacggggccatctgcgaaaacctcgacaacgccgggctggccccgcgtacccgggtggtgctggagaagcccatcggccacgacctggagtcgtcgcgacgggtcaacgatgccgtggcgcggttcttccccgaaaaccgggtgtaccgtatcgaccactatctgggcaaggagacggtgcagaacctgattgccctgcgcttcgccaatagcctgttcgaaacccagtggaaccagaattccatctcccacgtggagatcaccgttgccgagaaagtcggtatcgaaggccgctggggctacttcgacaaggccggccaactgcgcgacatgatccagaaccatctgctgcagttgctgtgcctgatcgccatggacccgcccagcgagctgtccgccgatgccattcgtgacgagaaggtgaaggtgctaaaggccctggcgccgatcacgggcgagggtttgagcacccaagtggtgcgtggtcagtatattgccggctacagcgagggcaagccggtacctggctacctggaagaggacaacgccaacgcccgcagcgacaccgaaaccttcgtcgccctgcgtgccgatatccgcaactggcgctggtcgggcgtgccgttctacctgcgtactggcaagcgcatgccgcagaagctgtcgcagatcgtcatccacttcaaggaaacgccgcactacattttcgccccggaacagcgtttgcaaatcggtaacaagctgatcattcgcctgcaaccggacgaaggcatttctttacgggtgatgaccaaggagcagggcctggacaaaggcatgcaactgcgcagcggtccgttgcagcttaatttttctgacacctggcgcagtacgcggattccggatgcctacgagcgcctgttgctcgaagtgatgcgtggcaaccagaacctgttcgtgcgcaaggacgaaatcgaatatgcctggaagtggtgcgaccagttgatcgccggctggcgtaatgcgggcgatgcgcccaagccttacgcggcgggctcctgggggccgatgagctcgattgcattgattacacgcgatgggagggcgtggtatggggatatctga

SEQ ID NO: 2317 - protein, 489 aa, Pseudomonas putida
MAAISVDPCTFALFGALGDLALRKLFPALYQLDRANLLHPDTRLLALAREAGSAQEHLNSIEAHLRRHVPEADIEPAALGRFLARLSYQHLDFLQPEGYRALAEQLPGDLPLIAYFATAAAVYGAICENLDNAGLAPRTRVVLEKPIGHDLESSRRVNDAVARFFPENRVYRIDHYLGKETVQNLIALRFANSLFETQWNQNSISHVEITVAEKVGIEGRWGYFDKAGQLRDMIQNHLLQLLCLIAMDPPSELSADAIRDEKVKVLKALAPITGEGLSTQVVRGQYIAGYSEGKPVPGYLEEDNANARSDTETFVALRADIRNWRWSGVPFYLRTGKRMPQKLSQIVIHFKETPHYIFAPEQRLQIGNKLIIRLQPDEGISLRVMTKEQGLDKGMQLRSGPLQLNFSDTWRSTRIPDAYERLLLEVMRGNQNLFVRKDEIEYAWKWCDQLIAGWRNAGDAPKPYAAGSWGPMSSIALITRDGRAWYGDI

SEQ ID NO: 2318 - DNA, 1782 bp, Nicotiana tabacum
  CDS (1)..(1782)
atggtgaccctttattcttctccttcaacccattcttctggggctgttgcttcttactctaattcctctattgggctctataattatcatcataataagcagatagcagtttcttcaattttgtcgagaaagtttggttctttgcaaattaatcagaagccattttggaatgccgttcgcatgcaagatggtgcagtagcgactccgcctagcaaaatcgaaaatgaaactcctttgaagaaattaaaaaatggaattttgccagtcgcacctccaaaggagcagaaagatacaattgatttcgacagcaacaaagctaaatcaactgtcagtattactgttgttggtgcttcaggagatcttgccaagaaaaagatatttcctgcactgtttgcactttattatgagggttgcctccctgagcatttcactatctttggctatgcccgaagtaagatgactgatgctgaactacggaacatggttagcaagacccttacttgcaggattgacaagagggaaaattgtggtgaaaagatggaacagtttctagaaaggtgcttctaccacagtggccaatacgattccctggaaaactttgcggagctcgataaaaagctgaaggaacatgaggctggaaggttttccaatcgtctattctacttatccattccaccaaatatttttataaatgcggttcgatgtgctagcctctctgcatcatctgctcatggctggacaagagtcattgtagagaaaccctttggtcgggattctgaatcctctgccgcattgacaagatcacttaagcagtacttgaatgaagatcaaatttttaggatcgatcactatttagggaaggagttggtggaaaacctttctgtccttcgtttctccaacctgatatttgaacccttgtggtcaaggcagtatataaggaatgtgcagtttattttctctgaagattttggcactgaaggacggggaggttattttgatcattatgggataatcagagacatcatgcaaaaccatctgcttcaaattctggccctctttgccatggaaacacctgtgagtttggatgcggaagatatcagaaatgaaaaggtaaaagttctgcgttccatgagacctttacaactagacgatgttatcattgggcagtacaaaagtcacacaaaaggagatgttacctatcccggttataccgacgacaagactgtaccgaaggacagtctaaccccaacttttgctgcagctgctcttttcatagataatgcacggtgggatggggtgcctttccttatgaaagctgggaaagctttacatactaggagtgcggaaataagagtacaattcaggcacgtaccaggaaatttatacaataagaactttggctcagatcttgaccaggcgaccaacgagcttgttatccgtgtccagcctaatgaagctatatacctaaagatcaataacaaagttcctggtctaggaatgagattggatcgcagtaatcttaatctcctttactcggcaagatactcgaaggagatccctgatccatatgagcggctgcttcttgatgctatagaaggtgaaaggcggcttttcatccgcagtgatgagctggatgctgcttggtctcttttcacaccagtgttaaaagaacttgaggataagaaaatagttccagaatattatccctatggaagtcgaggacctattggagcacattatcttgcagcgcgatataaagtaagatggggtgatcttgtgtag

SEQ ID NO: 2319 - protein, 593 aa, Nicotiana tabacum
MVTLYSSPSTHSSGAVASYSNSSIGLYNYHHNKQIAVSSILSRKFGSLQINQKPFWNAVRMQDGAVATPPSKIENETPLKKLKNGILPVAPPKEQKDTIDFDSNKAKSTVSITVVGASGDLAKKKIFPALFALYYEGCLPEHFTIFGYARSKMTDAELRNMVSKTLTCRIDKRENCGEKMEQFLERCFYHSGQYDSLENFAELDKKLKEHEAGRFSNRLFYLSIPPNIFINAVRCASLSASSAHGWTRVIVEKPFGRDSESSAALTRSLKQYLNEDQIFRIDHYLGKELVENLSVLRFSNLIFEPLWSRQYIRNVQFIFSEDFGTEGRGGYFDHYGIIRDIMQNHLLQILALFAMETPVSLDAEDIRNEKVKVLRSMRPLQLDDVIIGQYKSHTKGDVTYPGYTDDKTVPKDSLTPTFAAAALFIDNARWDGVPFLMKAGKALHTRSAEIRVQFRHVPGNLYNKNFGSDLDQATNELVIRVQPNEAIYLKINNKVPGLGMRLDRSNLNLLYSARYSKEIPDPYERLLLDAIEGERRLFIRSDELDAAWSLFTPVLKELEDKKIVPEYYPYGSRGPIGAHYLAARYKVRWGDLV

SEQ ID NO: 2320 - DNA, 1530 bp, Triticum aestivum
  CDS (1)..(1530)
atggcgggaactgactcctcggcgtcatcgagacaaagcagtttcaactcattagcaaaggacctagaacttcctttggagaaagggtgcctcaccatcgttgtacttggggcttctggagatcttgccaagaagaaaacgttcccggcactctaccacctttttgagcaggggttcttacaatctggtgaagtgcatatagtggggtatgcgagaacaaatctttctgatgatgggttgagagggcgcatccgtgcataccttaaaggagcctcagaggaacatgtttcagaattcttgcaattgataaaatatgtcagtggttcctatgacagtggagaaggttttgaaaaactgaacaaggaaatatcagattatgagatgtcaaacaactcaggaagctcccgtaggctcttttatttggcattgcctccatctgtctacccttcagtgtgcaaaatgatccgaacatattgcatgagtccaacttctcgcgctggatggactagagtaattgttgagaagccctttggaaggggcctggactctgcagaagaattgagttcccaacttggggagctattcgaggaagatcaactctacaggattgaccactacttgggaaaagagttggtccaaaacttgcttgtgcttcgttttgcgaaccgtttgttcttaccactttggaaccgtgacaatgttgataatatacagattgtattcagggaggacttcggaactgatggacgtggaggatattttgatcaatatggaatcatccgtggtatcattcagaaccatttgttgcaggttttctgtttggttgcaatggaaaagcctgtatctcttaagcctgagcacatcagagatgagaaagtcaaggttctgcaatccgtgaacccgataaaggacgaagaggtagtccttggacaatatcagggctacaaggaggaccctacagtgccagatgactctaacaccccaacgtttgcatctattgtacttagggtacacaatgaaagatgggaaggtgttcctttcattcttaaagctggtaaagcattaaactcaagaaaagcagaaattcgtgtgcagttcaaggatgttcccggtgacatttttaaatgtaagaagcagggaagaaatgagtttgtcatacgcctccagccatcagaagccatgtacatgaaactaactgtgaagaaacctggattggaaatggctactgaacagagtgaacttgatctgtcatatgggatgcgttaccaagatgtcaaaattccagaggcatacgagcgcctcattttggatacaataagaggagaccagcaacactttgtgcgccgagatgagctgaaggctgcctggcagatcttcactcccttgttgcacgacatcgacgctggcaagctgaaggctgtttcatacaagcctggcagccgaggccccaaggaagctgatgaactgagtgagaaggttgggtacatgcagacccacggttacatctggataccacccacccttgcatag

SEQ ID NO: 2321 - protein, 509 aa, Triticum aestivum
MAGTDSSASSRQSSFNSLAKDLELPLEKGCLTIVVLGASGDLAKKKTFPALYHLFEQGFLQSGEVHIVGYARTNLSDDGLRGRIRAYLKGASEEHVSEFLQLIKYVSGSYDSGEGFEKLNKEISDYEMSNNSGSSRRLFYLALPPSVYPSVCKMIRTYCMSPTSRAGWTRVIVEKPFGRGLDSAEELSSQLGELFEEDQLYRIDHYLGKELVQNLLVLRFANRLFLPLWNRDNVDNIQIVFREDFGTDGRGGYFDQYGIIRGIIQNHLLQVFCLVAMEKPVSLKPEHIRDEKVKVLQSVNPIKDEEVVLGQYQGYKEDPTVPDDSNTPTFASIVLRVHNERWEGVPFILKAGKALNSRKAEIRVQFKDVPGDIFKCKKQGRNEFVIRLQPSEAMYMKLTVKKPGLEMATEQSELDLSYGMRYQDVKIPEAYERLILDTIRGDQQHFVRRDELKAAWQIFTPLLHDIDAGKLKAVSYKPGSRGPKEADELSEKVGYMQTHGYIWIPPTLA

SEQ ID NO: 2322 - DNA, 1542 bp, Triticum aestivum
  CDS (1)..(1542)
atggcgggaactgactcctcggcgtcatcgagacaaagcagtttcaactcattagcaaaggacctagaacttcctttggagcaagggtgcctcaccatcgttgtacttggggcttctggagatcttgccaagaagaaaacgttcccggcactctaccacctttttgagcaggggttcttacaatctggtgaagtgcatatagtggggtatgcgagaacaaatctttctgatgatgggttgagagggcgcatccgtgcataccttaaaggagcctcagaggaacatgtttcagaattcttgcaattgataaaatatgtcagtggttcctatgacagtggagaaggttttgaaaaactgaacaaggaaatatcagattatgagatgtcaaacaactcaggaagctcccgtaggctcttttatttggcattgcctccatctgtctacccttcagtgtgcaaaatgatccgaacatattgcatgagtccaacttctcgcgctggatggactagagtaattgttgagaagccctttggaagggacctggactctgcagaagaattgagttcccaacttggggagctattcgaggaagatcaactctacaggattgaccactacttgggaaaagagttggtccaaaacttgcttgtgcttcgttttgcgaaccgtttgttcttaccactttggaaccgtgacaatgttgataatatacagattgtattcagggaggacttcggaactgatggacgtggaggatattttgatcaatatggaatcatccgtgatatcattcagaaccatttgttgcaggttttctgtttggttgcaatggaaaagcctgtatctcttaagcctgagcacatcagagatgagaaagtcaaggttctgcaatccgtgaacccgataaaggacgaagaggtagtccttggacaatatcagggctacaaggatgaccctacagtgccagatgactctaataccccaacgtttgcatctattgtacttagggtacacaatgaaagatgggaaggtgttcctttcattcttaaagctggtaaagcattaaactcaagaaaagcagaaattcgtgtgcagttcaaggatgttcccggtgacatttttaaatgtaagaagcagggaagaaatgagtttgtcatacgcctccagccatcagaagccatgtacatgaaactaactgaattcgtgcaggtgaagaaacctggattggaaatggctactgaacagagtgaacttgatctgtcatatgggatgcgttaccaagatgtcaaaattccagaggcatacgagcgcctcattttggatacaataagaggggaccagcaacactttgtgcgccgagatgagctgaaggctgcctggcagatcttcactcccttgttgcacgacatcgacgctggcaagctgaaggctgtttcatacaagcctggcagccgaggccccaaggaagctgatgaactgagtgagaaggttgggtacatgcagacccacggttacatctggataccacccacccttgcatag

SEQ ID NO: 2323 - protein, 513 aa, Triticum aestivum
MAGTDSSASSRQSSFNSLAKDLELPLEQGCLTIVVLGASGDLAKKKTFPALYHLFEQGFLQSGEVHIVGYARTNLSDDGLRGRIRAYLKGASEEHVSEFLQLIKYVSGSYDSGEGFEKLNKEISDYEMSNNSGSSRRLFYLALPPSVYPSVCKMIRTYCMSPTSRAGWTRVIVEKPFGRDLDSAEELSSQLGELFEEDQLYRIDHYLGKELVQNLLVLRFANRLFLPLWNRDNVDNIQIVFREDFGTDGRGGYFDQYGIIRDIIQNHLLQVFCLVAMEKPVSLKPEHIRDEKVKVLQSVNPIKDEEVVLGQYQGYKDDPTVPDDSNTPTFASIVLRVHNERWEGVPFILKAGKALNSRKAEIRVQFKDVPGDIFKCKKQGRNEFVIRLQPSEAMYMKLTEFVQVKKPGLEMATEQSELDLSYGMRYQDVKIPEAYERLILDTIRGDQQHFVRRDELKAAWQIFTPLLHDIDAGKLKAVSYKPGSRGPKEADELSEKVGYMQTHGYIWIPPTLA

SEQ ID NO: 2324 - DNA, 1530 bp, Triticum aestivum
  CDS (1)..(1530)
atggcgggaactgactcctcggcgtcatcgagacaaagcagtttcaactcattagcaaaggacctagaacttcctttggagcaagggtgcctcaccatcgttgtacttggggcttctggagatcttgccaagaagaaaacgttcccggcactctaccacctttttgagcaggggttcttacaatctggtgaagtgcatatagtggggtatgcgagaacaaatctttctgatgatgggttgagagggcgcatccgtgtataccttaaaggagcctcagaggaacatgtttcagaattcttgcaattgataaaatatgtcagtggttcctatgacagtggagaaggttttgaaaaactgaacaaggaaatatcagattatgagatgtcaaacaactcaggaagctcccgtaggctcttttatttggcattgcctccatctgtctacccttcagtgtgcaaaatgatccgaacatattgcatgagtccaacttctcgcgctggatggactagagtaattgttgagaagccctttggaagggacctggactctgcagaagaattaagttcccaacttggggagctattcgaggaagatcaactctacaggattgaccactacttgggaaaagagttggtccaaaacttgcttgtgcttcgttttgcgaaccgtttgttcttaccactttggaaccgtgacaatgttgataatatacagattgtattcagggaggacttcggaactgatggacgtggaggatattttgatcaatatggaatcatccgtgatatcattcagaaccatttgttgcaggttttctgtttggttgcaatggaaaagcctgtatctcttaagcctgagcacattagagatgagaaagtcaaggttctgcaatccgtgaacccgataaaggacgaagaggtagtccttggacaatatcagggctacaaggatgaccctacagtgccagatgactctaataccccaacgtttgcatctattgtacttagggtacacaatgaaagatgggaaggtgttcctttcattcttaaagctggtaaagcattaaactcaagaaaagcagaaattcgtgtgcagttcaaggatgttcccggtgacatttttaaatgtaagaagcagggaagaaatgagtttgtcatacgcctccagccatcagaagccatgtacatgaaactaactgtgaagaaacctggattggaaatggctactgaacagagtgaacttgatctgtcatatgggatgcgttaccaagatgtcaaaattccagaggcatatgagcgcctcattttggatacaataggaggagaccagcaacactttgtgcgccgagatgagctgaaggctgcctggcagatcttcactcccttgttgcacgacatcgacgccggcaagctgaaggctgtttcatacaagcctggcagccgaggccccaaggaagctgatgaactgagtgagaaggttgggtacatgcagacccacggttacatctggataccacccacccttgcatag

SEQ ID NO: 2325 - protein, 509 aa, Triticum aestivum
MAGTDSSASSRQSSFNSLAKDLELPLEQGCLTIVVLGASGDLAKKKTFPALYHLFEQGFLQSGEVHIVGYARTNLSDDGLRGRIRVYLKGASEEHVSEFLQLIKYVSGSYDSGEGFEKLNKEISDYEMSNNSGSSRRLFYLALPPSVYPSVCKMIRTYCMSPTSRAGWTRVIVEKPFGRDLDSAEELSSQLGELFEEDQLYRIDHYLGKELVQNLLVLRFANRLFLPLWNRDNVDNIQIVFREDFGTDGRGGYFDQYGIIRDIIQNHLLQVFCLVAMEKPVSLKPEHIRDEKVKVLQSVNPIKDEEVVLGQYQGYKDDPTVPDDSNTPTFASIVLRVHNERWEGVPFILKAGKALNSRKAEIRVQFKDVPGDIFKCKKQGRNEFVIRLQPSEAMYMKLTVKKPGLEMATEQSELDLSYGMRYQDVKIPEAYERLILDTIGGDQQHFVRRDELKAAWQIFTPLLHDIDAGKLKAVSYKPGSRGPKEADELSEKVGYMQTHGYIWIPPTLA

SEQ ID NO: 2326 - DNA, 1749 bp, Solanum tuberosum
  CDS (1)..(1749)
atggtaaccctttattcttccccttccactaactgttctggggccttttcatcatactccaattcttctattgggttctacaattatcattacaacttccctatttcatccagaaagtttggttctcacaagatttctttgcaaattaatgccgttcgcatgcaagatggtgctgtagtggctcaacctagcaaaacccaagatgaaactcctttgaagaaattaaaagatggaattttgtcaaaggagcagaaacatacatttgattttgattgcaacaaagataaatcaactgtcagtattactgttgttggtgcttcaggagatcttgccaaaaaaaagatatttcctgcactttttgcactttattatgagggttgcttaccggagcatttcactatttttggctatgcccggagtaagatgtctgatgacgaactcaggaacatggtcagcaagacacttacttgcaggattgataagagggaaaattgtggtgaaaagatggaacagtttctagaaaggtgtttctaccatagtggacaatatgattcccaggaacactttgcagagcttgataaaaagctgaaagaacatgaggctggaaggttttccaatcgtctgttctacttgtccattccaccaaatatttttataaatgctgtacgatgtgcaagcctctctgcatcatctgctcatggatggactagagtcattgtagagaaaccctttggtcgggattctgaatcctctgctgcattaacaggagcacttaagcagtacttgaaggaagatcaaattttcaggattgatcactatttagggaaggagcttgtggaaaacctttctgtccttcgtttcttcaacttgatatttgaacccttatggtcaaggcagtatataaggaacgtgcagtttattttctctgaagattttggcactgaaggaaggggaggttattttgatcattatgggataattagagacattatgcaaaaccatttgcttcaaattcttgccctctttgccatggaaacacctgtcagtttggatgcagaagatatcaggaatgaaaaggtaaaagttctgcgttctatgagacctttacaactagatgatgttatcgtcgggcagtacaaaagtcacacaaaagggggtgttaactatcctggttataccgacgacaagactgtacccaaggacagtctaaccccaacttttgctgcagctgctcttttcatagataatgcaagatgggatggggtgcctttccttatgaaggctggaaaagctttacataccaggagtgcggaaataagagtacaattcaggcacgtgccgggaaatttatacaataagaactttggctcagatctagatcaggcaacaaacgagcttgttatccgtgttcaacctgatgaagctatatacctaaagatcaataacaaagttcctggtctaggaatgagactggatcgcagtaatcttaatctgctttactcagcaagatacgcgaaggagatccctgatgcatatgagcggctacttcttgatgccatagaaggtgaacgtaggctttttattcgcagtgatgaactggatgctgcgtggtctcttttcacaccagtgttgaaagaacttgagcataagaaaatagtaccggaaagctacccctatggaagtcgaggacctattggagcacattaccttgcagcacgatataaagtaagatggggtgatcttgcttag

SEQ ID NO: 2327 - protein, 582 aa, Solanum tuberosum
MVTLYSSPSTNCSGAFSSYSNSSIGFYNYHYNFPISSRKFGSHKISLQINAVRMQDGAVVAQPSKTQDETPLKKLKDGILSKEQKHTFDFDCNKDKSTVSITVVGASGDLAKKKIFPALFALYYEGCLPEHFTIFGYARSKMSDDELRNMVSKTLTCRIDKRENCGEKMEQFLERCFYHSGQYDSQEHFAELDKKLKEHEAGRFSNRLFYLSIPPNIFINAVRCASLSASSAHGWTRVIVEKPFGRDSESSAALTGALKQYLKEDQIFRIDHYLGKELVENLSVLRFFNLIFEPLWSRQYIRNVQFIFSEDFGTEGRGGYFDHYGIIRDIMQNHLLQILALFAMETPVSLDAEDIRNEKVKVLRSMRPLQLDDVIVGQYKSHTKGGVNYPGYTDDKTVPKDSLTPTFAAAALFIDNARWDGVPFLMKAGKALHTRSAEIRVQFRHVPGNLYNKNFGSDLDQATNELVIRVQPDEAIYLKINNKVPGLGMRLDRSNLNLLYSARYAKEIPDAYERLLLDAIEGERRLFIRSDELDAAWSLFTPVLKELEHKKIVPESYPYGSRGPIGAHYLAARYKVRWGDLA

SEQ ID NO: 2328 - DNA, 1773 bp, Dunaliella bioculata
  CDS (1)..(1773)
atgttgggtggaaggcagttgggtatggacaagctgtcccggaagctgtccggtgctcaacctgttgcgaactactcgcgtcgcccgatttcgcgcccatttcgcgcagcgcctgttcctcgagtcgcgcagaattcccaagatgctgtgacccagaatggcagcgggacaagcgaggcacccacctcctggcagaacccagcactcaagaaggccatccccactgtggtttctctctcagatgaggctgcagccatggcagctgatgactggagccaatctagcttgtcggttgttgtggtgggcgccagcggcgacctggccaagaagaaaatttttcctgcactttttgcccttttctatgagggcctgctgccaccggacttccagctctttggatatgcacgcagcaagatgactgatgaggagttccgagacctcatcggcaacaccctgacgtgccgcattgatgccaggtcccgctgcgaagactcccaggccgccttcttgtcgcgctgcttctactgcccaggccagtatgatgcccctgagggctatgccaacttggacaagaagtgcaaggagcaggaggccctgactggcaagatggtagccaaccgcatgttcttcctgtccatccctcccaacgtgtttgtgcaagcagcaggcggcgcagccgacaactgctcttctcccaccggctggacgcgcgtcattgtggagaagccctttggcagggacagcgccagcagtgctgagcttggcaggggtctggccaggcatttgacagaggaccagatctaccgtattgaccactacctggggaaggagctgattgagaacctgacagtgctgcgcttttcaaaccttgtgtttgagcccttgtggagcaggcagtacatccgcaatgtgcaggtgatcttctcagaagactttggcactgaaggccgcggaggctacttcgaccggtacggcatcatccgcgatgtcatgcagaaccacttgctccagattgtggcattgttcgccatggagccaccggtgtccctggatggagaggccatccgtaatgagaaggtcaaggtcctgcagtctatgtctcaagtggcgctggaggatgtcacactgggccaataccgcggcaggtctggcgctggccgttccggtggtgctgatttgcctggctacctggatgatgcaacagtgcccaagggctccctgtgccccacctttgctgccattgcgctgcacatcaacaatgcacgctgggatggtgtgccattcctgctcaaggctggcaaggcgctgcacacgcgcggcgctgagatccgtgtgcagttcaggcatgtgcccggcaacattttcaagcacaaagtgggccccaacatcgacatgaccaccaacgagcttgtgatccgcattcagccgcgggagtccatctacctcaagatcaacaacaaggtccctggcttgggcatgcgcctggataccaccaagctggacctggtgtacaacgacgcatactccaaggagttgccagatgcgtatgagcgcctcctgttggatgtggtgaacggcgataagcgcttgttcatccgcgatgatgagctggagcaggcctggaacatctttaccccagtgctgcatgagatcgagcgcagaaaggtggcacctgagctgtacccctacggcagcagaggccctgtgggggcacactacttggctgccaagtacaacgtgcgctggggagacttgacggaggatgagatctga

SEQ ID NO: 2329 - protein, 590 aa, Dunaliella bioculata
MLGGRQLGMDKLSRKLSGAQPVANYSRRPISRPFRAAPVPRVAQNSQDAVTQNGSGTSEAPTSWQNPALKKAIPTVVSLSDEAAAMAADDWSQSSLSVVVVGASGDLAKKKIFPALFALFYEGLLPPDFQLFGYARSKMTDEEFRDLIGNTLTCRIDARSRCEDSQAAFLSRCFYCPGQYDAPEGYANLDKKCKEQEALTGKMVANRMFFLSIPPNVFVQAAGGAADNCSSPTGWTRVIVEKPFGRDSASSAELGRGLARHLTEDQIYRIDHYLGKELIENLTVLRFSNLVFEPLWSRQYIRNVQVIFSEDFGTEGRGGYFDRYGIIRDVMQNHLLQIVALFAMEPPVSLDGEAIRNEKVKVLQSMSQVALEDVTLGQYRGRSGAGRSGGADLPGYLDDATVPKGSLCPTFAAIALHINNARWDGVPFLLKAGKALHTRGAEIRVQFRHVPGNIFKHKVGPNIDMTTNELVIRIQPRESIYLKINNKVPGLGMRLDTTKLDLVYNDAYSKELPDAYERLLLDVVNGDKRLFIRDDELEQAWNIFTPVLHEIERRKVAPELYPYGSRGPVGAHYLAAKYNVRWGDLTEDEI

SEQ ID NO: 2330 - DNA, 1551 bp, Mesembryanthemum crystallinum
  CDS (1)..(1551)
atggggtcaggcgagtggcacgtggaaaaaagatcgagcttgaagagtgaattatctaaagacataggagagtctgaaagttcacaagaatgtggctctctttctatcattgttctaggtgcctctggtgatcttgccaagaagaagaccttccctgctctgtttaatctttaccgccagggatttcttcctcccagtgaggttcacatatttggttatgcaaggtcaaagatgacagatgatgacttgagagatcgcatacgtggacatctgattcccaggaatgtaacagcggagatatctgaggatgttttgaactttctgcatctgattaaatatgttagtgggtcttatgacactgaggacggttttcacttgttagatgatgaaatatcaaagtatgagtgtcaaaagaacagccaggaacattctaagagactcttttatcttgctcttcctccatcagtatatccatcagtctgcagaatgataaagctttgctgtatgaataaatctgatcttgggtggactcggattgttgttgagaagccttttggaagagacttagaatcagcagaacaacttagtgctcagattggagagttgtttgatgagtcacagatttaccgaattgatcactatttggggaaggagttggtgcagaacttgctggtgatgcgcttcgcgaatcgtctttttctacctctctggaatcgggacaatattgcgaatgtgcagattgtcttcagggaagattttggaacacaaggtcgtggtgggtactttgatcaatatggaataatccgtgacattattcaaaaccaccttttgcaggttctttgtttagttgccatggagaagcctgtctcaatcaaaccagagcacattcgtgatgagaaagtgaaggttctccaagctgttaatctaataaaagatgaagaggttgttcttgggcaatatgaaggctacaaggatgatccaactgttcccgaagactcaaacactccgacatttgcgactatggttttgcggatacacaatgaaagatgggaaggtgttccatttatactaaaggcagggaaagcattgaattcacgaaaagcagaaatacgtgttcagttcaaagatgttcctggtgacatattcaaatgtaacaagcaggggagaaatgagtttgtaatacggctacagccttcagaagcactctatatgaagcttacggtgaagcagcctgggcttgaaatgtcaactatacaaagtgagctggatttgtcgtatgggcagcggtatcagggagtcgttattccagaggcctatgagcgtctgattctggacacgataaaaggcgatcaacaacattttgtccgtagagatgagttgaaggctgcgtgggagatctttactcctcttctacacagaattgataagggagaattcaagccaatttcatacaagcctggaactcgaggcccagcagaagcagatgagctactggcaaaggctggatacgttcaaactcatgggtacatctggattccacccaccttatag

SEQ ID NO: 2331 - protein, 516 aa, Mesembryanthemum crystallinum
MGSGEWHVEKRSSLKSELSKDIGESESSQECGSLSIIVLGASGDLAKKKTFPALFNLYRQGFLPPSEVHIFGYARSKMTDDDLRDRIRGHLIPRNVTAEISEDVLNFLHLIKYVSGSYDTEDGFHLLDDEISKYECQKNSQEHSKRLFYLALPPSVYPSVCRMIKLCCMNKSDLGWTRIVVEKPFGRDLESAEQLSAQIGELFDESQIYRIDHYLGKELVQNLLVMRFANRLFLPLWNRDNIANVQIVFREDFGTQGRGGYFDQYGIIRDIIQNHLLQVLCLVAMEKPVSIKPEHIRDEKVKVLQAVNLIKDEEVVLGQYEGYKDDPTVPEDSNTPTFATMVLRIHNERWEGVPFILKAGKALNSRKAEIRVQFKDVPGDIFKCNKQGRNEFVIRLQPSEALYMKLTVKQPGLEMSTIQSELDLSYGQRYQGVVIPEAYERLILDTIKGDQQHFVRRDELKAAWEIFTPLLHRIDKGEFKPISYKPGTRGPAEADELLAKAGYVQTHGYIWIPPTL

SEQ ID NO: 2332 - DNA, 1731 bp, Arabidopsis thaliana
  CDS (1)..(1731)
atggcgacacattctatgatcattccttctccttcttcttcttcctcgtctctcgctactgctgcgtctccgtttaaagagactctaccactctttagtagatctctcacattcccgagaaaatccttgttttctcaggttcgcttgagattcttcgccgagaaacattctcagcttgatacttcaaatgggtgtgccactaatttcgcttctttacaagattctggagatcaacttacagaggaacatgttacaaaaggagagtctactcttagtattacagttgttggagcgtcaggggacttagccaagaagaagatatttcctgcattgtttgctctcttttatgagggttgtcttcctcaggacttttctgtttttggttatgctcggactaaactcactcatgaagagcttcgtgacatgattagtagtactttaacttgccggattgatcagagggaaaaatgtggggataagatggagcagttcttgaaaagatgcttttaccattcgggtcagtataactcggaagaggattttgcggaactaaacaagaagctcaaagagaaagaggcaggaaagatatcaaacaggctgtactatttgtcgatacccccaaacatattcgttgatgtggttaggtgtgcaagtcttagagcctcctcagagaatggctggacaagggtcattgtggaaaagccatttggtcgtgactctgaatcatccggagagttaactagatgtctgaaacagtatcttacagaggagcaaatcttcaggattgatcactatttgggaaaggagcttgttgagaacctttcagtgctccgattctcaaatcttgttttcgagcctctgtggtcaagaaattacatacgcaacgttcagctgattttttctgaggatttcggaacagaagggcgtggaggttactttgatcaatatggaatcatacgagacatcatgcaaaaccatctcttgcaaatacttgcactttttgcaatggagacgccagtgagcttagatgctgaggacataagaagtgaaaaggtgaaagttttgagatcaatgaaaccgttgcggcttgaagatgtggttgttggtcaatacaaaggccataacaagggaggaaaaacttatccaggttatacagacgatccaacggttccaaatcacagtctcactcctacatttgctgcagcagccatgttcatcaacaatgcgagatgggacggtgttccttttcttatgaaagctggaaaagctctccataccagaggagcagagatcagagttcagttcagacatgtcccaggaaacttgtacaagaaaagttttgctactaatttagacaatgcaacaaatgaactagtgattagagttcagcctgatgaagggatatacctgaggatcaacaacaaagttcctggtcttggaatgagactagatcgcagcgaccttaaccttctatatcgatccaggtatccaagagagataccagatgcatatgaaagactgcttctcgatgcaatcgaaggagagaggaggttgtttatcagaagtgatgagctagatgcagcatgggatctattcacaccggctttgaaggaactagaggagaagaaaatcattcctgagctctatccatatggaagcagaggtcctgttggtgcacattaccttgcatctaagtacaatgtgagatggggagatcttggagaagcttaa

SEQ ID NO: 2333 - protein, 576 aa, Arabidopsis thaliana
MATHSMIIPSPSSSSSSLATAASPFKETLPLFSRSLTFPRKSLFSQVRLRFFAEKHSQLDTSNGCATNFASLQDSGDQLTEEHVTKGESTLSITVVGASGDLAKKKIFPALFALFYEGCLPQDFSVFGYARTKLTHEELRDMISSTLTCRIDQREKCGDKMEQFLKRCFYHSGQYNSEEDFAELNKKLKEKEAGKISNRLYYLSIPPNIFVDVVRCASLRASSENGWTRVIVEKPFGRDSESSGELTRCLKQYLTEEQIFRIDHYLGKELVENLSVLRFSNLVFEPLWSRNYIRNVQLIFSEDFGTEGRGGYFDQYGIIRDIMQNHLLQILALFAMETPVSLDAEDIRSEKVKVLRSMKPLRLEDVVVGQYKGHNKGGKTYPGYTDDPTVPNHSLTPTFAAAAMFINNARWDGVPFLMKAGKALHTRGAEIRVQFRHVPGNLYKKSFATNLDNATNELVIRVQPDEGIYLRINNKVPGLGMRLDRSDLNLLYRSRYPREIPDAYERLLLDAIEGERRLFIRSDELDAAWDLFTPALKELEEKKIIPELYPYGSRGPVGAHYLASKYNVRWGDLGEA

SEQ ID NO: 2334 - DNA, 2112 bp, Arabidopsis thaliana
  CDS (142)..(1932)
gatctcaaaaggttctcttatttgcagtatcgccccttaaatcctttttcgatgtttcttatgttcatcattattttttaactaaaaatctcatctttagacaacaattcaatttgccatctctctgttgtatctttgacgatggcggctttgtcttcctccgtcaccacccgatcatatcattccggttatttggcttctttctcaccggttaacggtgaccgacatcgatcactctcgttcctgtctgcttctcctcaaggattgaatcctcttgacctctgtgttagattccagaggaagtctggtcgtgcttctgtctttatgcaagatggtgcaatagtcactaattcaaattcatcagagagtaaaacttctcttaagggattgaaagatgaggtgctatcagctttatctcaagaagcagccaaggttggagtagaatctgatggtcaaagccagtcaacagttagtattacggtggttggagcctctggtgatcttgctaagaagaagattttcccggctcttttcgccctttactatgaaggttgtctccctgagcattttacaatatttggatattctaggagtaagatgacagatgttgaacttagaaacatggtcagcaaaaccctcacttgcagaattgataagagggcaaactgtggtgaaaagatggaagaatttctcaagagatgtttttaccattctggtcagtatgattctcaggaacattttactgaattggataagaagctcaaggaacatgaggctggaagaatctcaaaccgcctcttttatttgtctatccctccaaatatatttgtagatgctgtgaaatgtgcaagcacttctgcttcatctgtcaatggatggactagggttatcgtcgagaaaccttttggtcgagattctgaaacctcggctgctttaacgaaatccctcaagcagtatttggaggaagatcaaatttttaggatagaccattacctaggaaaggagctagtcgagaacttatctgttcttcgattctcaaaccttatatttgagccgctatggtcaaggcagtacataaggaacgtgcaatttatattttctgaggatttcggcactgaaggacgtggagggtactttgacaattacggaataataagagatataatgcagaatcatctgcttcaaatcttagccctctttgccatggaaacgcctgttagtttggatgcagaggatatcagaaatgaaaaggttaaggtgttacgttcaatgaggccaattcgagttgaagatgtggtaataggacaatacaagagccacacaaagggaggagtcacatatcctgcctacaccgatgataaaactgtaccaaaaggtagtctgactccaacatttgcagctgctgctcttttcatcgacaatgcaagatgggacggtgtgccctttttaatgaaagcgggcaaagcactacacaccaggagtgcagagataagggtgcagttcaggcatgttccggggaatttgtataaccggaatactggttctgatcttgatcaagctacaaatgagcttgtgatccgtgtccaaccagatgaagcaatctatttgaaaatcaacaacaaggtccctggtttaggaatgagattagatcgcagtaacttgaatcttctatactcagcaaggtattcaaaggagataccagatgcatatgagaggcttctgttagatgcaatagaaggagaaagaagattgttcataagaagtgacgagcttgatgcagcttggtcgctattcactccattgcttaaagagattgaagagaagaagagaatccctgagtactatccttatggtagccgtggtcctgttggtgctcattatctagctgctaaacacaaggtgcaatggggtgacgtcagtattgaccagtaaaacattttcttgtttgtattctcttttttttacattgataatagatttatctaggattcaagctttttctacgcctctttttacagctttaatttgtgcaatttggttatgtaccatttaataaataaataaaccaaaggggtttctcttattctctacaaggaaaatgtcttcttttta

SEQ ID NO: 2335 - protein, 596 aa, Arabidopsis thaliana
MAALSSSVTTRSYHSGYLASFSPVNGDRHRSLSFLSASPQGLNPLDLCVRFQRKSGRASVFMQDGAIVTNSNSSESKTSLKGLKDEVLSALSQEAAKVGVESDGQSQSTVSITVVGASGDLAKKKIFPALFALYYEGCLPEHFTIFGYSRSKMTDVELRNMVSKTLTCRIDKRANCGEKMEEFLKRCFYHSGQYDSQEHFTELDKKLKEHEAGRISNRLFYLSIPPNIFVDAVKCASTSASSVNGWTRVIVEKPFGRDSETSAALTKSLKQYLEEDQIFRIDHYLGKELVENLSVLRFSNLIFEPLWSRQYIRNVQFIFSEDFGTEGRGGYFDNYGIIRDIMQNHLLQILALFAMETPVSLDAEDIRNEKVKVLRSMRPIRVEDVVIGQYKSHTKGGVTYPAYTDDKTVPKGSLTPTFAAAALFIDNARWDGVPFLMKAGKALHTRSAEIRVQFRHVPGNLYNRNTGSDLDQATNELVIRVQPDEAIYLKINNKVPGLGMRLDRSNLNLLYSARYSKEIPDAYERLLLDAIEGERRLFIRSDELDAAWSLFTPLLKEIEEKKRIPEYYPYGSRGPVGAHYLAAKHKVQWGDVSIDQ

SEQ ID NO: 2336 - DNA, 1800 bp, Arabidopsis thaliana
  CDS (1)..(1800)
atgtcgtctctctcctgccctacctaccgctcccgcacttcgtcttcgtctcctttcttgtcgaatcatcatcattcttcgctgatcaatgttgttgacccacgccgctcactctccttccactacgcttctcctcaggggcttaatctagctgagctctgtgttgttagatcgcagaggaggtccgttcagagttctgttgtcgtgcaagatggatcagtagccaccgagtcaagctcgtccgaggaggcgaaagatgtaggggtgttaacgattccttcacttgaagctgacaaggttgtagcagagtctgatggcggtgaacaactttcaacagttagtatcacggtggtgggagcttctggtgatcttgccaagaagaaaatattcccagctcttttcgcactttactatgaaggctgtcttcctgagcattttaccatttttggctatgcaaggagtaagatgacagatgctgaacttagagttatggtcagcaaaacattgacatgtagaattgataagagggcaaactgcggtgaaaagatggaagagtttctcaagagatgtttttaccattcgggtcagtatgattctcaggaacattttgttgcattggacgagaagctcaaggagcatgagggtggaagactttcgaaccgtcttttctatctttcaatccctccaaatatctttgttgacgcggtgaaatgtgcaagctcatctgcttcatctgtcaatggatggactagggtcattgtcgagaaaccttttggccgggactccaaaacctcggctgcattaacaaagtctcttaagcagtacctggaggaagaccaaatatttaggatagaccattacttagggaaggagctggttgagaacttgtcggttcttcgattctcaaatcttatatttgaaccgctatggtcaaggcagtatataaggaacgtgcaattcattttttctgaggatttcggcactgaaggacgcggagggtacttcgacaattacggaataataagagatataatgcagaatcatctgcttcagatattagctcttttcgccatggaaacacctgtgagtttggatgcagaggatatcagaaatgaaaaggtaaaggtactacgttcaatgagaccaataaaacttgaagatgtggtgataggacagtacaagagccacagcataggaggagtcacttatccaagctatactgatgataaaactgtgccaaaaggtagtctgaccccgacatttgcagctgctgcactcttcatcgacaatgcaagatgggatggtgtaccttttctaatgaaagctgggaaagcactaaacacccgaagtgcggagataagagtccagttcaggcatgtgcctggaaatttatataaccggaattctggtactgatcgtgatcagaccacaaatgagcttgtcatccgcgtccaacctgatgaagctatctatttgaaaatcaacaacaaggtccctggtttaggaatgagattagatcagagtaacttaaatcttctctattcagcaaggtattcaaaggagattccagatgcatatgagaggcttttgttagatgcgatcgaaggtgaacgcagattgttcataagaagcgatgaacttgacgctgcttgggcgcttttcactccattgctcaaagagatagaagaaaagaagacaaccccagaattctatccttacggcagtcgtggtccagtcggtgcccattatctagccgcaaaacacaaggtccaatggggagacctaagtcttgatcagtga

SEQ ID NO: 2337 - protein, 599 aa, Arabidopsis thaliana
MSSLSCPTYRSRTSSSSPFLSNHHHSSLINVVDPRRSLSFHYASPQGLNLAELCVVRSQRRSVQSSVVVQDGSVATESSSSEEAKDVGVLTIPSLEADKVVAESDGGEQLSTVSITVVGASGDLAKKKIFPALFALYYEGCLPEHFTIFGYARSKMTDAELRVMVSKTLTCRIDKRANCGEKMEEFLKRCFYHSGQYDSQEHFVALDEKLKEHEGGRLSNRLFYLSIPPNIFVDAVKCASSSASSVNGWTRVIVEKPFGRDSKTSAALTKSLKQYLEEDQIFRIDHYLGKELVENLSVLRFSNLIFEPLWSRQYIRNVQFIFSEDFGTEGRGGYFDNYGIIRDIMQNHLLQILALFAMETPVSLDAEDIRNEKVKVLRSMRPIKLEDVVIGQYKSHSIGGVTYPSYTDDKTVPKGSLTPTFAAAALFIDNARWDGVPFLMKAGKALNTRSAEIRVQFRHVPGNLYNRNSGTDRDQTTNELVIRVQPDEAIYLKINNKVPGLGMRLDQSNLNLLYSARYSKEIPDAYERLLLDAIEGERRLFIRSDELDAAWALFTPLLKEIEEKKTTPEFYPYGSRGPVGAHYLAAKHKVQWGDLSLDQ

SEQ ID NO: 2338 - DNA, 1878 bp, Arabidopsis thaliana
  CDS (1)..(1878)
atgtctctctccagttgcttgcttcccttttctcaatcagcgacggctccgtcttcctccgtctgctcttgccatctcgccgcctctttttctaattttccggtttcgtcaagagactatagtttctccagaagtggaagccttgttctcaacggaggaggctcgaatctctgccggagattctgtggtttgaaactgtggatacttaagagcttgaatcgtagacaaggcaacaacagaaaacatcagcctgtaaacgagcttacaacacactcaaagcacactttcctcagcgatgatgaacgaggttttgctgaagaaactagagctgaagatttacgaccagaagagaatattctgggaacggatttgaatgatgggtttcacaatgttggagacttaccacctgtgtcaaaacaactctcggatgatctttcagatgttcgaagaagggcctcactttgcattgctgttgtaggagccactggtgagctagcaagagggaagattttcccggcattgtttgcgttgtattatagcggctaccttcctgaggatgttgctatatttggggtttcaagaaagaatctgacagatgaagacctcagatccatcattgcatcaacgctgacttgccgtgttgatcatcaggagaattgtgggggcaagatggatgcatttcagagtagaacatactatatcaatggaggttataataacagggatgggatgtcccgacttgccgagagaatgaaacagattgagggagaatcagaagcaaatagaatcttttacctctcagtacctcaagaagctctggtggatgtggcatgcaccattggagataacgctcaggcaccacgaggctggactcgaataatagttgagaaaccttttggttttaactcacattcgtctcatcagttaacaaagtcacttctctctaagtttgaagagaagcaaatctacaggatagatcacatgttaggaagaaacctcattgaaaatctgacagtgttaaggttttcaaatctagtttttgaaccactatggaacagaacatacatacgcaatatacaggttattatatcagaatcaattgcgcaaacagaaaagttttctgatggatatggaataatacgggacatagtgcacagccatatacttcagacaatcgcattacttgccatggaacctccgataagtctcgatggtgaagatatccgaaatgaaaaggtgaaggttttaagatcaattcgcaagatagacccgcgtgatgtcatccttggccagtataaatccagttcccgagacaagaacggtgtgatcttgaacggtgtagaccctacatattgtgcagcagccttgtatattgataatgcacgttgggatggtgtacctttccttgtaagagttggcactggcctcattaaacacagagtggagattcatgtgcaattccggcatgttcctggaaacctataccgagaaaatattggaataaacatagatttggggacaaatgagcttattctacgtgacgaacctgatgaggccatcctggtgaaaatcaacaacaaggttcctggtttaggtcttcagctagacgcttctgaacttaacttgctctataaagacaggtataaaaccgaagtaccagactcatatgaacacctaattcatgatgtaattgacggagacaatcatctgttcatgagaagcgatgaggttgcagcagcatggaacattcttagtccggttctagaagagatagacaagcatcacacagctccggagttgtatgaatttggtggacgaggaccagttgcggcatactatctttgggccaagcacggtgtcccatgggcagatgactga

SEQ ID NO: 2339 - protein, 625 aa, Arabidopsis thaliana
MSLSSCLLPFSQSATAPSSSVCSCHLAASFSNFPVSSRDYSFSRSGSLVLNGGGSNLCRRFCGLKLWILKSLNRRQGNNRKHQPVNELTTHSKHTFLSDDERGFAEETRAEDLRPEENILGTDLNDGFHNVGDLPPVSKQLSDDLSDVRRRASLCIAVVGATGELARGKIFPALFALYYSGYLPEDVAIFGVSRKNLTDEDLRSIIASTLTCRVDHQENCGGKMDAFQSRTYYINGGYNNRDGMSRLAERMKQIEGESEANRIFYLSVPQEALVDVACTIGDNAQAPRGWTRIIVEKPFGFNSHSSHQLTKSLLSKFEEKQIYRIDHMLGRNLIENLTVLRFSNLVFEPLWNRTYIRNIQVIISESIAQTEKFSDGYGIIRDIVHSHILQTIALLAMEPPISLDGEDIRNEKVKVLRSIRKIDPRDVILGQYKSSSRDKNGVILNGVDPTYCAAALYIDNARWDGVPFLVRVGTGLIKHRVEIHVQFRHVPGNLYRENIGINIDLGTNELILRDEPDEAILVKINNKVPGLGLQLDASELNLLYKDRYKTEVPDSYEHLIHDVIDGDNHLFMRSDEVAAAWNILSPVLEEIDKHHTAPELYEFGGRGPVAAYYLWAKHGVPWADD

SEQ ID NO: 2340 - DNA, 1551 bp, Arabidopsis thaliana
  CDS (1)..(1551)
atgggttctggtcaatggcatatggagaagaggtctactttaaagaatgattcgtttgtaaaagaatacaatccagtcacggaaactgggagtctctctatcattgttcttggtgcttctggtgatcttgctaagaagaagacttttcctgcacttttcaatctatttcatcagggatttcttaatccagatgaagttcatatatttggatatgcaaggagtaagattactgatgaggagcttagagataaaatccgcggatatcttgttgatgagaagaatgcatctaagaaaacagaagctttgtccaagtttctaaagctgattaagtatgtgagtggaccttatgattctgaggaagggtttaagagattagacaaggcgattttggagcacgagatatctaaaaagactgctgaaggatcttcgaggagattgttttatcttgcacttcctccgtctgtataccctcctgtaagcaagatgatcaaggcatggtgcactaacaaatctgatcttggtggatggactaggattgttgttgagaaaccatttggaaaggatttggaatctgcagagcagctgagttctcagattggagccttgtttgaagaaccacagatttatcgtattgatcactatctgggaaaagagttagttcaaaacatgttggttcttcggtttgccaatcgcttgtttttgccactatggaaccgcgacaatattgcaaacgtacagatcgttttcagagaagattttggaactgaaggtcgcggtggatattttgatgaatacggaatcattcgtgatattattcaaaaccacttgctccaggttctttgccttgtcgccatggagaaaccaatctctcttaaacccgagcacatccgggatgagaaagtgaaggttcttcaatctgtgattcccataaaagatgaagaggtggttcttggacaatatgaaggatatagagatgatccaactgttccaaatgactcaaacactccaacgtttgccacaacaattcttcgcattaacaatgaaagatgggaaggtgttccttttatactgaaggccggaaaggcaatgagttcaaagaaggcagatattcgcattcagtttaaagatgttcctggcgacatattcaaatgtcaaaaccaagggaggaacgagtttgttatacgcttgcagccttcagaggccatgtacatgaagctaactgtgaagcaaccgggtctggagatgcaaaccgtgcagagtgaactagacctatcgtacaagcagcgttaccaagatgtctcaattccagaggcttacgaacgccttattcttgacacaatcagaggcgaccaacaacactttgttcgcagagacgaattaaaggcagcttgggaaatcttcactccactgcttcacaggatcgacaagggagaagtgaaatcggtcccatacaaacaaggtagccgtggcccagcggaagcagatcagctacttaagaaagctggttatatgcagactcatggctacatttggatccctcctacattgtaa

SEQ ID NO: 2341 - protein, 516 aa, Arabidopsis thaliana
MGSGQWHMEKRSTLKNDSFVKEYNPVTETGSLSIIVLGASGDLAKKKTFPALFNLFHQGFLNPDEVHIFGYARSKITDEELRDKIRGYLVDEKNASKKTEALSKFLKLIKYVSGPYDSEEGFKRLDKAILEHEISKKTAEGSSRRLFYLALPPSVYPPVSKMIKAWCTNKSDLGGWTRIVVEKPFGKDLESAEQLSSQIGALFEEPQIYRIDHYLGKELVQNMLVLRFANRLFLPLWNRDNIANVQIVFREDFGTEGRGGYFDEYGIIRDIIQNHLLQVLCLVAMEKPISLKPEHIRDEKVKVLQSVIPIKDEEVVLGQYEGYRDDPTVPNDSNTPTFATTILRINNERWEGVPFILKAGKAMSSKKADIRIQFKDVPGDIFKCQNQGRNEFVIRLQPSEAMYMKLTVKQPGLEMQTVQSELDLSYKQRYQDVSIPEAYERLILDTIRGDQQHFVRRDELKAAWEIFTPLLHRIDKGEVKSVPYKQGSRGPAEADQLLKKAGYMQTHGYIWIPPTL

SEQ ID NO: 2342 - DNA, 1548 bp, Arabidopsis thaliana
  CDS (1)..(1548)
atgggatctggtcaatggcacgttgagaaaaggtctacgtttaggaatgattcgtttgtgagagaatatggtatagttccagaaactggttgtctttcaatcatagttcttggtgcttctggtgatcttgctaagaagaagacttttcctgctctttttaacttataccgtcagggatttctcaatccagatgaagttcatattttcgggtatgcgaggactaagatttctgatgaagagctgagagataggattcgtggatatcttgttgatgagaagaatgctgagcaagctgaagctttgtcaaagtttctgcagctgattaagtatgtgagtggcccttatgatgctgaggaggggttccagagattagacaaggcaatttcagagcacgaaatctccaaaaatagtactgaagggtcttccagaagactgttttatcttgcacttccaccgtctgtttatccttctgtatgcaagatgatcaagacgtgctgcatgaacaaatctgatcttggtggatggacacggattgttgtggagaagccatttggcaaggaccttgaatctgcagagcaactgagttctcagattggagagttatttgatgaatcacagatctatcgtatagaccattatcttgggaaggaattagttcaaaacatgttggtcctccggtttgcaaatcgctttttcttgccactttggaaccgtgacaatatcgagaacgtgcagattgttttcagggaagattttggaactgaagggcgtggcggatattttgacgaatatggaataatccgtgatattattcaaaaccatctgctacaggttctttgccttgttgccatggagaaaccaatatctcttaaacctgagcatatccgggatgagaaagtgaaggtgcttcaatctgtggttccgataagcgatgacgaggtagttcttggacaatacgaaggatatagggatgatgatactgttccaaacgactcaaacactccaacatttgccacaacaatccttcgcatacacaacgaaagatgggaaggtgttccatttatattaaaggccggaaaagcgttgaattcaaggaaggcagaaattcgcattcaattcaaggatgtcccaggcgacatattcagatgtcaaaagcaaggaaggaacgagtttgtgatacgcttgcaaccttcagaggcaatgtacatgaaactaactgttaagcaaccaggtctagatatgaatactgtgcaaagtgaactagacttgtcgtatgggcaacggtatcaaggtgtcgctatccctgaggcatacgagcgcttaattcttgacacaatcaaaggcgatcaacaacatttcgttcgtagagacgaattaaaggttgcgtgggagatcttcacgccgctactccacaggatcgacaaaggagaagtaaagtcaatcccatacaaaccaggaagccgaggaccgaaagaagctgatcagctactagagaaagctggttatcttcagactcacggctatatctggatccctcctacactataa

SEQ ID NO: 2343 - protein, 515 aa, Arabidopsis thaliana [sequence omitted]

SEQ ID NO: 2344 - DNA, 1734 bp, Solanum tuberosum
  CDS (1)..(1734)
atgggtgtgcaattgagattgaacccttgttcttcatcttcagctgcaacttctccttcaactttccataatgggacaccatatttctgcaaaaagtttaactttttaccatttagaacccaacccctcaattgggtatctggaatttactcaagaatccaaccaagaaagcattttgaagtcttttcctcaaatgggtttccacttaatgctgtgtctgtgcaagatgtacaagtgcctttgacagagttaggaagtggagataccactgtcagcataactgttattggagcttcaggtgacctagccaagaagaagattttaccagctttatttgctcttttctatgaagattgtctgcctgagaattttgtagtttttggctactcacgaacaaaattgagtgatgaagagctgagaaatatgatcagtacaaccttaacttgtcgaattgataagagagagaattgcgatgccaaaatggagcattttctggaaagatgcttttatcattcgggtcagtacaattctgaggatgattttgcagaactggattacaaattaaaggaaaaggagggttgtagggtttctaataggttgttttacttatcaatacctccaaatatattcgtggatgtggtgcgatgtgcaagtcttaaagcttcttcaacaagtgggtggacaagggtcattgttgagaaaccatttggtcgtgatttagaatcatctagtgagctgaccagatccctaaagaagtacctaactgaggagcaaattttccgaattgaccattacttgggaaaggaacttgttgagaatctctcagttcttcggttctcgaatcttgtctttgagcctctttggtccagaaactacatccgcaatgtccaatttatattttccgaagattttggtaccgagggacgaggagggtactttgaccactacggcatcatccgtgatattatgcaaaatcatctccttcaaatattagcattgtttgctatggaaacacctgtcagcttggatgctgaggacatcagaaatgagaaggttaaagttttaaggtcaatgaggccattgcaacttgaagatgttgttcttggacagtataagggtcatagcaatggtgctaaatcatatccagcttacacagatgatccaactgtgccaaatggcagtatcactccaacattttctgctgctgcactcttcattgataatgcacgttgggacggggttcctttcctcatgaaagcaggaaaagctctccatacgaagagggcagagatcagggtccagttcagacatgttcccggaaatttgtacaaaaggaactttggaactgacatggataaagcaaccaatgagctagttctgcgcctacaacctgatgaagccatatatctgaaaattaacaacaaggtccctggtcttgggatgagacttgaccggagtgaccttaatcttctttataaagcaaagtatcgaggtgaaataccagatgcatatgagcggcttttgttagatgcaatagaaggagagcgaagattgttcataagaagcgatgaacttgatgctgcatgggctctatttacaccgttgctgaaggagctggaagagaagaagattgcaccagagctttatccatacggaagtagggggccagtgggagcacattatctagctgcaaagcacaacgttcgttggggagatctatctggtgatgattga

SEQ ID NO: 2345 - protein, 577 aa, Solanum tuberosum
MGVQLRLNPCSSSSAATSPSTFHNGTPYFCKKFNFLPFRTQPLNWVSGIYSRIQPRKHFEVFSSNGFPLNAVSVQDVQVPLTELGSGDTTVSITVIGASGDLAKKKILPALFALFYEDCLPENFVVFGYSRTKLSDEELRNMISTTLTCRIDKRENCDAKMEHFLERCFYHSGQYNSEDDFAELDYKLKEKEGCRVSNRLFYLSIPPNIFVDVVRCASLKASSTSGWTRVIVEKPFGRDLESSSELTRSLKKYLTEEQIFRIDHYLGKELVENLSVLRFSNLVFEPLWSRNYIRNVQFIFSEDFGTEGRGGYFDHYGIIRDIMQNHLLQILALFAMETPVSLDAEDIRNEKVKVLRSMRPLQLEDVVLGQYKGHSNGAKSYPAYTDDPTVPNGSITPTFSAAALFIDNARWDGVPFLMKAGKALHTKRAEIRVQFRHVPGNLYKRNFGTDMDKATNELVLRLQPDEAIYLKINNKVPGLGMRLDRSDLNLLYKAKYRGEIPDAYERLLLDAIEGERRLFIRSDELDAAWALFTPLLKELEEKKIAPELYPYGSRGPVGAHYLAAKHNVRWGDLSGDD

SEQ ID NO: 2346 - DNA, 1725 bp, Spinacia oleracea
  CDS (1)..(1725)
atggaggaacttgtttcttgccaccatcttccattattatgcctccaaagctctgttcctccaaatgggtgtctcacattctttcaagattctgcctgccaaaggtgttcccattctgaattttcaaatgggcatcctttaaatgatgtctctcttcaaaatgatgtggctgtaaacccaattgttgcaaaaagtattgatccgtcagcagatcttcagttgcttcccctattggagtccgtcaaagaagagcccacactgagcataattgtagttggtgcctcaggagatcttgccaaaaagaagatatttcctgccctttttgctctcttttatgaaaactgtcttcctgagaacttcacagtctttggtttttcacgaacggaaatgaatgatgaagagctgcggactatgatcagtaaaaccttaacctgtagaatagaccagagggaaaactgtggtgaaaaaatggatcattttttgcaaagatgcttttaccattctggtcagtataattctgaggatgacttttcaggattggactgtaagcttaaagaaaaagaggctggtagactgcaaaataggctattctacctttcaataccaccaaacatttttgtggatgtggtgagatgtgttagccatcgagcttcttctgcaagtggatggacaagggttatagtagaaaagccttttggacgtgactcggattcttctcgtgagctaactagaagcttcaagcagtacttgagcgaggaccagatattcaggattgaccattacttggggaaggagttggtggagaatttatctgttctacgcttttcaaatctagtttttgaacctctatggtcaaggaactacatccgaaatgtccagctgatattctctgaagattttggtacagagggacgagggggatactttgataattatggaataatccgagatataatgcaaaaccatcttcttcaaattctagccttgtttgcaatggagacacctgttagcttagatgctgaggacattaggaatgaaaaggtgaaagtgcttaggtcaatgaaaccacttaaactgcaagatgtggtagtgggtcagtacaagggtcacagcaaagggaacaaatcatattctggttacacagatgatccaacggtgccaaacaatagtgtgactccaacatttgcagctgcagcgttgttcatcgacaatgctcgatgggatggagttcctttcctgatgaaagctggaaaagctcttcatacgaagagagctgaaatccgagtgcagtttagacatgttcctggaaacttgtacaagaaaacttttgggacggatttggacaaagctacgaatgagcttgtactacgggtacaacctgatgaagcaatatacttgaagatcaataacaaggttcctggccttgggatgagattggaccgtactgaccttaatttgtgttacagtactaggtaccggggagaaatacctgacgcgtatgagaggctacttctggacgcaatagaaggagagcgtagattgttcatcagaagtgataaactggatgcggcttggtcattgttcacgccgttgttaaaggaactagaggagaaaaaggtagcaccagagctgtacccttacggtagcaggggaccagtcggagctcattatcttgccgccaagcacaatgtccggtggggggatcttagtggtgaagactcgtga

SEQ ID NO: 2347 - protein, 574 aa, Spinacia oleracea
MEELVSCHHLPLLCLQSSVPPNGCLTFFQDSACQRCSHSEFSNGHPLNDVSLQNDVAVNPIVAKSIDPSADLQLLPLLESVKEEPTLSIIVVGASGDLAKKKIFPALFALFYENCLPENFTVFGFSRTEMNDEELRTMISKTLTCRIDQRENCGEKMDHFLQRCFYHSGQYNSEDDFSGLDCKLKEKEAGRLQNRLFYLSIPPNIFVDVVRCVSHRASSASGWTRVIVEKPFGRDSDSSRELTRSFKQYLSEDQIFRIDHYLGKELVENLSVLRFSNLVFEPLWSRNYIRNVQLIFSEDFGTEGRGGYFDNYGIIRDIMQNHLLQILALFAMETPVSLDAEDIRNEKVKVLRSMKPLKLQDVVVGQYKGHSKGNKSYSGYTDDPTVPNNSVTPTFAAAALFIDNARWDGVPFLMKAGKALHTKRAEIRVQFRHVPGNLYKKTFGTDLDKATNELVLRVQPDEAIYLKINNKVPGLGMRLDRTDLNLCYSTRYRGEIPDAYERLLLDAIEGERRLFIRSDKLDAAWSLFTPLLKELEEKKVAPELYPYGSRGPVGAHYLAAKHNVRWGDLSGEDS

SEQ ID NO: 2348 - DNA, 1782 bp, Nicotiana tabacum
  CDS (1)..(1782)
atggtgaccctttattcttctccttcaacccattcttctgggccagttgcttcttactctaattcctctattgggctctataattatcatcataataagcagatagcagtttcttcaattttgtcgagaaagtttggttctttgcaaattaatcagaagccattttggaatgccgttcgcatgcaagatggtgcagtagcgactccgcctagcaaaatcgaaaatgagactcctttgaagaaattaaaaaatggaattttgccagtcgcacctccaaaggagcagaaagatacaattgatttcgacagcaacaaagctaaatcaactgtcagtattactgttgttggtgcttcaggagatcttgccaagaaaaagatatttcctgcactgtttgcactttattatgagggttgcctccctgagcatttcactatctttggctatgcccggagtaagatgactgatgctgaactacggaacatggttagcaagacccttacttgcaggattgacaagagggaaaattgtggtgaaaagatggaacagtttttagaaaggtgcttctaccacagcggccaatacgattccctggaaaactttgcggagctcgataaaaagctgaaggaacatgaggctggaaggttttccaatcgtctattctacttatccattccaccaaatatttttataaatgcggttcgatgtgctagcctctctgcatcatctgctcatggctggacaagagtcattgtagagaaaccctttggtcgggattctgaatcctctgctgcattgacaagatcacttaagcagtacttgaatgaagaccaaatttttaggatcgatcactatttagggaaggagcttgtggaaaacctttctgtccttcgtttctccaacttgatatttgaacccttgtggtcaaggcagtgtataaggaatgtgcagtttattttctcagaagattttggcactgaaggacggggaggttattttgatcattatgggataatcagagacatcatgcaaaaccatctgcttcaaattctggccctctttgccatggaaacacctgtgagtttggatgcggaagatatcagaaatgaaaaggtaaaagttctgcgttccatgagacctttacaactagacgatgttatcattgggcagtacaaatgtcacacaaaaggagatgttacctatcccggttatactgacgacaagactgtaccgaaggacagtctaaccccaacttttgctgcagctgctcttttcatagataatgcacgatgggatggggtgcctttccttatgaaagctgggaaagctttacatactaggagtgcggaaataagagtacaattcaggcacgtaccaggaaatttatacaataagaactttggctcagatcttgaccaggcgaccaacgagcttgttatccgtgtccagcctaatgaagctatatacctaaagatcaataacaaagttcctggtctaggaatgagattggatcgcagtaatcttaatcttctttactcggcaagatactcgaaggagatccctgatgcatatgagcggctgcttcttgatgctatagaaggtgaaaggcggcttttcatccgcagtgatgagctggatgctgcttggtctcttttcactccagtgttaaaagaacttgaggataagaaaatagttccagaatattacccctatggaagtcgaggacctattggagcacattatctcgcagcacgatataaagtaagatggggtgatcttgtgtag

SEQ ID NO: 2349 - protein, 593 aa, Nicotiana tabacum
MVTLYSSPSTHSSGPVASYSNSSIGLYNYHHNKQIAVSSILSRKFGSLQINQKPFWNAVRMQDGAVATPPSKIENETPLKKLKNGILPVAPPKEQKDTIDFDSNKAKSTVSITVVGASGDLAKKKIFPALFALYYEGCLPEHFTIFGYARSKMTDAELRNMVSKTLTCRIDKRENCGEKMEQFLERCFYHSGQYDSLENFAELDKKLKEHEAGRFSNRLFYLSIPPNIFINAVRCASLSASSAHGWTRVIVEKPFGRDSESSAALTRSLKQYLNEDQIFRIDHYLGKELVENLSVLRFSNLIFEPLWSRQCIRNVQFIFSEDFGTEGRGGYFDHYGIIRDIMQNHLLQILALFAMETPVSLDAEDIRNEKVKVLRSMRPLQLDDVIIGQYKCHTKGDVTYPGYTDDKTVPKDSLTPTFAAAALFIDNARWDGVPFLMKAGKALHTRSAEIRVQFRHVPGNLYNKNFGSDLDQATNELVIRVQPNEAIYLKINNKVPGLGMRLDRSNLNLLYSARYSKEIPDAYERLLLDAIEGERRLFIRSDELDAAWSLFTPVLKELEDKKIVPEYYPYGSRGPIGAHYLAARYKVRWGDLV

SEQ ID NO: 2350 - DNA, 1485 bp, Actinobacillus actinomycetemcomitans
  CDS (1)..(1485): transl_table=11
atgaaagcagaaaactgttgtattgtaattttcggcgcctccggcgatctcacttatcgtaaacttattccggctttatataacctctataaaattgatcgactgggtgaagatttctccgttctcggcgtggcacgtaccgaactgaatgacaaatcattccgtgagaaaatgcgccaaacgctgatcaaaaatgaaggcgcgaaaggcgagtgcttggagcaattttgcagccacctgtattatcaggcggtcaatacggcggacaaagcggattacgccaaactggttccgcgtcttgacgaactgcacgacacctatcgcaccgaaggcaacaccttgtattatctttccacgccgccgagcctatatggcgtgattccggaatgtttgggcgaacatggcttaaataaagaagatcgcggctggaagcgtcttattgtggaaaaaccgttcggttatgaccgtgaaaccgccgaagcgctggatattcaaattcaccgtttctttgaagaacatcaaatttaccgtatcgaccattatcttggtaaagaaaccgtccaaaacctgcttgtgttgcgcttttccaacggttggtttgagccgttgtggaaccgtaatttcattgattacattgaaatcaccggcgcggaatctatcggtgtagaagagcgtggcggctattatgacggttccggcgcgatgcgcgatatgttccaaaaccatttattacaagtgctggcaatggtggcgatggagccgccggtgattatcaacgccaattccatgcgtgacgaagtggcgaaagtgctgcattgtttgcgcccgttgacccaggaagacgtggagcataatctggtgttgggacaatatgtcgcaggcgaagtggacggcgaatgggtgaaaggctatttagaggaaaaaggcgtgccgccgtattccaccaccgaaacctacatggcgctacgctgtgaaatcgaaaactggcgttgggcgggcgtgcctttctacgtgcgcaccggtaaacgtctgccggcacgcgtcacggaaatcgtgattcacttcaaaaccaccccgcacccggtattcagccaaaatgcgccggaaaataaactgattatccgtattcaaccggacgaaggcatttctatgcgttttggcttgaaaaaaccgggcgccggctttgaagccaaagaagtgtcgatggatttccgctatgccgatcttgcgggtgccaccgtcatgaccgcttatgagcgtttattgcttgatgccatgaaaggcgacgcgaccctatttgcgcgtaccgatgccgtacacgccgcctggaaattcgttcaaccgattttgaactataaagcccaaggcggcagactttatgattacgaggccggcacctggggaccgacggcagccgataaactcatcgccaaaagcggtcgtgtatggcgccgcccaagcgggttgatgaagaaaaaagtgtaa

SEQ ID NO: 2351 - protein, 494 aa, Actinobacillus actinomycetemcomitans
MKAENCCIVIFGASGDLTYRKLIPALYNLYKIDRLGEDFSVLGVARTELNDKSFREKMRQTLIKNEGAKGECLEQFCSHLYYQAVNTADKADYAKLVPRLDELHDTYRTEGNTLYYLSTPPSLYGVIPECLGEHGLNKEDRGWKRLIVEKPFGYDRETAEALDIQIHRFFEEHQIYRIDHYLGKETVQNLLVLRFSNGWFEPLWNRNFIDYIEITGAESIGVEERGGYYDGSGAMRDMFQNHLLQVLAMVAMEPPVIINANSMRDEVAKVLHCLRPLTQEDVEHNLVLGQYVAGEVDGEWVKGYLEEKGVPPYSTTETYMALRCEIENWRWAGVPFYVRTGKRLPARVTEIVIHFKTTPHPVFSQNAPENKLIIRIQPDEGISMRFGLKKPGAGFEAKEVSMDFRYADLAGATVMTAYERLLLDAMKGDATLFARTDAVHAAWKFVQPILNYKAQGGRLYDYEAGTWGPTAADKLIAKSGRVWRRPSGLMKKKV

SEQ ID NO: 2352 - DNA, 1533 bp, Aspergillus niger
  CDS (1)..(1533)
atggccagcacaatagcacgcactgaggaacgccagaatgctggcaccatggagctcaaagatgacactgtcatcatagtactgggtgcctccggagatcttgcaaagaagaagaccttcccggcccttttcggcctttatcgcaacaagttcctccccaagggaatcaagatcgtcggatatgcccggacaaacatggaccatgaggagtacctgaggcgtgtgcgctcatacatcaagacccctaccaaggaaatcgaagagcagctggacagcttctgccagttctgcacctacatttccggtcaatatgacaaggatgactcgttcatcaacctcaacaagcacctcgaggagattgagaagggccagaaggagcagaacagaatctactacatggccctcccccccagcgttttcaccaccgtttccgaccaacttaagcgcaactgctaccccaagaacggcgttgcccgtatcatcgtagagaagcctttcggcaaggaccttcagagctcgcgcgatctccaaaaagccctggagcctaactggaaggaagaggagatcttccgtatcgaccactacctgggtaaggagatggtcaagaacatccttatcatgcgcttcggaaacgaattcttcaacgccacctggaaccgtcaccacatcgataacgttcagatcacattcaaggagcccttcggcactgagggacgtggtggttacttcgatgaattcggcatcatccgtgatgtcatgcagaaccaccttctccaggtgttgacgctgctcgctatggagcgccccatttccttctccgccgaggacatccgtgacgagaaggttcgtgtcctccgtgcgatggacgccattgagcccaagaacgtcattattggccagtacggaaagtctctggatggcagcaagcccgcctacaaggaggacgagaccgttccccaggattcccgctgccccaccttctgcgctatggtcgcctacatcaagaacgagaggtgggacggtgttcctttcatcatgaaggctggcaaggccttgaacgagcagaagaccgagatccgtatccagttccgtgacgttacctccggaattttcaaggacatccctcgcaacgagctcgttatccgcgtccagcccaacgagtccgtgtacatcaagatgaactccaagctgcctggcctgtccatgcagacggttgtgactgagctcgacctcacctaccgccgccgcttctccgacctcaagatccccgaagcctacgagtctctgatcctggatgctctgaagggcgaccactccaacttcgtccgtgacgatgagctggatgccagctggaggatcttcacccctctcctgcactacctggatgacaacaaggagatcatccccatggaatacccctacggctcccgcggacccgccgtccttgatgacttcaccgcgtccttcggctacaagttcagcgatgctgctggctaccagtggcccttgacttccacccccaaccgtctgtaa

SEQ ID NO: 2353 - protein, 510 aa, Aspergillus niger
MASTIARTEERQNAGTMELKDDTVIIVLGASGDLAKKKTFPALFGLYRNKFLPKGIKIVGYARTNMDHEEYLRRVRSYIKTPTKEIEEQLDSFCQFCTYISGQYDKDDSFINLNKHLEEIEKGQKEQNRIYYMALPPSVFTTVSDQLKRNCYPKNGVARIIVEKPFGKDLQSSRDLQKALEPNWKEEEIFRIDHYLGKEMVKNILIMRFGNEFFNATWNRHHIDNVQITFKEPFGTEGRGGYFDEFGIIRDVMQNHLLQVLTLLAMERPISFSAEDIRDEKVRVLRAMDAIEPKNVIIGQYGKSLDGSKPAYKEDETVPQDSRCPTFCAMVAYIKNERWDGVPFIMKAGKALNEQKTEIRIQFRDVTSGIFKDIPRNELVIRVQPNESVYIKMNSKLPGLSMQTVVTELDLTYRRRFSDLKIPEAYESLILDALKGDHSNFVRDDELDASWRIFTPLLHYLDDNKEIIPMEYPYGSRGPAVLDDFTASFGYKFSDAAGYQWPLTSTPNRL

SEQ ID NO: 2354 - DNA, 1470 bp, Bacillus subtilis
  CDS (1)..(1470): transl_table=11
gtgaaaacaaaccaacaaccaaaagcagtaattgtcatattcggtgcaactggagatttagcaaaacgaaaattgtatccgtctattcaccgtttatatcaaaacggacaaatcggagaagagtttgcagtggtaggagttggaagaagaccttggtctaatgaggatcttcgccaaactgttaaaacatccatttcctcatctgcagataagcatatagatgatttcacgtctcatttttactatcacccgtttgacgtgacaaaccctggttcttatcaagagctaaacgtattgcttaaccagctggaagatacatatcaaattcctaacaacagaatgttctacttggcaatggctcctgaattcttcggaacgattgcaaaaacattaaaatcagagggtgtaacagctacaaccggctggtcccgccttgtcatcgaaaaaccgttcggccatgatctgccaagcgcacaggcattgaataaagaaatccgcgaagcatttacggaagatcaaatttacagaatcgaccattatctaggcaaacaaatggttcagaacattgaagtgattcgatttgccaatgcgattttcgaaccgctttggacaaaccgctacatttcaaacattcaaatcacatctagcgaatcactaggcgttgaagaccgcgcaagatattacgaaaaatcaggcgcccttcgcgacatggtgcaaaaccatattatgcagatggttgcccttcttgcaatggagccgcctatcaaattgaacacagaagaaatccgcagcgagaaagtgaaggtgctgagagcactgcgtcctattgcaaaagacgaagtggatgaatactttgtgcgcggacaatatcatgctggtgaaattgacggtgtaccggttcctgcttatacagatgaagataatgtcgctcctgactccaatacagaaacctttgttgccggcaagctcttgatcgacaacttcagatgggctggtgttccattctacatcagaaccggaaaacgaatgagagaaaagtccacaaaaattgtcgttcaatttaaggacattccgatgaacctgtactacggtaatgaaaacaacatgaatccgaacttgcttgtcattcatattcagcctgacgaaggcattacgctttacttaaatgctaaaaagcttggcggagcagcacacgcacagccaatcaaactcgattattgcagcaattgcaatgacgagttgaacacccctgaagcatatgaaaaactaattcacgactgtcttcttggcgatgcaacaaactttgcacactgggatgaagttgccctttcttggagctttgtcgactctatttctgaaacatgggcagcaaacaaaaccttatctcctaactacgaatcaggctcaatgggaccgaaagaatctgatgatcttttggtgaaagacggcttacactggtggaacatataa

SEQ ID NO: 2355 - protein, 489 aa, Bacillus subtilis
MKTNQQPKAVIVIFGATGDLAKRKLYPSIHRLYQNGQIGEEFAVVGVGRRPWSNEDLRQTVKTSISSSADKHIDDFTSHFYYHPFDVTNPGSYQELNVLLNQLEDTYQIPNNRMFYLAMAPEFFGTIAKTLKSEGVTATTGWSRLVIEKPFGHDLPSAQALNKEIREAFTEDQIYRIDHYLGKQMVQNIEVIRFANAIFEPLWTNRYISNIQITSSESLGVEDRARYYEKSGALRDMVQNHIMQMVALLAMEPPIKLNTEEIRSEKVKVLRALRPIAKDEVDEYFVRGQYHAGEIDGVPVPAYTDEDNVAPDSNTETFVAGKLLIDNFRWAGVPFYIRTGKRMREKSTKIVVQFKDIPMNLYYGNENNMNPNLLVIHIQPDEGITLYLNAKKLGGAAHAQPIKLDYCSNCNDELNTPEAYEKLIHDCLLGDATNFAHWDEVALSWSFVDSISETWAANKTLSPNYESGSMGPKESDDLLVKDGLHWWNI

SEQ ID NO: 2356 - DNA, 1473 bp, Buchnera aphidicola subsp
  CDS (1)..(1473): transl_table=11
atgattatagaaactaatcaagcttgcgatctagtgatttttggaacaaaaggagatttagcaagaagaaaattgttaccagctttatataaattagaaaaatctcaaaaaatacatccagatacacgtataattggtacaggtcgtgctgattggaatacagaagattatataaagatagtaaaaaaagcaataaaaatgtttttaaatgaaaaaattgatgaaaaaatttggaaaaaattacgttcacgtttaaattttttttatattgatgtatttcaagatcttcactttttagaattaaaaaatatattaaatcaaaaaaaaaacattattatttattattgtgcagttccttcaaatacatttaatgctatttttacaggattaggaaaagttaatttaaattcttttccatcaagaatcataatcgaaaaaccactcggtgtatctttagaaacatcaaaaaaaatcaataatcaaattgctaaatattttttagaatcgcaaatctttcgtattgatcactatcttggaaaagaatcaatattaaatcttttagcattacgtttctcaaattcatttttttttcatagttggaataataaaattattgatcatattcaaattactgtatctgaagaagttggtattgaaaatagatggaattattttgatcaaatgggacaaacacgagatatggtacaaaatcatctcctgcaaattcttacaatcgtttctatggataaaccaaaaaatattacacctgaaggcataagagatgaaaaattaaaaatattgcgttctcttaaaaaaattgacttaaatgaaattcatattaagacagcacgaggtcaatatgcatctggaattataaatggtaaaaaggtaccttcttacatagaagaaaatggtgcaaacaaacatagtaaaacagaaacatttgtttcaattaaagttgatattaataatgatcgatggtttggagttccattttatttaagaacgggtaaacgtttagcatataaatactctgaaatagttattgtctttaaaaaaatatctaagaacttgtttcaagaattcaataaaaatttatcacctaacaaattgattatacgtctagaacctaatgaaagtattaaaatatattttttaaataaagtaccaggactcagtaaggaatataaattaaaaagtgataaaatggaatttaattttaatataaataatactaaaaattttgtcgacgcttatgaaaggctattatttgaaagtatgagaggaatacaatcattatttgtatgtcgagaagaagtagaagaagcgtggaaatggattgatccaataataaacggttggaaaaaaacaaatataaatactgtacagttatataaatctggtacatgggggccaaaaagttcggacgaaatcattatgcgagatggtcgattttgggaaacatttaattaa

SEQ ID NO: 2357 - protein, 490 aa, Buchnera aphidicola subsp
MIIETNQACDLVIFGTKGDLARRKLLPALYKLEKSQKIHPDTRIIGTGRADWNTEDYIKIVKKAIKMFLNEKIDEKIWKKLRSRLNFFYIDVFQDLHFLELKNILNQKKNIIIYYCAVPSNTFNAIFTGLGKVNLNSFPSRIIIEKPLGVSLETSKKINNQIAKYFLESQIFRIDHYLGKESILNLLALRFSNSFFFHSWNNKIIDHIQITVSEEVGIENRWNYFDQMGQTRDMVQNHLLQILTIVSMDKPKNITPEGIRDEKLKILRSLKKIDLNEIHIKTARGQYASGIINGKKVPSYIEENGANKHSKTETFVSIKVDINNDRWFGVPFYLRTGKRLAYKYSEIVIVFKKISKNLFQEFNKNLSPNKLIIRLEPNESIKIYFLNKVPGLSKEYKLKSDKMEFNFNINNTKNFVDAYERLLFESMRGIQSLFVCREEVEEAWKWIDPIINGWKKTNINTVQLYKSGTWGPKSSDEIIMRDGRFWETFN

SEQ ID NO: 2358 - DNA, 1581 bp, Ceratitis capitata
  CDS (1)..(1581)
atggccactcagcatttcaccaatggcagcgccaccgacgatggggagaccgcactcgaacatatcatcaaatcattggagactccaacaatgaagtgcgagggtacacatttcgattcccatgtgccgcacacgtttgtcatctttggtgcttcgggtgatttggccaaaaagaaaatctatccaaccttgtggtggctttaccgtgataatttactgccgaaatcaactaaattctgcggttatgcacgttcgaagttaacgattgaggagttgcgggcgaagtgtcatcaatacatgaaggtgcaaccggacgagcaggcaaaatatgaggaattctggcagaatcatgactacgctgcgggtagctatgatcagcgcagtgattttgtggctttaaaagaacgtttgagcagtttggagagctgcaattgtagttgtaatcgcatattttatttggccttaccgccgtccgtctttgagcgagttactgtgaacattaaggacatttgtttggctgaacgcggctggaatcgcgttattatcgaaaaaccttttggtcgcgacgatgtcacttcaaagaaactaagcgatcatcttgcatcactcttccacgaggaccaactctatcgtatcgatcattatctgggcaaggaaatggtgcaaaatctaatgaccattcgctttgccaataaaattctcaactccacatggaatcgggaaaatatcgcctcagtgctgatcacattcaaggaacccttcggcacacaaggacgcggcggctactttgacgagtttggcattatacgcgatgtcatgcaaaatcacctgctgcaaatattgtctttggtcgccatggagaaacccacctcctgccagccggatgatatacgcgatgaaaaagttaaagtattgaaaagcattccagcacttacattggacgatatggttttgggtcaatatgtgggcaatccaaatggcgttggtgagcaacgcgaggggtatctcgacgatccgacagtgtcgaacgactccaacacacccacttacgcgcagggtgtattgcgtatcaataatgaacgttgggacggcgtacccttcatcttacgttgcggtaaagcgctggacgaacggaaagccgtggtgcgtatacaatatcgtgatgtgcctggcgatattttcgagggcaatagcaaacgtaatgagttagttatacgtgtgcaacccggcgaggcgttgtatttcaaaatgatgaccaaaagtccgggtataactttcgatatagaggagaccgagttggacttaacctatgagcatcgctacaaaaactcctacctgccagatgcctacgaacgtctcattttggatgtattctgtggttcgcaaatgcatttcgtgcgttccgatgagctgagcgaggcgtggcgcatcttcacgccggtcttgaatgaaatcgaaaacaacaaggttaaacccataccttatgtatttggttcacgtggtcccaaggaggcggatcagaagacgtcggagaataacttcaaatattacggttcctacaagtggattggaaagaaatag

SEQ ID NO: 2359 - protein, 526 aa, Ceratitis capitata
MATQHFTNGSATDDGETALEHIIKSLETPTMKCEGTHFDSHVPHTFVIFGASGDLAKKKIYPTLWWLYRDNLLPKSTKFCGYARSKLTIEELRAKCHQYMKVQPDEQAKYEEFWQNHDYAAGSYDQRSDFVALKERLSSLESCNCSCNRIFYLALPPSVFERVTVNIKDICLAERGWNRVIIEKPFGRDDVTSKKLSDHLASLFHEDQLYRIDHYLGKEMVQNLMTIRFANKILNSTWNRENIASVLITFKEPFGTQGRGGYFDEFGIIRDVMQNHLLQILSLVAMEKPTSCQPDDIRDEKVKVLKSIPALTLDDMVLGQYVGNPNGVGEQREGYLDDPTVSNDSNTPTYAQGVLRINNERWDGVPFILRCGKALDERKAVVRIQYRDVPGDIFEGNSKRNELVIRVQPGEALYFKMMTKSPGITFDIEETELDLTYEHRYKNSYLPDAYERLILDVFCGSQMHFVRSDELSEAWRIFTPVLNEIENNKVKPIPYVFGSRGPKEADQKTSENNFKYYGSYKWIGKK

SEQ ID NO: 2360 - DNA, 1524 bp, Chlamydia muridarum
  CDS (1)..(1524): transl_table=11
gtggaagaaataaaagaaatggggcccacattaccagcctgccctccttgtgtcatggttatttttggggctacaggagacttgactgcaaggaagctttttcccgctttatacaatttaacaaaagagggacggttatctgaaaactttgtttgcgtgggatttgccagaagacccaaatctcatgagcaatttcgtgaagaaatgagacaagctattcaaaatttctctcattcatcagaaattgatattcgtgtttgggagagccttgaacacagaattttctatcatcaggcgaatttttccgaagcagaagggtattcttctttaagatctttcttagagagcgtggatcaaaaatatgggacaaaaggaaatcgtcttttctacctctccactcctccagattatttccaagaaataatccggaacttgaacagacaccaactattttatcatgagcaaggagcccaacagccctggtctaggctaattatagaaaagccttttggagttgatttacaaactgctcaagagcttcagcaatgcattgatgctaatatcaatgaagaatctgtttatcgaatagatcattatcttgggaaagaaactgttcaaaatattctgaccatacgttttgctaatacgctattcgaatcttgttggaactctcaatatatagatcatgtacagattagtgttagtgaatcgattggtataggctctcgagggaacttttttgaaaagtctggcatgctaagggatatggtgcaaaatcacctgatgcaattactgtgtctacttactatggagcccccttctgaattttcttctgcagagatcaaaaaagaaaaaattaagattctaaaaaaaatccttcctattcgagaagaagacgtaattcgtggtcaatatggtgaaggagttgtgcaaggcgtttctgtttctggctacagagaagaagaaaatgttgatccaaattctttggtagaaacttacgtagccttgaaattattcattgataatcctcgctggaaaggggttcctttttatttacaagcagggaaacgtcttcctaaaaggacaacggatattgccgttatctttaaaaaatctagttacgacttgtttaattcagaaaattgccctctgtgccctttagagaatgatttgctcatcatccgcattcaaccagatgaaggagttgctctacaatttaactgcaaagttccagggacaaataaactcgttcgtcctgtgaaaatggatttccgttacgatagttattttaatacagttactccagaagcttatgaacgattgttgtgtgattgtatccttggcgataggacccttttcactagcaatgaagaagtcttagcatcttgggaactattttctcccttattggagcaatggtctaagatccgtcccattttccctaattatattgcaggatctttgcgcccgcaaggagctgatgagctattatctagagatggaagagcatggcgttcttactaa

SEQ ID NO: 2361 - protein, 507 aa, Chlamydia muridarum
MEEIKEMGPTLPACPPCVMVIFGATGDLTARKLFPALYNLTKEGRLSENFVCVGFARRPKSHEQFREEMRQAIQNFSHSSEIDIRVWESLEHRIFYHQANFSEAEGYSSLRSFLESVDQKYGTKGNRLFYLSTPPDYFQEIIRNLNRHQLFYHEQGAQQPWSRLIIEKPFGVDLQTAQELQQCIDANINEESVYRIDHYLGKETVQNILTIRFANTLFESCWNSQYIDHVQISVSESIGIGSRGNFFEKSGMLRDMVQNHLMQLLCLLTMEPPSEFSSAEIKKEKIKILKKILPIREEDVIRGQYGEGVVQGVSVSGYREEENVDPNSLVETYVALKLFIDNPRWKGVPFYLQAGKRLPKRTTDIAVIFKKSSYDLFNSENCPLCPLENDLLIIRIQPDEGVALQFNCKVPGTNKLVRPVKMDFRYDSYFNTVTPEAYERLLCDCILGDRTLFTSNEEVLASWELFSPLLEQWSKIRPIFPNYIAGSLRPQGADELLSRDGRAWRSY

SEQ ID NO: 2362 - DNA, 1539 bp, Chlamydia pneumoniae
  CDS (1)..(1539): transl_table=11
atgacgaatgttgttcaggaaactataggtggattgaattccccacgaacgtgccctccttgtattttagttatctttggagcgactggagatctgacggcaaggaaacttttacccgctctatatcacctcactaaagaaggacgcctttcagaccagtttgtttgcgtaggatttgcacgtcgagagaaatcgaatgaactgttccgccaagagatgaaacaagctgtcatacaattttctccttccgaattagatattaaggtatgggaagatttccaacagcgcctcttttatcatcgctcagaattcgataacaatatgggatatacatctctcaaggactccttagaagatttagataaaacgtacggaacacgtggaaatcgtcttttttatctttctactcccccccaatatttttctagaatcattgaaaatttaaataaacataagcttttctataaaaatcaagaccaagggaaaccctggtcccgtgtcattatagaaaaaccttttggaagagacttagatagtgctaagcaacttcagcaatgtatcaatgagaatcttaatgaaaattcggtctatcatatagatcactatttagggaaagaaacggttcaaaacatcttaacaacacgtttcgccaatacgattttcgaatcgtgttggaattcacaatatatcgatcatgtccaaatcagtttgagtgaaacgattggcataggatctcgcggcaatttctttgagaaatctgggatgcttcgggatatggtacagaaccatatgatgcagctactctgtttactcactatggagcctcctacaacttttgatgctgatgaaatcagaaaagaaaaaatcaaaattcttcaacgtatctcaccattttcagaaggttcttcgattgtccgaggacaatatggtccaggaacggttcaaggagtctcggtccttggctatcgtgaagaagagaatgttgacaaagattcccgagtagagacctacgtagctttaaaaacagtcattaataatccccgttggcttggagttcctttctatttacgtgcaggaaaacgactcgccaaaaaatctacagacatttctattatttttaaaaaatcaccctacaatttatttgcagccgaagaatgttcacgttgtccgatagaaaatgatttgctaatcatcagaattcaaccggacgaaggtgtcgctttgaaattcaactgtaaggttccaggaactaataatattgtccgtcctgttaagatggacttccgttacgacagctatttccaaactacaactccagaagcatacgagcgtttattatgtgattgcattataggggatcgtacgttatttactggtggagatgaagttatggcttcttggaagctttttactcctgtattagaggagtgggaccaagattcctcaccctcgtttccaaactatcctgcaggatcttcaggtcctaaagaagctgatgctctcattgaaagagacggaagaagctggagacctttatag

SEQ ID NO: 2363 - protein, 512 aa, Chlamydia pneumoniae
MTNVVQETIGGLNSPRTCPPCILVIFGATGDLTARKLLPALYHLTKEGRLSDQFVCVGFARREKSNELFRQEMKQAVIQFSPSELDIKVWEDFQQRLFYHRSEFDNNMGYTSLKDSLEDLDKTYGTRGNRLFYLSTPPQYFSRIIENLNKHKLFYKNQDQGKPWSRVIIEKPFGRDLDSAKQLQQCINENLNENSVYHIDHYLGKETVQNILTTRFANTIFESCWNSQYIDHVQISLSETIGIGSRGNFFEKSGMLRDMVQNHMMQLLCLLTMEPPTTFDADEIRKEKIKILQRISPFSEGSSIVRGQYGPGTVQGVSVLGYREEENVDKDSRVETYVALKTVINNPRWLGVPFYLRAGKRLAKKSTDISIIFKKSPYNLFAAEECSRCPIENDLLIIRIQPDEGVALKFNCKVPGTNNIVRPVKMDFRYDSYFQTTTPEAYERLLCDCIIGDRTLFTGGDEVMASWKLFTPVLEEWDQDSSPSFPNYPAGSSGPKEADALIERDGRSWRPL

SEQ ID NO: 2364 - DNA, 1476 bp, Dickeya dadantii
  CDS (1)..(1476): transl_table=11
atggcggtaacgtcaacagcccaggcgtgtgacctggttattttcggtgcaaagggcgaccttgcgcgccgcaaattgctgccttcactgtatcaactggaaaaagcaggccatattcatccggaaacccgcattatcggcgtgggacgggcggagtgggaccgagacgcctatatcaaagtggtgcgcgaagcgctggaaacctttctcaaggagccgctcgacccggcattgtggacaaccctgagcaatcggctcgacttttgcaaccttgatgtggaagacaccgagggattcaaacggttgggtacgatgctcgatcagcaaaatcgcaccaccatcaattatttcgccatgccgccgagcaccttcggcgctatctgccgcggtctggggcaggccggcctgaacaaggagccggcacgcgtggtgatggaaaaaccgctgggcaccaatctggcgtcgtcacgggtgatcaacaatcaggtagcggagtttttcaacgaatgtcaggtctaccgcatcgaccactatctcggcaaggaaaccgtgctgaacctgctggcactgcgtttcgccaactccctgttcgccaacaactgggataaccgcactatcgatcacgtgcagattaccgtggcggaagaggtgggtattgaagggcgctgggggtatttcgatcaggccgggcaaatgcgcgacatgatccagaaccacctgttgcagattctgaccatgattgccatgtcgccgccggcggatctgagcaccgatcgcattcgtgatgaaaaggtgaaagtcctgcgttcgctgcgccgtatcgatcgttccaatgtgcatgaagtgacggtccgtgggcagtacaccagcggttttgtgcagggcaagaaagtgccgggctacctggaagaagaaggggccaacaagaccagtaataccgaaaccttcgtggccattcgcgtcgatatcgacgactggcgctggtccggcgtgccgttttatctgcgcaccggcaagcgtctgccgtcaaaatgttcggaagtggtggtctactttaaaaacccggcgctcaacctgttccatgattcctatcagcagttgccgcagaataagctgatcatccgcctgcagccggacgaaggggtagaaattcagattctgaacaagattccggggctggaccacaaacatcggttgcagaccaccaagctcgacctgagcttctcggaaacttttaaccagcaacatctggcggacgcctatgagcgcctgttgctggaaaccatgcgtggtattcaggcgctgttcgtgcgccgcgacgaagtggaagaagcctggaaatgggtggattccattatggatgcctgggcaatggacaatgattcccccaaaccttatcaggccgggacctgggggccggtcgcgtccgtcgccatgattacccgcgatgggcgttcctggaacgaagtggaataa

SEQ ID NO: 2365 - protein, 491 aa, Dickeya dadantii
MAVTSTAQACDLVIFGAKGDLARRKLLPSLYQLEKAGHIHPETRIIGVGRAEWDRDAYIKVVREALETFLKEPLDPALWTTLSNRLDFCNLDVEDTEGFKRLGTMLDQQNRTTINYFAMPPSTFGAICRGLGQAGLNKEPARVVMEKPLGTNLASSRVINNQVAEFFNECQVYRIDHYLGKETVLNLLALRFANSLFANNWDNRTIDHVQITVAEEVGIEGRWGYFDQAGQMRDMIQNHLLQILTMIAMSPPADLSTDRIRDEKVKVLRSLRRIDRSNVHEVTVRGQYTSGFVQGKKVPGYLEEEGANKTSNTETFVAIRVDIDDWRWSGVPFYLRTGKRLPSKCSEVVVYFKNPALNLFHDSYQQLPQNKLIIRLQPDEGVEIQILNKIPGLDHKHRLQTTKLDLSFSETFNQQHLADAYERLLLETMRGIQALFVRRDEVEEAWKWVDSIMDAWAMDNDSPKPYQAGTWGPVASVAMITRDGRSWNEVE

SEQ ID NO: 2366 - DNA, 1575 bp, Drosophila melanogaster
  CDS (1)..(1575)
atggcaacgcaaaaggaagatcacaccgccctggatctcataatcaagtcactcaagtcgcctacaatggtctgcgagggaacccactttgacggcaagattccgcacacgttcgtcatctttggggcgtcgggcgatctggccaagaagaagatctaccccacgctctggtggctctaccgcgatgacctgctgcccaagccgaccaagttctgcggctatgcccgttccatgctgaccgtcgatagcatcaaggagcagtgtctgccgtacatgaaggtccagccgcacgagcagaagaagtacgaggagttctgggccctcaatgagtacgtgtccggcagatatgacggacgcactggcttcgagctgcttaaccagcagctggagattatggagaacaagaacaaggccaaccgcatcttctatctggccctgccgcccagcgtcttcgaggaggtgactgtcaacatcaagcagatctgcatgtcggtctgcggttggaaccgcgtgatcatcgagaagcctttcggccgggatgacgcctcctcgcaggcgctgagcgaccatctggccggtctgttccaggaggatcagctgtaccgcatcgatcactacctgggcaaggagatggtgcagaacctgatgaccatacgcttcggcaacaagatcctcagctcgacgtggaaccgcgagaacatcgcctccgtgctgatcacgttcaaggagcccttcggcacgcagggtcgtggcggctacttcgacgagttcggcatcatacgcgacgtgatgcagaaccatctgctgcagatcctctcgctggtggccatggagaagccggtgagctgccacccggacgacattcgtgacgagaaggtcaaggtgctgaagagcatcgaggccctgacgctggatgacatggtgctgggccagtacctgggcaatccgcagggtacaaacgatgatgcgcgcacgggctacgtggaggaccccaccgttagcaacgattcgaacacgcccacctacgccctcggcgtgctcaagatcaacaacgagcgctggcagggagtgcccttcatcctgcgctgcggcaaggcgctgaacgagcgcaaggcggaggtgcgcatccagtaccaggacgtgctcggcgacatcttcgagggcaatacgaagcgcaacgagctggtcatacgcgtccagccgggcgaggccctgtactttaagatgatgaccaagagccccggcatcacgttcgacatcgaggagacggagctggacctcacctacgagcaccgctacaaggactcctacctgccggacgcgtacgagcgtctcatcctcgacgtcttctgcggctcccagatgcacttcgtccgctcggacgagctgcgcgaggcgtggcgcatcttcacgcccattctgcaccagatcgagaaggagcacattcgtccaatcacctaccagtacggatcgcgcggtcccaaggaggcggaccgcaagtgcgaggagaacaatttcaagtactccggctcctacaagtggcacggcggcaaggcggccacgtccaatcactga

SEQ ID NO: 2367 - protein, 524 aa, Drosophila melanogaster
MATQKEDHTALDLIIKSLKSPTMVCEGTHFDGKIPHTFVIFGASGDLAKKKIYPTLWWLYRDDLLPKPTKFCGYARSMLTVDSIKEQCLPYMKVQPHEQKKYEEFWALNEYVSGRYDGRTGFELLNQQLEIMENKNKANRIFYLALPPSVFEEVTVNIKQICMSVCGWNRVIIEKPFGRDDASSQALSDHLAGLFQEDQLYRIDHYLGKEMVQNLMTIRFGNKILSSTWNRENIASVLITFKEPFGTQGRGGYFDEFGIIRDVMQNHLLQILSLVAMEKPVSCHPDDIRDEKVKVLKSIEALTLDDMVLGQYLGNPQGTNDDARTGYVEDPTVSNDSNTPTYALGVLKINNERWQGVPFILRCGKALNERKAEVRIQYQDVLGDIFEGNTKRNELVIRVQPGEALYFKMMTKSPGITFDIEETELDLTYEHRYKDSYLPDAYERLILDVFCGSQMHFVRSDELREAWRIFTPILHQIEKEHIRPITYQYGSRGPKEADRKCEENNFKYSGSYKWHGGKAATSNH

SEQ ID NO: 2368 - DNA, 1476 bp, Escherichia coli O157
  CDS (1)..(1476): transl_table=11
atggcggtaacgcaaacagcccaggtctgtgacttggtcattttcggcgcgaaaggcgaccttgcgcgtcgtaaattgctgccttccctgtatcaactggaaaaagccggtcagctcaacccggacacccggattatcggcgtagggcgtgctgactgggataaagcggcatataccaaagttgtccgcgaggcgctcgaaactttcatgaaagaaaccattgatgaaggtttatgggacaccctgagcgcacgtctggatttttgtaatctcgatgtcaatgacactgctgcattcagccgtctcggcgcgatgctggatcaaaaaaatcgtatcaccattaactactttgccatgccgcccagcacttttggcgcaatttgcaaagggcttggcgaggcaaaactgaatgctaaaccggcacgcgtagtcatggagaaaccgctggggacgtcgctggcgacctcgcaggaaatcaatgatcaggttggcgaatacttcgaggagtgccaggtttaccgtatcgaccactatcttggtaaagaaacggtgctgaacctgttggcgctgcgttttgctaactccctgtttgtgaataactgggacaatcgcaccattgatcatgttgagattaccgtggcagaagaagtggggatcgaagggcgctggggctattttgataaagccggtcagatgcgcgacatgatccagaaccacctgctgcaaattctttgcatgattgcgatgtctccgccgtctgacctgagcgcagacagcatccgcgatgaaaaagtgaaagtactgaagtctctgcgccgcatcgaccgctccaacgtacgcgaaaaaaccgtacgcgggcaatatactgcgggcttcgcccagggcaaaaaagtgccgggatatctggaagaagagggcgcgaacaagagcagcaatacagaaaccttcgtggcgatccgcgtcgacattgataactggcgctgggccggtgtgccattctacctgcgtactggtaaacgtctgccgaccaaatgttctgaagtcgtggtctatttcaaaacacctgaactgaatctgtttaaagagtcgtggcaggatctgccgcagaataaactgactatccgtctgcaacctgatgaaggcgtggatatccaggtactgaataaagttcctggccttgaccacaaacataacctgcaaatcaccaagctggatctgagctattcagaaacctttaatcagacgcatctggcggatgcctatgaacgtttgctgctggaaaccatgcgtggtattcaggcactgtttgtacgtcgcgatgaagtggaagaagcctggaaatgggtagactccattactgaggcgtgggcgatggacaatgatgcgccgaaaccgtatcaggccggaacctggggacccgttgcctcggtggcgatgattacccgtgatggtcgttcctggaatgagtttgagtaa

SEQ ID NO: 2369 - protein, 491 aa, Escherichia coli O157
MAVTQTAQVCDLVIFGAKGDLARRKLLPSLYQLEKAGQLNPDTRIIGVGRADWDKAAYTKVVREALETFMKETIDEGLWDTLSARLDFCNLDVNDTAAFSRLGAMLDQKNRITINYFAMPPSTFGAICKGLGEAKLNAKPARVVMEKPLGTSLATSQEINDQVGEYFEECQVYRIDHYLGKETVLNLLALRFANSLFVNNWDNRTIDHVEITVAEEVGIEGRWGYFDKAGQMRDMIQNHLLQILCMIAMSPPSDLSADSIRDEKVKVLKSLRRIDRSNVREKTVRGQYTAGFAQGKKVPGYLEEEGANKSSNTETFVAIRVDIDNWRWAGVPFYLRTGKRLPTKCSEVVVYFKTPELNLFKESWQDLPQNKLTIRLQPDEGVDIQVLNKVPGLDHKHNLQITKLDLSYSETFNQTHLADAYERLLLETMRGIQALFVRRDEVEEAWKWVDSITEAWAMDNDAPKPYQAGTWGPVASVAMITRDGRSWNEFE

SEQ ID NO: 2370 - DNA, 1536 bp, Emericella nidulans
  CDS (1)..(1536)
atgtccgccacgatagcccgcgccgaggagcagcagaatgggagcactgtcgaactcaaagatgacaccgtcattgtcgtactaggtgcctccggggatcttgcaaagaagaagactttcccagctctttttggcctttttcgcaacaagttccttcccaagggtatcaagatcgtcggatatgcccggacacagatggaccacaatgaataccttaagcgagtgcgctcatacattaagaccccgacaaaggagatcgaagagcaattgaacagcttttgcgagctttgcacatacatcagcggccaatacgaccaggatgactcattcaagaacctcgccaagcaccttgaggagattgagaaaaaccaaaaggaacagaacagagtcttttacatggcgttgccccccagcgttttcatcacagtctcagagcaactaaaacgcaactgctaccccaaaaatggtgtcgctcgtattattgtcgagaaacctttcggcaaggacctccagagctctcgtgatctccagaaggcccttgagcccaactggaaagaagaagagatcttccgtattgaccactacctcggcaaggagatggttaagaacatccttatcatgcgctttggcaacgagttcttcaatgccacctggaaccgccatcacatcgacaacgttcagatcacgttcaaggaaccattcggtacggagggccgtggaggttactttgatgaattcggcatcatccgtgacgttatgcagaaccaccttctgcaagttctcacactgcttgctatggagcgacccatctctttctccgccgaagacatccgtgacgagaaggttcgcgtcttgcgcgccatggaccccattcaacccaaggatgtcatcatcggccagtacggcagatcactagatggtagcaaacccgcatataaggaggatgatacagtgccacaggactctcgctgccccaccttctgtgcgctggtcgctcacatcaagaacgagagatgggatggtgttcctttcatcatgaaggcgggtaaagccctcaacgaacagaagaccgaaatccgtattcagttcaaggacgtcacttctggcatcttcaaggatatcccccgcaacgagcttgtcatccgtgtccaacccaacgaatctgtctacatcaagatgaactcgaaacttcctggactttccatgcagaccgtggttactgagctggatctcacctaccgtcgtcgattctccgacctcaagattcctgaagcctacgaatctttgatcttggatgctctcaaaggagaccactccaactttgtccgtgacgacgagctcgatgctagctggaggatgttcactcctctgctccactacctcgatgacaacaaggagatcatccctatggaatacccctacggttcccgcgggccctccgttcttgacgacttcaccgcttcctatggctacaagttcagtgatgctgcgggataccagtggccgttgacgcacactacgcctaacaggctgtag

SEQ ID NO: 2371 - protein, 511 aa, Emericella nidulans
MSATIARAEEQQNGSTVELKDDTVIVVLGASGDLAKKKTFPALFGLFRNKFLPKGIKIVGYARTQMDHNEYLKRVRSYIKTPTKEIEEQLNSFCELCTYISGQYDQDDSFKNLAKHLEEIEKNQKEQNRVFYMALPPSVFITVSEQLKRNCYPKNGVARIIVEKPFGKDLQSSRDLQKALEPNWKEEEIFRIDHYLGKEMVKNILIMRFGNEFFNATWNRHHIDNVQITFKEPFGTEGRGGYFDEFGIIRDVMQNHLLQVLTLLAMERPISFSAEDIRDEKVRVLRAMDPIQPKDVIIGQYGRSLDGSKPAYKEDDTVPQDSRCPTFCALVAHIKNERWDGVPFIMKAGKALNEQKTEIRIQFKDVTSGIFKDIPRNELVIRVQPNESVYIKMNSKLPGLSMQTVVTELDLTYRRRFSDLKIPEAYESLILDALKGDHSNFVRDDELDASWRMFTPLLHYLDDNKEIIPMEYPYGSRGPSVLDDFTASYGYKFSDAAGYQWPLTHTTPNRL

SEQ ID NO: 2372 - DNA, 1485 bp, Haemophilus influenzae
  CDS (1)..(1485): transl_table=11
atgcaaactgataataattgtatcgtcatttttggcgcgtctggtgacttaactcatcgtaaactcattccagccctttataatctctacaaaatcgggcgtttgagtgaaaacttttccgttcttggtgttgcacgttctgacttgaacgatgaaactttccgcgaaaaaatgcgtgaggcgttaattcataatgaagaaacaacaccagaaaccttagatgctttctgctctcatctttattaccaagcagtgaatacttcggatgctcaagattacggcaaacttgttccacgcttagacgatcttcacgataaatatcaaacctgtggtaacaccttttactatatgtccactccaccaagtctttatggcgtgattcctgagtgtttggctgcacatggtttaaatacggaagaatatggctggaaacgtattatcgttgaaaaaccttttggttacgatgaaaaaacagcgcaaacattagacgtacaaatccaccgtttctttgaagaacaccaaatttatcgtatcgatcattatttaggtaaagaaaccgttcaaaacttgctcgtattacgtttttcaaatggttggtttgaaccgctttggaaccgtaatttcattgattatgtagaaattactggtgcagaatctattggcgtggaagagcgcgggggctattatgatggttctggcgcaatgcgagatatgttccaaaaccatttattgcaagtgttagcgatggtggcaatggagccgccagcgattattaacgcgaattcaatgcgtgatgaagtagcaaaagtgatgcatagtttgcgtccattaacttcggaggatatggagaataaccttgttttgggtcaatacacagcggctgaaattaacggcaaaatggaaaaaggctatctagaagaaaaaggcgtaccggcaaattctcgtactgaaacctacatcgcattacgttgtgaaattgaaaactggcgttgggctggtgtgccgttctatgttcgtacgggtaaacgcttaccagctcgtgtgactgaaattgtgatccattttaaaactacgccacatcctgtattcagccaaaatgcaccagagaataaattaattattcgtattcaacctgatgaagcgatttcaatgcgttttggtttgaaaaaaccaggtgcaggttttgaggcgaaagaagtatcaatggatttccgttatgcagatttagcaggtgcgcaagtattaaccgcttatgaacgtttattgttggatgcgatgaaaggcgatgcaaccttgtttgctcgtactgatgctgtgcatgccgcatggaaatttgtgcaaccgattttagattacaaagccaatggtggtcgtattcacgaatatgaagctggcacttgggggcctgttgcagctgataaattaatcgcaaaacaaggcaaagtgtggcgtaaaccaagtggattgatgaagaaaaaagtttaa

SEQ ID NO: 2373 - protein, 494 aa, Haemophilus influenzae
MQTDNNCIVIFGASGDLTHRKLIPALYNLYKIGRLSENFSVLGVARSDLNDETFREKMREALIHNEETTPETLDAFCSHLYYQAVNTSDAQDYGKLVPRLDDLHDKYQTCGNTFYYMSTPPSLYGVIPECLAAHGLNTEEYGWKRIIVEKPFGYDEKTAQTLDVQIHRFFEEHQIYRIDHYLGKETVQNLLVLRFSNGWFEPLWNRNFIDYVEITGAESIGVEERGGYYDGSGAMRDMFQNHLLQVLAMVAMEPPAIINANSMRDEVAKVMHSLRPLTSEDMENNLVLGQYTAAEINGKMEKGYLEEKGVPANSRTETYIALRCEIENWRWAGVPFYVRTGKRLPARVTEIVIHFKTTPHPVFSQNAPENKLIIRIQPDEAISMRFGLKKPGAGFEAKEVSMDFRYADLAGAQVLTAYERLLLDAMKGDATLFARTDAVHAAWKFVQPILDYKANGGRIHEYEAGTWGPVAADKLIAKQGKVWRKPSGLMKKKV

SEQ ID NO: 2374 - DNA, 1278 bp, Helicobacter pylori J99
  CDS (1)..(1278): transl_table=11
atgctggattttgatttggttctttttggcgcgactggggatttagccatgcgaaagctctttgtttcgctttatgaaatttatattcattatggttttaaaaacgattctaggattatcgcatcggggcgtaaggagctatccaatgaagagtttttagcgcttctttgtgaaaaaacacaactgcattcaagagaaaagggtgaggaatttttaacccatatcagttatttgcgcgtccgtttggataaccctaaagactttgaagaattgagtaaaatcgccacaaacaataagcccttgattttctacttttctatctcccctagtttttttgcaacgaccgctcaaaatttagcccaaaacgcgctcaatcacgctaacactcgtttgattctagaaaagcctttagggcatgatttaaagacttgtaaagagattttccaaagcattagcgctttttttaaagaagaacaaatttttagaatcgatcattatttagggaaaaagggcgttcaaaatatccttgaattgcgcctgaataaccctatcttaaacattttatgggatcaaatcagcgcggttgaaatctgcgtgtatgagactttaggggtggaagaaaggggcgaattttacgataaaatcggggctttaagggatatggttcaaaaccatctcttgcaagttttatcccttatcgctacagatttacccaacgatttaaaagatttgaggcaagaaaaaatcaaagttttaaagaccttacaaccccctaaagatttcacaaaacaggttattcgggcccaatatcaaggctatagagatgaaaataaggtccataaagagagccagacagagacttttgtcgctattaaagcctttttggatacgcccaaatttaaaggcgtgcctttctaccttaagcacgctaaaaaaatgccccgcaatcaagcgagtgtgaaaatccattttaatgcagtcaatacgctggaatttttcctctctcaagataaaatcaccctcaccctaaaagatcatcaaaacccccttattttagaaacccacaacaaacaagaatttttacagccctacgctaaattgctctatgatgcgataccaaataaccactataatttcgcccaccagttggaattagaagcgtcatgggtttttattgacacgctcatagagggttttatcaataacgctacgcccttatattcctatgaaagccacaatctcaacgaatcagaatttttaaaaccactctatcaataa

SEQ ID NO: 2375 - protein, 425 aa, Helicobacter pylori J99
MLDFDLVLFGATGDLAMRKLFVSLYEIYIHYGFKNDSRIIASGRKELSNEEFLALLCEKTQLHSREKGEEFLTHISYLRVRLDNPKDFEELSKIATNNKPLIFYFSISPSFFATTAQNLAQNALNHANTRLILEKPLGHDLKTCKEIFQSISAFFKEEQIFRIDHYLGKKGVQNILELRLNNPILNILWDQISAVEICVYETLGVEERGEFYDKIGALRDMVQNHLLQVLSLIATDLPNDLKDLRQEKIKVLKTLQPPKDFTKQVIRAQYQGYRDENKVHKESQTETFVAIKAFLDTPKFKGVPFYLKHAKKMPRNQASVKIHFNAVNTLEFFLSQDKITLTLKDHQNPLILETHNKQEFLQPYAKLLYDAIPNNHYNFAHQLELEASWVFIDTLIEGFINNATPLYSYESHNLNESEFLKPLYQ

SEQ ID NO: 2376 - DNA, 1278 bp, Helicobacter pylori
  CDS (1)..(1278): transl_table=11
atgttagattttgatttggttctttttggcgcgactggggatttagccatgcgaaagctctttgtttcgctctatgaaatttatactcattatggttttaaaaacgattctaggattatcgcatcggggcgtaaggagctatccaatgaagaatttttaacactcctttgtgagaaaacacaactgcattcaagagaaaagggtagggaatttttagcccatatcagttatttgtgcgttcgtttggataaccctaaagactttgaagaattgagtaaaatcgctacaaaaaataaacccttgattttctacttttctatctcgcctagtttttttgcaacgaccgcccaacatttggccaaaaacgcgctcaatcacgccaacacacgcttgattttagaaaagcctttagggcatgatttaaagacatgtaaagagattttccaaagcattagcgttttttttaaagaagaacaaatctttagaatcgatcattatttagggaaaaagggcgttcaaaatatccttgaattgcgcctgaataaccctattttaaatattttatgggatcaaatcagcgcagttgaaatctgcgtgtatgagactttgggggtggaagaaagaggcgaattttacgataaaatcggggctttaagggatatggttcaaaaccatctcttgcaagttttatcccttatcgctacagatttacccaacaatttaaaggatttgaggaaagaaaaaatcaaagttttaaaaaccttacaaccccctaaagattttaaaaaacaggttattcgggcccaatatcaaggctatagagatgaaaataaggtccataaagagagccagacagagacttttgttgctattaaagcctttttggatacgcccaaatttaaaggcgtgcctttctaccttaagcacgctaaaaaaatgccccacaaccaagcgagcgtgaaaatccattttaacgcggtcaatacgctagaatttttcctctctcaagataaaatcaccctcaccctaaaagatcatcaaaacccccttattttagaaacccataacaaacaagaatttttacggccctacgctaaattgctctatgatgcgatacaaaataaccacaataatttcgcccaccagttggaattagaagcgtcatgggtttttattgacacgctcatagagggttttatgaataacgccacgcccttatattcctatgaaagccaccatctaaacgaatcagaatttttaaaaccactctatcaataa

SEQ ID NO: 2377 - protein, 425 aa, Helicobacter pylori
MLDFDLVLFGATGDLAMRKLFVSLYEIYTHYGFKNDSRIIASGRKELSNEEFLTLLCEKTQLHSREKGREFLAHISYLCVRLDNPKDFEELSKIATKNKPLIFYFSISPSFFATTAQHLAKNALNHANTRLILEKPLGHDLKTCKEIFQSISVFFKEEQIFRIDHYLGKKGVQNILELRLNNPILNILWDQISAVEICVYETLGVEERGEFYDKIGALRDMVQNHLLQVLSLIATDLPNNLKDLRKEKIKVLKTLQPPKDFKKQVIRAQYQGYRDENKVHKESQTETFVAIKAFLDTPKFKGVPFYLKHAKKMPHNQASVKIHFNAVNTLEFFLSQDKITLTLKDHQNPLILETHNKQEFLRPYAKLLYDAIQNNHNNFAHQLELEASWVFIDTLIEGFMNNATPLYSYESHHLNESEFLKPLYQ

SEQ ID NO: 2378 - DNA, 1494 bp, Kluyveromyces lactis
  CDS (1)..(1494)
atggctactcagtttgacgagaacactgtgatcactatttttggtgcttcaggtgatttatcaaagaagaaaacgtttcctgcattattcgggttatatcgtgaaggatatttgaatccaactacaaaaattattgggtatgcgcgttccaagttgagcaacgaggatttaagagaaaaggtaaagccatttttaaagaaacctaacggagctaaggatgatgctaaagtcaatgaatttttatcgatggtttcttaccatgctggtccgtatgattctgatgaaggttacttggagttgaaaaagattatcgaagagtttgaggctgaaaaaaaggtcgatgaacctcatagactcttttacttagccttgcctcctagtattttcattgacgtgtgttcgaaactaaaggaaaacctatacacagaatctggaattcaaagggttattgtggaaaagccttttggtcacgatctacagtctgctactgaattacaggagaagttggcgccattgttttccgaggacgaattgttcagaattgatcattatttgggtaaagagatggtaaaaaatctattgttgatgagattcggtaacactttcttgaacgccgcttggaacaaagaaaatatacaatctgttcaggtggttttcaaggaaccatttggaactgaaggtcgtggtggttacttcgattcaattggtattataagagatgtgatgcagaatcatttgctacaagtgttaactctattgacgatggaaagaccagtatctttcgacccagaatctgtacgtgacgaaaaggtcaaggttttgaaagcattctctccaattgatcatgacgatatattgataggccaatacggaagatctgtggatggtagcaagcctagctacctagatgatgaaactgtcaaagaggactccaagtgtgtcacctttgcagcaatcggattcaaaattgcaaatgaacgttgggatggagttcccatcgttatgagagcaggaaaagcgttgaacgaaggtaaagtagaaatcagaatccagttcagaagagttgcatctggcatgttcactgatattcctaataatgaattggttattagaattcaaccaaatgaagccatctacttgaagtgtaatgccaaaacacctggtcttgcgaatgaaaaccaaaccacagaactagacttgacttactcagagagatacaaaaactattggattcctgaagcatatgaatctttgataagagatgcccttttaggagatcattcaaatttcgtcagagacgatgaattagacgtaagctggaagctatttactccattgcttaattacttggaaggaccagatggacctcaaccaaagatctatccatatggctgtagaagccctgacggactcgttgagtttttagcagaccatggttacaccttttccaaaccaggatcctaccaatggcctgtcaccactcctaaaatgtaa

SEQ ID NO: 2379 - protein, 497 aa, Kluyveromyces lactis
MATQFDENTVITIFGASGDLSKKKTFPALFGLYREGYLNPTTKIIGYARSKLSNEDLREKVKPFLKKPNGAKDDAKVNEFLSMVSYHAGPYDSDEGYLELKKIIEEFEAEKKVDEPHRLFYLALPPSIFIDVCSKLKENLYTESGIQRVIVEKPFGHDLQSATELQEKLAPLFSEDELFRIDHYLGKEMVKNLLLMRFGNTFLNAAWNKENIQSVQVVFKEPFGTEGRGGYFDSIGIIRDVMQNHLLQVLTLLTMERPVSFDPESVRDEKVKVLKAFSPIDHDDILIGQYGRSVDGSKPSYLDDETVKEDSKCVTFAAIGFKIANERWDGVPIVMRAGKALNEGKVEIRIQFRRVASGMFTDIPNNELVIRIQPNEAIYLKCNAKTPGLANENQTTELDLTYSERYKNYWIPEAYESLIRDALLGDHSNFVRDDELDVSWKLFTPLLNYLEGPDGPQPKIYPYGCRSPDGLVEFLADHGYTFSKPGSYQWPVTTPKM

SEQ ID NO: 2380 - DNA, 1461 bp, Leuconostoc mesenteroides
  CDS (1)..(1461): transl_table=11
atggtttcagaaatcaagacgttagtaactttctttggtggcactggtgacttggccaagcgtaagctttacccatcagttttcaatctttataaaaaaggctacttgcaaaagcattttgccattgttggaacggcccgtcaagccctcaatgatgacgaattcaaacaattggttcgtgattcaattaaagatttcactgacgatcaagcacaagctgaggcgttcatcgaacatttctcataccgtgcacacgacgtaacagatgctgcttcatacgctgttttaaaagaggcgattgaagaagctgccgacaaatttgatatcgatggcaaccgcattttctatatgtcagttgcgccacgtttctttggtacaattgccaaatatcttaagtcagaaggcctactagctgacactggttacaaccgtttgatgattgaaaagcctttcggtacatcatatgacacagctgccgaactccaaaatgacttggaaaacgcatttgatgataaccaactattccgtattgaccactaccttggtaaggaaatggttcaaaacattgctgcccttcgctttggtaacccaattttcgatgctgcttggaacaaggattacatcaagaacgttcaagtaacattgtcagaagtcttgggtgtcgaagaacgtgccggctactatgacacagccggtgcattgcttgacatgattcaaaaccacaccatgcaaattgttggttggttagccatggaaaaaccagaatcattcactgacaaagacattcgtgccgctaaaaacgcagcctttaatgctttgaagatctatgatgaagcagaagttaacaaatactttgttcgtgcacaatatggtgccggtgattcagctgacttcaagccataccttgaagaattagacgtacctgctgattctaaaaacaataccttcatcgccggcgaattgcaatttgatttgccacgttgggagggtgtcccattctatgtccgttcaggtaagcgcttagctgctaaacagacacgggttgatatcgtctttaaggctggcacgtttaactttggttcagaacaagaagcacaagaagctgtcttgtcaattatcattgatccaaagggtgctatcgaattgaagttgaacgccaagtcagttgaagatgctttcaacacacgtacaattgacttaggttggactgtatctgacgaagataagaagaacacgccagaaccatacgaacgtatgattcacgacactatgaatggtgatggctctaacttcgctgactggaatggcgtttcaatcgcttggaagttcgttgatgctatttcagccgtttataccgcagataaagcaccacttgaaacttacaagtcgggctcaatgggtcctgaagcatccgataaattattggctgccaatggtgatgcttgggtgtttaaaggttaa

SEQ ID NO: 2381 - protein, 486 aa, Leuconostoc mesenteroides
MVSEIKTLVTFFGGTGDLAKRKLYPSVFNLYKKGYLQKHFAIVGTARQALNDDEFKQLVRDSIKDFTDDQAQAEAFIEHFSYRAHDVTDAASYAVLKEAIEEAADKFDIDGNRIFYMSVAPRFFGTIAKYLKSEGLLADTGYNRLMIEKPFGTSYDTAAELQNDLENAFDDNQLFRIDHYLGKEMVQNIAALRFGNPIFDAAWNKDYIKNVQVTLSEVLGVEERAGYYDTAGALLDMIQNHTMQIVGWLAMEKPESFTDKDIRAAKNAAFNALKIYDEAEVNKYFVRAQYGAGDSADFKPYLEELDVPADSKNNTFIAGELQFDLPRWEGVPFYVRSGKRLAAKQTRVDIVFKAGTFNFGSEQEAQEAVLSIIIDPKGAIELKLNAKSVEDAFNTRTIDLGWTVSDEDKKNTPEPYERMIHDTMNGDGSNFADWNGVSIAWKFVDAISAVYTADKAPLETYKSGSMGPEASDKLLAANGDAWVFKG

SEQ ID NO: 2382 - DNA, 1548 bp, Medicago sativa
  CDS (1)..(1548)
atgggaacaaatgaatggcatgtagaaagaagagatagcataggtactgaatctcctgtagcaagagaggtacttgaaactggcacactctctattgttgtgcttggtgcttctggtgatcttgccaagaagaagacttttcctgcactttttcacttatataaacaggaattgttgccacctgatgaagttcacatttttggctatgcaaggtcaaagatctccgatgatgaattgagaaacaaattgcgtagctatcttgttccagagaaaggtgcttctcctaaacagttagatgatgtatcaaagtttttacaattggttaaatatgtaagtggcccttatgattctgaagatggatttcgcttgttggataaagagatttcagagcatgaatatttgaaaaatagtaaagagggttcatctcggaggcttttctatcttgcacttcctccttcagtgtatccatccgtttgcaagatgatcaaaacttgttgcatgaataaatctgatcttggtggatggacacgcgttgttgttgagaaaccctttggtagggatctagaatctgcagaagaactcagtactcagattggagagttatttgaagaaccacagatttatcgtattgatcactatttaggaaaggaactagtgcaaaacatgttagtacttcgttttgcaaatcggttcttcttgcctctgtggaaccacaaccacattgacaatgtgcagatagtatttagagaggattttggaactgatggtcgtggtggatattttgaccaatatggaattatccgagatatcattccaaaccatctgttgcaggttctttgcttgattgctatggaaaaacccgtttctctcaagcctgagcacattcgagatgagaaagtgaaggttcttgaatcagtactccctattagagatgatgaagttgttcttggacaatatgaaggctatacagatgacccaactgtaccggacgattcaaacaccccgacttttgcaactactattctgcggatacacaatgaaagatgggaaggtgttcctttcattgtgaaagcagggaaggccctaaattctaggaaggcagagattcgggttcaattcaaggatgttcctggtgacattttcaggagtaaaaagcaagggagaaacgagtttgttatccgcctacaaccttcagaagctatttacatgaagcttacggtcaagcaacctggactggaaatgtctgcagttcaaagtgaactagacttgtcatatgggcaacgatatcaagggataaccattccagaggcttatgagcgtctaattctcgacacaattagaggtgatcaacaacattttgttcgcagagacgaattaaaggcatcatggcaaatattcacaccacttttacacaaaattgatagaggggagttgaagccggttccttacaacccgggaagtagaggtcctgcagaagcagatgagttattagaaaaagctggatatgttcaaacacccggttatatatggattcctcctaccttatag

SEQ ID NO: 2383 - protein, 515 aa, Medicago sativa
MGTNEWHVERRDSIGTESPVAREVLETGTLSIVVLGASGDLAKKKTFPALFHLYKQELLPPDEVHIFGYARSKISDDELRNKLRSYLVPEKGASPKQLDDVSKFLQLVKYVSGPYDSEDGFRLLDKEISEHEYLKNSKEGSSRRLFYLALPPSVYPSVCKMIKTCCMNKSDLGGWTRVVVEKPFGRDLESAEELSTQIGELFEEPQIYRIDHYLGKELVQNMLVLRFANRFFLPLWNHNHIDNVQIVFREDFGTDGRGGYFDQYGIIRDIIPNHLLQVLCLIAMEKPVSLKPEHIRDEKVKVLESVLPIRDDEVVLGQYEGYTDDPTVPDDSNTPTFATTILRIHNERWEGVPFIVKAGKALNSRKAEIRVQFKDVPGDIFRSKKQGRNEFVIRLQPSEAIYMKLTVKQPGLEMSAVQSELDLSYGQRYQGITIPEAYERLILDTIRGDQQHFVRRDELKASWQIFTPLLHKIDRGELKPVPYNPGSRGPAEADELLEKAGYVQTPGYIWIPPTL

SEQ ID NO: 2384 - DNA, 1545 bp, Mycobacterium bovis
  CDS (1)..(1545): transl_table=11
atgaaaccggcccacgccgcggcgtcgtggcgcaacccgctacgagacaagcgggacaagcgattacccagaatcgccggcccgtgcggcatggtgattttcggcgtcaccggcgacctggcccgcaagaaggtgatgccggccgtctacgatttggccaaccgcggcctgctgccgcccacattctcgctggtggggtttgcccgccgagactggagcacccaggatttcggtcaagtggtgtacaacgccgtccaagagcactgccgaacaccgtttcggcaacagaactgggaccggctggccgagggattccgttttgtgccaggcactttcgacgacgacgacgcgttcgcccaactcgccgagacgctggagaagctcgacgccgagcgcggcaccggcggcaaccacgccttctacctggcgatcccgcccaaatccttcccggtggtgtgtgagcagctgcacaagtccggcctggcccgcccgcaaggcgaccggtggagccgagtcgtgatagagaagccgttcggccacgacctggccagcgcacgcgagctgaacaaggcggtcaacgcggtcttcccggaggaagcggtcttccgcatcgaccactacctgggcaaagagacggtgcagaacatcctggcgctgcggttcgccaaccagctgttcgacccgatctggaatgcgcactacgtcgaccacgtacagatcaccatggccgaagacatcggcctgggcgggcgcgcgggctattacgacggcatcggcgcggcccgcgatgtcatccagaaccatctcatgcagctgctggcgctgaccgcgatggaggagccggtcagcttccacccggcagcgttgcaggccgagaagatcaaggtgctctcggccacccgccttgccgagccactcgaccagaccaccagccgcggccagtacgccgccggctggcaaggcggggagaaggtggttgggctgctcgacgaggaggggttcgccgaggactccaccaccgaaaccttcgccgctatcaccctggaagtcgatacgcgccggtgggccggcgtgccgttctatctgcgaacgggaaaacgattgggccgccgggtgaccgagatcgctctggtcttcaggcgggcgccgcatctgccgttcgacgccaccatgaccgacgagctgggcaccaacgcgatggtcatccgcgtgcagcccgacgaaggtgtcacattgcggttcggctccaaggtgccgggcaccgccatggaagtccgcgacgtcaacatggacttctcctacggctcggcattcgccgaagattcaccggaggcctacgagcggctcatcctcgacgtcctgctcggcgagccctcgctgtttccggtcaacgcggaggtcgaactggcgtgggagatcctcgatccagcgttggaacattgggcggcacacgggacgcccgacgcctacgaggcaggtacctggggtccggaatcatccttggagatgctgcgccgcaccggccgggaatggcggcggccatag

SEQ ID NO: 2385 - protein, 514 aa, Mycobacterium bovis
MKPAHAAASWRNPLRDKRDKRLPRIAGPCGMVIFGVTGDLARKKVMPAVYDLANRGLLPPTFSLVGFARRDWSTQDFGQVVYNAVQEHCRTPFRQQNWDRLAEGFRFVPGTFDDDDAFAQLAETLEKLDAERGTGGNHAFYLAIPPKSFPVVCEQLHKSGLARPQGDRWSRVVIEKPFGHDLASARELNKAVNAVFPEEAVFRIDHYLGKETVQNILALRFANQLFDPIWNAHYVDHVQITMAEDIGLGGRAGYYDGIGAARDVIQNHLMQLLALTAMEEPVSFHPAALQAEKIKVLSATRLAEPLDQTTSRGQYAAGWQGGEKVVGLLDEEGFAEDSTTETFAAITLEVDTRRWAGVPFYLRTGKRLGRRVTEIALVFRRAPHLPFDATMTDELGTNAMVIRVQPDEGVTLRFGSKVPGTAMEVRDVNMDFSYGSAFAEDSPEAYERLILDVLLGEPSLFPVNAEVELAWEILDPALEHWAAHGTPDAYEAGTWGPESSLEMLRRTGREWRRP

SEQ ID NO: 2386 - DNA, 1530 bp, Nostoc punctiforme
  CDS (1)..(1530): transl_table=11
atggttagtctgctagaaaatcccttgcgcgttggtctgcaacaacaagggatgcctgaaccccagattatagttatctttggcgcttctggtgatctcacctggcgcaaactagtgccagcactttacaaattgcggcgagaacggcgcattccaccagaaactactattgttggcgtagcacgtcgagaatggagccatgaatacttccgcgaacaaatgcagaagggcatggaagaggcacatcctgatgtcgatttaggggaactctggcaagacttctctcaaggtctcttctacagtcctggagatatagacaaccctgaaagctaccagaaactaaaaaccttactgagtgaattagacgaaaaacggggcacgcgaggcaatcgcatgttctacctatcggttgccccttcattctttcccgaagcaattaagcagctaggaagcggcgggatgctagaagatccctacaaacatcgtctagtaattgaaaaaccctttggtcgggacttggcttctgcccaaagccttaaccaagtggtacagaaatattgcaaagagcatcaagtatatcgtattgaccactacttgggtaaagaaacagtccagaatttgctggtgttccgctttgccaatgcgatttttgaacccttgtggaatcgtcaattcgttgaccacgtgcaaattaccgtagcagaaaccgtgggcgtagaagaccgggctggctactatgaaagcgccggcgcactgcgggatatgttgcaaaatcacctcatgcaactttactgcttaacggcgatggaagcacccaacgcaatggatgccgacagcatccgcacagaaaaagtgaaggtactccaagctactcgtttagctgatgttcacaatctgtcgcggtcagcagtccgtgggcaatacagtgctggctggatgaaaggtcaagcagtgccaggatatcgcacagaaccaggcgttgaccccaactccaccacacccacttatgtagcgatgaagtttttggtggataactggcgctggaaaggtgttcctttctacttgcggactggaaagcggatgccgaaaaaagtgagtgaaattgcaattcacttccgcgaagttccatctcggatgttccaatctgccgctcaacagacaaacgccaatattttgacgatgcggattcagccaaatgaaggtatttccctgcgttttgatgtcaaaatgccgggggcagaattccgcacccgttccgttgatatggactttagttatggttcctttggcatccaagcaacatccgatgcctacgatcgcttattccttgattgtatgatgggcgatcaaacattgttcacacgtgcagatgaagtagaagcagcttggcaagtagtgacaccagccctttccgtttgggatgcacccgccgatcctactactattccccagtacgaagccgggacttgggagccagaacaagcagaactcttaattaaccaggatggccgtcgctggcgcagactctaa

SEQ ID NO: 2387 - protein, 509 aa, Nostoc punctiforme
MVSLLENPLRVGLQQQGMPEPQIIVIFGASGDLTWRKLVPALYKLRRERRIPPETTIVGVARREWSHEYFREQMQKGMEEAHPDVDLGELWQDFSQGLFYSPGDIDNPESYQKLKTLLSELDEKRGTRGNRMFYLSVAPSFFPEAIKQLGSGGMLEDPYKHRLVIEKPFGRDLASAQSLNQVVQKYCKEHQVYRIDHYLGKETVQNLLVFRFANAIFEPLWNRQFVDHVQITVAETVGVEDRAGYYESAGALRDMLQNHLMQLYCLTAMEAPNAMDADSIRTEKVKVLQATRLADVHNLSRSAVRGQYSAGWMKGQAVPGYRTEPGVDPNSTTPTYVAMKFLVDNWRWKGVPFYLRTGKRMPKKVSEIAIHFREVPSRMFQSAAQQTNANILTMRIQPNEGISLRFDVKMPGAEFRTRSVDMDFSYGSFGIQATSDAYDRLFLDCMMGDQTLFTRADEVEAAWQVVTPALSVWDAPADPTTIPQYEAGTWEPEQAELLINQDGRRWRRL

SEQ ID NO: 2388 - DNA, 1476 bp, Rhizobium meliloti
  CDS (1)..(1476): transl_table=11
atgagcagccagatcattcccgtcgaaccgtttgactatgtggtgttcgggggcaccggcgatcttgcggagcgcaagctgctgccggcactttatcaccgtcagatggaaggtcagttcacggaaccgacgcggatcatcggcgcatcgcgcgcgagcctttcccatgacgaataccgcaggttcgcgagcgacgccctgaaagaacacctgaagtccggggagttcaacgaggcggaagtcgagaaattcacctcgcgtctctattacgtctccgtcgacgccaagtccgagcagggctgggacgatctgaagaagctcctggaagagggcaaggatcgtacccgtgccttctatctcgccgtcgggccggcgattttcagcgacatttccgaaaagatccgcgatcacaagcttatcacgaggaacacccgcatcgtcgtcgagaagccgatcggccgcgacctcgcttccgcgacggagctcaacgacacgatcggcaaggtcttccgcgaagagcagattttccgcatcgaccactatctcggcaaggaaacggtgcagaatctgatggcactgcgcttcgccaacgcactttacgagccattgtggaattccgcccacatcgaccacgtgcagatcaccgtttccgaagccgtcgggctcgagaatcgcgcaggctactacgacaaggcgggcgcgctgcgcgacatggtgcagaaccatatcctccagcttctctgtttcgtcgcaatggaggcgccgacgtcgatggacgcggaggccgtgcgcgacgagaagctcaaggtgcttcgcgcgctgaagccgatcaccgcctccaatgtcgagcaggtgacggtccggggccaataccgcgcgggcgcatcgtccggaggcccggtcaagggctatctcgaagagctcgaaggaggcgtttccaacacggaaaccttcgtcgcgatcaaggccgagatcagcaattggcgctgggcaggcgtgcccttctatctgcgtaccggaaagcgcatggcgggccgcatgtcggagatcgtcatcaccttcaagcagatcccgcactcgatcttcgatcagagtgccggccggatttcggccaaccagctgatgatccgcctgcagccgaatgaaggcgtcaagcagtcgctgatgatcaaggatcccggaccgggcggcatgcggctgaggaacgtgcccctcgacatgagcttcgccgaggccttcgcggtccgcaatgccgatgcctatgaacgcctgttgctggacgtcatccgcaacaaccagaccctgttcgtgcgccgcgacgaagtggaagcggcctggcaatggatcgacccgatcctcaaggcctgggaagcaaccggacagcaggtgcaaggatataccgccggaacctggggcccgagccagtcgatcgcgctgatcgagcgcgacggccgcacttggaacgatgcgatctag

SEQ ID NO: 2389 - protein, 491 aa, Rhizobium meliloti
MSSQIIPVEPFDYVVFGGTGDLAERKLLPALYHRQMEGQFTEPTRIIGASRASLSHDEYRRFASDALKEHLKSGEFNEAEVEKFTSRLYYVSVDAKSEQGWDDLKKLLEEGKDRTRAFYLAVGPAIFSDISEKIRDHKLITRNTRIVVEKPIGRDLASATELNDTIGKVFREEQIFRIDHYLGKETVQNLMALRFANALYEPLWNSAHIDHVQITVSEAVGLENRAGYYDKAGALRDMVQNHILQLLCFVAMEAPTSMDAEAVRDEKLKVLRALKPITASNVEQVTVRGQYRAGASSGGPVKGYLEELEGGVSNTETFVAIKAEISNWRWAGVPFYLRTGKRMAGRMSEIVITFKQIPHSIFDQSAGRISANQLMIRLQPNEGVKQSLMIKDPGPGGMRLRNVPLDMSFAEAFAVRNADAYERLLLDVIRNNQTLFVRRDEVEAAWQWIDPILKAWEATGQQVQGYTAGTWGPSQSIALIERDGRTWNDAI

SEQ ID NO: 2390 - DNA, 1503 bp, Schizosaccharomyces pombe
  CDS (1)..(1503)
atgagttctgcaaatttatctatcaaggaaaatggcgcaatggtcgttttcggcgcttccggtgatctatccaagaaaaagacgtttccagctcttttctctttgtttagcgaaggacgtctccccaaagatattagaatcgttggctatgcgcgctccaagattgaacatgaagactttttagatcgcattacccaaaacatcaaaattgatgaagaggattcccaggccaaagagaagcttgaggaatttaaaaagagatgctcttactatcgtggctcttacgacaagcctgaagatttcgagggcttgaactctcatttgtgtgagagggaaggcgaccgttctacccacaaccgcattttctatctcgcgttacctcccgacgttttcgtatctgtagctacaaaccttaaaaaaaaatgtgtgcccgaaaaaggtattgctcgtcttgtaatcgagaagccatttggcgtcgatttgaaatccgcccaggaactccaatcccaattagctcccctttttgatgagaaggaaatttatcgtattgatcactatttaggcaaggagatggttcaaaatttggttcatcttcgtttttgcaatcctgttatttctcatctttgggacaaaaacagtatttccagtgttcaaattacattcaaagagcctattggtacggaaggccgtggtgggtactttgactctagtactattgtccgtgatatcgtgcaaaaccaccttgtccaaattctgacccttttgaccatggaaaccccgaccactttctctgcagacgatcttcgtgacgagaaagtcaaggtattgcgtcgcactcgattgggagatctcaaagatattgttcttggtcaatatgtcaaaagcaaggacggtaaaaaacctggctaccttgatgacgagactgttcccaagggtagtaggtgtcccacttactcagctattccctgttttattgataccgaaagatggcgcggcgttcctttcttacttaaagctggtaaagccatggatattggcaaggtagagattcgtgttcagttcaaagctgctgcaaatggtttatttaaggacgcatatcataatgagctcgtaatccgtgttcagccagacgaagctatttacttcaagatgaacattaagcaacccggtcttagtgaggctcccctccttactgatttggacttgacttactctcgtagatttaagaacatgaagctccatgaagcatatgaagcattgtttttggacgcgtttgccggtgaccaatcccgttttgctcgtatcgacgaattagaatgtgcctggtctttagttgatcctcttttgaaatatatggaggaagagaaacctgtacccgagccttacgagtatggttccgatggtcccgaatgtttatactcttttttgaaaaagttcggatatatttatgattcccctgattactatgattatccagtcatgtccgttccttccgatcactaa

SEQ ID NO: 2391 - protein, 500 aa, Schizosaccharomyces pombe
MSSANLSIKENGAMVVFGASGDLSKKKTFPALFSLFSEGRLPKDIRIVGYARSKIEHEDFLDRITQNIKIDEEDSQAKEKLEEFKKRCSYYRGSYDKPEDFEGLNSHLCEREGDRSTHNRIFYLALPPDVFVSVATNLKKKCVPEKGIARLVIEKPFGVDLKSAQELQSQLAPLFDEKEIYRIDHYLGKEMVQNLVHLRFCNPVISHLWDKNSISSVQITFKEPIGTEGRGGYFDSSTIVRDIVQNHLVQILTLLTMETPTTFSADDLRDEKVKVLRRTRLGDLKDIVLGQYVKSKDGKKPGYLDDETVPKGSRCPTYSAIPCFIDTERWRGVPFLLKAGKAMDIGKVEIRVQFKAAANGLFKDAYHNELVIRVQPDEAIYFKMNIKQPGLSEAPLLTDLDLTYSRRFKNMKLHEAYEALFLDAFAGDQSRFARIDELECAWSLVDPLLKYMEEEKPVPEPYEYGSDGPECLYSFLKKFGYIYDSPDYYDYPVMSVPSDH

SEQ ID NO: 2392 - DNA, 1536 bp, Solanum tuberosum
  CDS (1)..(1536)
atggcggcatcatggtgtattgagaaaaggggttctattaggaatgactcttttagagacaatgataatatacctgaaactgggtgtctttctattattgttcttggtgcttctggtgatcttgccaagaagaaaacttttcctgctctcttcaacctctaccgccagggatttcttcaatccaatgaagttcacatttttggctacgcaaggacaaaaatttctgatgatgacttgagaagccgtatccgtgggtatctttctcaggggaaagaaaatgaaggagaagtatcagagtttctgcaactgattaaatacgtcagtggttcttatgattctgctgagggatttacgtcactggataaggcaatatctgagcacgaattctcaaaaaatagcacagaaggatcatccagaagactcttctattttgctcttcctccatcagtatatccctctgtttgcagaatgataaaaagttattgtatgaacaaatctgatcttggtggttggacacggactgttgttgagaagcccttcggcaaggatttagcttcatctgaacaactaagttcccagatcggagaactatttgacgaaccccaaatttatcgcattgaccattatttggggaaggagttggttcagaatttgttggtgctgcgttttgcaaatcgcttctttttgccgctctggaatcgtgacaacattgataatatacagattgtctttagagaggactttggaactgagggccgcggtggatattttgatgaatatgggattatacgtgacattattcagaaccatctattgcaggtcctttgccttgttgccatggagaagcctgtttctcagaagcccgaacacattcgggacgagaaagttaaggttcttcaatcaatgcttccaattgaagatgaagaggttgttcttggacaatatgaaggctataaggatgatccaacggttcctaacaactcaaatactcctacttttgctactatggttttacgcatacacaatgaaagatgggaaggtgtcccctttataatgaaggctggaaaagcactaaattcaagaaaggcagaaatacgagtgcagtttaaggatgttcctggtgatatatttagatgtcaaaagcaggggagaaatgagtttgtgatacgcctccaaccttcagaagccatgtacatgaagcttacggtcaagaaacctgggcttgaaatgtcaactgttcaaagtgaattagacctgtcgtatgggcagcgttaccaaggggtcgtcattccagaggcttatgaacgtctgattctcgacacaataagaggggatcagcagcattttgtgcgtagggatgagctcaaggcggcttgggagatttttacccctcttttgcatagaattgacaatggagaggtgaagccaattccatacaagccaggcagcagaggccctgctgaagcagatgagttgttgcaaaatgccggttacgttcaaactcatggctatatatggatccctcccacactataa

SEQ ID NO: 2393 - protein, 511 aa, Solanum tuberosum
MAASWCIEKRGSIRNDSFRDNDNIPETGCLSIIVLGASGDLAKKKTFPALFNLYRQGFLQSNEVHIFGYARTKISDDDLRSRIRGYLSQGKENEGEVSEFLQLIKYVSGSYDSAEGFTSLDKAISEHEFSKNSTEGSSRRLFYFALPPSVYPSVCRMIKSYCMNKSDLGGWTRTVVEKPFGKDLASSEQLSSQIGELFDEPQIYRIDHYLGKELVQNLLVLRFANRFFLPLWNRDNIDNIQIVFREDFGTEGRGGYFDEYGIIRDIIQNHLLQVLCLVAMEKPVSQKPEHIRDEKVKVLQSMLPIEDEEVVLGQYEGYKDDPTVPNNSNTPTFATMVLRIHNERWEGVPFIMKAGKALNSRKAEIRVQFKDVPGDIFRCQKQGRNEFVIRLQPSEAMYMKLTVKKPGLEMSTVQSELDLSYGQRYQGVVIPEAYERLILDTIRGDQQHFVRRDELKAAWEIFTPLLHRIDNGEVKPIPYKPGSRGPAEADELLQNAGYVQTHGYIWIPPTL

SEQ ID NO: 2394 - DNA, 1488 bp, Streptococcus pneumoniae
  CDS (1)..(1488): transl_table=11
atgtcatctaaggttattgttacaattttcggtgcgagtggagacctggctaaacgcaagctctacccttccctttttagactatatcaatccggcaatctttccaagcactttgccgttattggaactgcccgtagaccttggagtaaggaatattttgaatctgtagttgtcgagtccatccttgatttggcagatagtaccgagcaagcccaagaatttgctagccacttctactatcaaagccatgatgtcaatgattcggaacattatattgctttgcgtcaattacaagctgagcttaatgaaaaataccaagctgaacacaataagctcttcttcttgtctatggcacctcagttctttggaaccattgccaaacacctcaaatctgaaaacattgtcgatggcaaaggttttgagcgcttgatcgttgaaaaaccatttggtacagattacgcaactgcaagcaagttgaatgacgaactcctagcaacatttgacgaagaacaaattttccgtatcgaccattatcttggtaaggaaatgatccaaagcatctttgcagttcgctttgcaaacttgatttttgaaaacgtttggaacaaggattttatcgacaatgttcaaattacctttgcggagcgcttgggtgtagaagaacgtggtggctactatgaccaatccggtgccctccgtgacatggtccaaaaccacactctacaacttctttcgctcctcgccatggacaaaccagcaagcttcacaaaagacgagattcgtgctgaaaagattaaggtctttaaaaacctctatcatccaactgatgaagaactcaaagaacactttatccgtgggcaataccgctctggtaagattgatggcatgaaatacatctcttatcgtagcgagccaaatgtgaatccagaatcaacaactgaaacctttacatctggtgccttctttgtagacagcgatcgattccgtggtgttcctttctttttccgtacaggtaaacgactgactgaaaaaggaactcatgtcaacatcgtctttaaacaaatggattctatctttggagaaccacttgctccaaatattttgaccatctatattcaaccaacagaaggcttctctcttagcctaaatgggaagcaagtaggagaagaatttaacttggctcctaactcacttgattaccgtacagatgcgactgcaactggtgcttctccagaaccatacgaaaaattgatttatgatgtcctaaataacaactcaactaactttagccactgggatgaagtttgtgcgtcatggaagttgattgaccgtattgaaaagctctgggctgaaaatggtgccccacttcatgactataaagctggaagcatgggacctcaagccagctttgacctacttgaaaaattcggtgccaaatggacttggcaaccagatatcacctatcgtcaagatggtcgcttagaataa

SEQ ID NO: 2395 - protein, 495 aa, Streptococcus pneumoniae
MSSKVIVTIFGASGDLAKRKLYPSLFRLYQSGNLSKHFAVIGTARRPWSKEYFESVVVESILDLADSTEQAQEFASHFYYQSHDVNDSEHYIALRQLQAELNEKYQAEHNKLFFLSMAPQFFGTIAKHLKSENIVDGKGFERLIVEKPFGTDYATASKLNDELLATFDEEQIFRIDHYLGKEMIQSIFAVRFANLIFENVWNKDFIDNVQITFAERLGVEERGGYYDQSGALRDMVQNHTLQLLSLLAMDKPASFTKDEIRAEKIKVFKNLYHPTDEELKEHFIRGQYRSGKIDGMKYISYRSEPNVNPESTTETFTSGAFFVDSDRFRGVPFFFRTGKRLTEKGTHVNIVFKQMDSIFGEPLAPNILTIYIQPTEGFSLSLNGKQVGEEFNLAPNSLDYRTDATATGASPEPYEKLIYDVLNNNSTNFSHWDEVCASWKLIDRIEKLWAENGAPLHDYKAGSMGPQASFDLLEKFGAKWTWQPDITYRQDGRLE

SEQ ID NO: 2396 - DNA, 1491 bp, Thermotoga maritima
  CDS (1)..(1491): transl_table=11
atgaagtgcagtctgggattggagaaatgtccggatgataccctccggtgttttccaaagatcgaacaacctttcggaattgtgatcttcggtgcttctggtgacctcacaaaaagaaagctcattcccgctttgaacaggttgttcgaggcaggtattctgcccgaacgctttttcgttctcggtgcggcacgaacgaaaatggacgataagaaattcagatccagattcgatgccaaccctgattttttggaacattgcagttacatcagcgtggattatcaggatcctgagagcttcaaacagttgaaaaacaccatcgagactctcataaaaaggatcgattccagcaatctggtcttctatctcgctgttcctccggatctttacatccctattctggaaaacctctcgaaaactggattgaacgaaaaacctgcgcgcgttgtgatcgaaaaaccgttcgggaaagacctggaatcggccagaagactggaagacactcttcagaaatacttccaggaagatcagattttcagaatcgatcattaccttggaaaagaaaccgttcagaacatactggtgttcaggtttgccaacttcatattcgaggaaatctggaacaacaagttcgtggatcacgttcagatcacgatggccgaagacataggtgttgaacacagggcaggatacttcgaaaacgtgggactcctcagggatatcttccagaaccacatgcttcagatcctcgcactgatcgccatggaacctccttcttctttcaatggagagaatttcagaaacgagcgggtgaagcttctcagatcgatcagaccgttccctgtggaggaactggaaagctggatcgtcagaggccagtatggaagaggggttgtgaacggaaaagaagtgccggcttacagagaggaaccgggtgtggccaaagactccaacgtggaaaccttcgttgccatgaaactcttcatagacaactggagatggagcggtgtacccttctatctgaggtccgggaagagactccccaagaaaataaccgaggttgctgttgttttcaagaagattcctcattcgatctttgccggtgtaccttctgatgaactggagccgaacacgatagttttcaccttgcagccaaacgagggaatctctcttgagtttcaggtgaaaaggccctgtcccggcatgtttccacagcttctcagtatggacttcagatacgaggattactttggagtgaaactgcccgacgcttacgaaagactccttctggacgtgatacttggagatcctacacttttcatgagaagagacgacctcgaagtttcctgggaacttctcgatcccgttctcaaagcctgggaaaacgatcccgttcgcttttcaccttatgtgtatccggcgggaacgtggggaccgagagaagccgatctactcatagaaagggacggtagaaaatggagaaaactgtga

SEQ ID NO: 2397 - protein, 496 aa, Thermotoga maritima
MKCSLGLEKCPDDTLRCFPKIEQPFGIVIFGASGDLTKRKLIPALNRLFEAGILPERFFVLGAARTKMDDKKFRSRFDANPDFLEHCSYISVDYQDPESFKQLKNTIETLIKRIDSSNLVFYLAVPPDLYIPILENLSKTGLNEKPARVVIEKPFGKDLESARRLEDTLQKYFQEDQIFRIDHYLGKETVQNILVFRFANFIFEEIWNNKFVDHVQITMAEDIGVEHRAGYFENVGLLRDIFQNHMLQILALIAMEPPSSFNGENFRNERVKLLRSIRPFPVEELESWIVRGQYGRGVVNGKEVPAYREEPGVAKDSNVETFVAMKLFIDNWRWSGVPFYLRSGKRLPKKITEVAVVFKKIPHSIFAGVPSDELEPNTIVFTLQPNEGISLEFQVKRPCPGMFPQLLSMDFRYEDYFGVKLPDAYERLLLDVILGDPTLFMRRDDLEVSWELLDPVLKAWENDPVRFSPYVYPAGTWGPREADLLIERDGRKWRKL

SEQ ID NO: 2398 - DNA, 1548 bp, Treponema pallidum
  CDS (1)..(1548): transl_table=11
atggggaaaatcagtggcagcggcacggtcgcgccgcacatcctggttatctttggcgcttcaggcgaccttgccgcgcggaagcttatcccctcgctttgggatctctttgagcaagagctcctgccccgtacattcggtatactcggcgcagggcgtacggctctgtctacagagtcttttcgcgcacggcttgcagaggcggtcacaaagcatgcagtgcgcacaccgcacgacccggcgcgcctcaccgaattcctgcagaagatccactacttctcgttcgatcccaccgactctgtcgcctttgccgactttgccacgtacgtgcgcaccctcgaccagtcgctgcacaccgagggcaactttatcttctatcttgccactccccctagcctgtacgaaactatccccacgcagcttgctatgcaccacttgaaccgggaacagggtaattttcgcagggtagttattgaaaaaccctttggctacaacctagaaaccgcgcagcaccttaatgcgagcttgcgtgcccactttcaggaaaaccaaacctatcgcatcgatcactatctgggtaaggaaacggtccaaaacatcctggtcactcgctttgccaatccccttttcgagcccacatggaaccggacccatatcgattacgttgaaattactgcaagcgaatcactaggtgtcgaaaaccgcggcggttactacgaccagtccggtgcattgcgcgatatgatccaaaaccacttgttactcctcttgggtattatcgcgatggaggcgcccgccgtcgtgagttcaagtcgtctacgggatgaaatcgtaaaggtctttgactgcctgcgccctatgggagaacgcgacgtcatgcagcatacggtgcgtgcccaatacgtcgccggcaagatacgcggtgtagccgtccccggctaccttgaggagtcaggcgttgaccctcgctcgtgcactgaaacctttgccgcactcaagtgctacatcgacaattggcggtggatggacgttcccttctacctgcggacgggtaagcgtttgcccacgggcgtcactgaggtgatcgtccattaccgaacgctccccatcgcgcttttcgagcacatcgaacgcccgtgcgcacgcgagggcaacgcgcttgtcattcgcattcaacccgacgaaggaattcagcttaaaatcgacctcaaagagcccggcgcggggttcaagactattcccgtcagtgttgattttcagtattcggctcttacctattcgcacttacccagcgcgtatgagcggctattgcttgactgcatgaatggagacaacacgctctaccatcgagatgacgcggtggagtctgcatggcgcttcatagatcctattcttgccgcatggaaatcaaacaagagtcctctacttacgtaccctgcaggaagctggggtccgaaggctgcagacgacctgatcaaagggagtgctccacggtggcatcacccctcttctacgctgctcagcgatgattttgcctgccgactctag

SEQ ID NO: 2399 - protein, 515 aa, Treponema pallidum
MGKISGSGTVAPHILVIFGASGDLAARKLIPSLWDLFEQELLPRTFGILGAGRTALSTESFRARLAEAVTKHAVRTPHDPARLTEFLQKIHYFSFDPTDSVAFADFATYVRTLDQSLHTEGNFIFYLATPPSLYETIPTQLAMHHLNREQGNFRRVVIEKPFGYNLETAQHLNASLRAHFQENQTYRIDHYLGKETVQNILVTRFANPLFEPTWNRTHIDYVEITASESLGVENRGGYYDQSGALRDMIQNHLLLLLGIIAMEAPAVVSSSRLRDEIVKVFDCLRPMGERDVMQHTVRAQYVAGKIRGVAVPGYLEESGVDPRSCTETFAALKCYIDNWRWMDVPFYLRTGKRLPTGVTEVIVHYRTLPIALFEHIERPCAREGNALVIRIQPDEGIQLKIDLKEPGAGFKTIPVSVDFQYSALTYSHLPSAYERLLLDCMNGDNTLYHRDDAVESAWRFIDPILAAWKSNKSPLLTYPAGSWGPKAADDLIKGSAPRWHHPSSTLLSDDFACRL

SEQ ID NO: 2400 - DNA, 1458 bp, Zymomonas mobilis
  CDS (1)..(1458): transl_table=11
atgacaaataccgtttcgacgatgatattgtttggctcgactggcgacctttcacagcgtatgctgttgccgtcgctttatggtcttgatgccgatggtttgcttgcagatgatctgcgtatcgtctgcacctctcgtagcgaatacgacacagatggtttccgtgattttgcagaaaaagctttagatcgctttgtcgcttctgaccggttaaatgatgacgctaaagctaaattccttaacaagcttttctacgcgacggtcgatattacggatccgacccaattcggaaaattagctgacctttgtggcccggtcgaaaaaggtatcgccatttatctttcgactgcgccttctttgtttgaaggggcaatcgctggcctgaaacaggctggtctggctggtccaacttctcgcctggcgcttgaaaaacctttaggtcaagatcttgcttcttccgatcatattaatgatgcggttttgaaagttttctctgaaaagcaagtttatcgtattgaccattatctgggtaaagaaacggttcagaatcttctgaccctgcgttttggtaatgctttgtttgaaccgctttggaattcaaaaggcattgaccacgttcagatcagcgttgctgaaacggttggtcttgaaggtcgtatcggttatttcgacggttctggcagcttgcgcgatatggttcaaagccatatccttcagttggtcgctttggttgcaatggaaccaccggctcatatggaagccaacgctgttcgtgacgaaaaggtaaaagttttccgcgctctgcgtccgatcaataacgacaccgtctttacgcataccgttaccggtcaatatggtgccggtgtttctggtggtaaagaagttgccggttacattgacgaactgggtcagccttccgataccgaaacctttgttgctatcaaagcgcatgttgataactggcgttggcagggtgttccgttctatatccgcactggtaagcgtttacctgcacgtcgttctgaaatcgtggttcagtttaaacctgttccgcattcgattttctcttcttcaggtggtatcttgcagccgaacaagctgcgtattgtcttacagcctgatgaaaccatccagatttctatgatggtgaaagaaccgggtcttgaccgtaacggtgcgcatatgcgtgaagtttggctggatctttccctcacggatgtgtttaaagaccgtaaacgtcgtatcgcttatgaacgcctgatgcttgatcttatcgaaggcgatgctactttatttgtgcgtcgtgacgaagttgaggcgcagtgggtttggattgacggaattcgtgaaggctggaaagccaacagtatgaagccaaaaacctatgtctctggtacatgggggccttcaactgctatagctctggccgaacgtgatggagtaacttggtatgactga

SEQ ID NO: 2401 - protein, 485 aa, Zymomonas mobilis
MTNTVSTMILFGSTGDLSQRMLLPSLYGLDADGLLADDLRIVCTSRSEYDTDGFRDFAEKALDRFVASDRLNDDAKAKFLNKLFYATVDITDPTQFGKLADLCGPVEKGIAIYLSTAPSLFEGAIAGLKQAGLAGPTSRLALEKPLGQDLASSDHINDAVLKVFSEKQVYRIDHYLGKETVQNLLTLRFGNALFEPLWNSKGIDHVQISVAETVGLEGRIGYFDGSGSLRDMVQSHILQLVALVAMEPPAHMEANAVRDEKVKVFRALRPINNDTVFTHTVTGQYGAGVSGGKEVAGYIDELGQPSDTETFVAIKAHVDNWRWQGVPFYIRTGKRLPARRSEIVVQFKPVPHSIFSSSGGILQPNKLRIVLQPDETIQISMMVKEPGLDRNGAHMREVWLDLSLTDVFKDRKRRIAYERLMLDLIEGDATLFVRRDEVEAQWVWIDGIREGWKANSMKPKTYVSGTWGPSTAIALAERDGVTWYD

SEQ ID NO: 2402 - DNA, 1554 bp, Oryza sativa
  CDS (1)..(1554)
atgtcaggaggatctggtgattcttccccttcatcagggcgggctagcttcagttctttgtcaggtttgaaggacctagaactgtcttcagagtctggttgcttgtccattgtggtcctaggtgcttctggagaccttgctaagaagaaaacattcccagcgctgtttcacctctttcagcagggatttctacaatctggagaagtccatatatttgggtatgcaagatcaaatatttcggatgatggattaagagaacgcattcgtggatacctcaaaggagcttcagatgaacatatttcacaatttttgcaattaattaaatatgttagtggttcctacaatagcggggaaggatttgcatcattaaataacgccatttcagagaatgaaacttcgaagaacaacaaaccaggaagctcacgtagactattttatttggcattgcctccatcagtctacccctcagtatgcaaaatgataagatcatactgcatgaatccatcttctcattctggctggacaagggttattgttgaaaagccctttgggaaggacttggagtctgcagaggaactcagtgcccagcttggagagctgtttaatgaacaacagctgtacagaattgaccactatttaggaaaagaattggtccaaaatctgcttgtgcttcgctttgcaaaccgtttgttcctacctctttggaatcgtgataacattgctaatgtacagattgtattcagagaggactttgggactgaaggacgtggagggtactttgatcaatatggcatcattcgtgatatcattcagaaccatttgttgcaggtcttctgtttggtggctatggaaaagcctgtctctcttaagcctgagcacataagagatgaaaaagtcaaggttcttcagtcagtgacacctataaagcatgatgaggtggtccttgggcaatatgatggctacaaggatgactctacggtaccagatgactccaacacacctacttttgcatctcttgtattgagggtaaacaatgaaagatgggaaggagttcctttcattctcaaggctggcaaagcactgaacaataggaaagcagagatacgtgtgcagttcaaggatgctcctggtgacatttttaaatgcaagaagcaaggaaggaatgaattcgttatacggttgcagccatcggaagccatgtatatgaaattaactgtcaagaaacccggactagaaatggcaaccgaacaaagcgagctggatctgtcatatgggctacgctaccaagacgtgaagatcccagaagcgtatgaacgcctcatcctggatacgataagaggggatcagcagcactttgttcgccgagacgaactgaaggctgcgtgggagatcttcactccgctgctgcacgacatcgacgacggcaaggtgaaggccctgccgtacaagccgggaacccggggacccccagaggccgacgagctgagcaagaggatgggctacgtgcagacccatggctacgtttggatacctccaaccctttcaaaattctag

SEQ ID NO: 2403 - protein, 517 aa, Oryza sativa
MSGGSGDSSPSSGRASFSSLSGLKDLELSSESGCLSIVVLGASGDLAKKKTFPALFHLFQQGFLQSGEVHIFGYARSNISDDGLRERIRGYLKGASDEHISQFLQLIKYVSGSYNSGEGFASLNNAISENETSKNNKPGSSRRLFYLALPPSVYPSVCKMIRSYCMNPSSHSGWTRVIVEKPFGKDLESAEELSAQLGELFNEQQLYRIDHYLGKELVQNLLVLRFANRLFLPLWNRDNIANVQIVFREDFGTEGRGGYFDQYGIIRDIIQNHLLQVFCLVAMEKPVSLKPEHIRDEKVKVLQSVTPIKHDEVVLGQYDGYKDDSTVPDDSNTPTFASLVLRVNNERWEGVPFILKAGKALNNRKAEIRVQFKDAPGDIFKCKKQGRNEFVIRLQPSEAMYMKLTVKKPGLEMATEQSELDLSYGLRYQDVKIPEAYERLILDTIRGDQQHFVRRDELKAAWEIFTPLLHDIDDGKVKALPYKPGTRGPPEADELSKRMGYVQTHGYVWIPPTLSKF

SEQ ID NO: 2404 - DNA, 1890 bp, Oryza sativa
  CDS (1)..(1890)
atggcggggctcgcggtgtcggcttccccagctccggcgccggcgtccttccggccggcggcggcggcctcgcgcttcggcccgtgtgcacaggttgcaggacctgctgccaattttagaacacgagtttgtggactgagatgtttgatcgctgcaaagctgaagttccggaaggccttgaagaggcatggatggcagcttcgaaggaatctagaagtccgagccaatgataaagtgcctgattggttggaggctacaccactgactgagaatataatgtctcgggacgtacaactcgcgtatgattctggaggtgaaacatcaaatacatgccctgatactttggacagttcagtcattgagcaaagttcaatgcatcacaaacttaacccctctgaaacccatcctcctgtgctgaaggaagaccctgttctattcgacgacccacctgaaagcgcagcgcctctttgcattgctgtaattggagcaactggtgaactggcaaaaaataaagtgttccctgcactatttgctctgtattacagtggttttcttcctcagaatgtcggtatatttgggtattctaggaagacactaacggatgaagatttaagatccatgattgaagccaatttgacctgccgggttgaccaccacgaaaactgtgatgaaaagttaaatgaatttcttaaaaggacatactatatagatgcaggatatgacaacaaagatgggatggtgaaactaaattccaaaatgtcacagatagagggtaattgtgcagcaaacaggatattttaccttgctgttccccaagaggcacttcttgatgttgcactgtcactagctgacagtgcccaaactatgcaaggctggaataggataataattgagaaaccatttggcttcactggtttgtcttcacatcgggtaacacaatcactgctgtcaagatttgaggaggagcagatttacaggattgatcatcttttggggaaggatctgattgaaaatctcaccgtcttgagattttctaatttggtgtttgaacctttgtggagtcgcacctatatacgcaatgtacaggtcatattttctgaagaaacagcagcagaaatccaagggagatactttggaaattatggcataattcgtgacatagtgcatagtcacattcttcaaacaatagcactatttgcgatggaaccacctgtaagccttgatggagaggatatccgagatgaaaaggtgaaggtgctcagatcaattcgacaggtgaaccttgaggatgttgttcttggtcaactgaaagatacctctgtgaaagttgacagatatacaaaatcattgacaccaacctattttgctgctgccatgtacattgacaattcgcgttgggatggagtaccatttttgatcaagacaggaattgggctcatggaaaatagagctgagattcgtattcagtttcgccatgttcctggcaatatctatcgtgaacgctttggccatgacatagatcttgacacaaatgagctgatcttgcgtgatcaacctgaagaagccatccttttgaaagtcaacaataaggtcccaggacttgggctccagttagatgcttcagaactcaacctgctttacagggataggtacaatgtcgaactgccagattcgtatgagcatcttcttcttgatgtgcttgatggagacagtcatctattcatgcgcagtgatgaagtagctgctgcatggaacgtgctaactccactaatccatgagattgatcagaatagaatagctcctgagctctacgaggctgggggtagaggacccgttaatgcgtactaccttgctgctaaacatggggtcagattggatgatgaatggtga

SEQ ID NO: 2405 - protein, 629 aa, Oryza sativa
MAGLAVSASPAPAPASFRPAAAASRFGPCAQVAGPAANFRTRVCGLRCLIAAKLKFRKALKRHGWQLRRNLEVRANDKVPDWLEATPLTENIMSRDVQLAYDSGGETSNTCPDTLDSSVIEQSSMHHKLNPSETHPPVLKEDPVLFDDPPESAAPLCIAVIGATGELAKNKVFPALFALYYSGFLPQNVGIFGYSRKTLTDEDLRSMIEANLTCRVDHHENCDEKLNEFLKRTYYIDAGYDNKDGMVKLNSKMSQIEGNCAANRIFYLAVPQEALLDVALSLADSAQTMQGWNRIIIEKPFGFTGLSSHRVTQSLLSRFEEEQIYRIDHLLGKDLIENLTVLRFSNLVFEPLWSRTYIRNVQVIFSEETAAEIQGRYFGNYGIIRDIVHSHILQTIALFAMEPPVSLDGEDIRDEKVKVLRSIRQVNLEDVVLGQLKDTSVKVDRYTKSLTPTYFAAAMYIDNSRWDGVPFLIKTGIGLMENRAEIRIQFRHVPGNIYRERFGHDIDLDTNELILRDQPEEAILLKVNNKVPGLGLQLDASELNLLYRDRYNVELPDSYEHLLLDVLDGDSHLFMRSDEVAAAWNVLTPLIHEIDQNRIAPELYEAGGRGPVNAYYLAAKHGVRLDDEW

SEQ ID NO: 2406 - DNA, 1734 bp, Oryza sativa
  CDS (1)..(1734)
atggccggcaccggcttacgattccggcagggcgccatcttcttctcaggagctcatgctgctgctcatccaagaacaaggactcctcaccaccattgctcacctcagaggacgcacgatgcgagaggaaggtgccgcctcacggctaagtccgcaaatggacgcccacagatcagtgcctccttcagagatgtggcgatagatggggcacagtctgaagatggggcgccagagcagggaggatccaccgtcagcatcaccgtcgtcggcgcctccggcgatctcgccaagaagaagatctttcccgcgcttttcgccctgtactacgaggactgcctcccggagcattttacagtttttggttatgctcgtagcaagatgagcgatgaagagctcaggaacatgattagcttgactctgacatgccggattgatcagagggagaactgcagtgacaagatggaacagtttctgaagagatgcttttatcaatctgggcagtacaattcagaggaagggttttctgaactggacagaaagctaaaagaaaaggaggctggcaaggtaccaaacaggctcttttacctgtcgattccaccgaacatatttgtcgatgtggtgagatctgctagtcgcacagcatcatctcaagacggatggacaaggttcatagtggagaagccattcggccgcgattccgagtcgtcaggggagctcactcgaaacttgaagaagtacttggccgaggagcagatattcaggattgaccattatttggggaaggagctggttgagaacctctcggtgctccgtttctccaatctcgtcttcgagccactgtggtcgaggaactacatcaggaatgtgcagctcatattttctgaagatttcggcacggagggtcgaggcggctacttcgacaactacgggatcatcagggacataatgcagaaccacctgctgcagatcctggccctgttcgccatggagactccggtcagcctcgacgccgaggacatccgcaacgagaaggtgaaagtgctgaggtcgatgaggcagctgaggctggaggacgtggtggtgggtcagtacaaggggcacagcaagggcgggaagacgtacccggcgtacgtggacgacccgacggtgccgagcggcagcatcacgccgacgttcgccgccgccgccctcttcatcgacaacgcccgctgggacggcgtccccttcctcatgaaggccggcaaggccctgcacacgcgacgggcggagatcagggtgcagttccggcgggtgccggggaacctgtacgggcggcggagccggagcgtgggcggcggcgggacgacagcgacgagggagctggagaaggcgacgaacgagctggtgctgcgggtgcagcccgacgaggcgatctacctcaagatcaacagcaaggtgcccgggctggggatgaggctggacagcagcgacctcaacctgctctactccgagcgctaccccgccgagatccccgacgcctacgagcgcctgctgctcgacgccatcgagggcgagcgccgcctcttcatccgcagcgacgagctcgacgccgcctgggccatcttcacccccgtcctcgccgacctcgaggccaacaaggtggcacccgagctctacccgtacggcagccggggacccgtcggagcgcactacctcgccgccaaccacaacgtccgctggggtgacattagctag

SEQ ID NO: 2407 - protein, 577 aa, Oryza sativa
MAGTGLRFRQGAIFFSGAHAAAHPRTRTPHHHCSPQRTHDARGRCRLTAKSANGRPQISASFRDVAIDGAQSEDGAPEQGGSTVSITVVGASGDLAKKKIFPALFALYYEDCLPEHFTVFGYARSKMSDEELRNMISLTLTCRIDQRENCSDKMEQFLKRCFYQSGQYNSEEGFSELDRKLKEKEAGKVPNRLFYLSIPPNIFVDVVRSASRTASSQDGWTRFIVEKPFGRDSESSGELTRNLKKYLAEEQIFRIDHYLGKELVENLSVLRFSNLVFEPLWSRNYIRNVQLIFSEDFGTEGRGGYFDNYGIIRDIMQNHLLQILALFAMETPVSLDAEDIRNEKVKVLRSMRQLRLEDVVVGQYKGHSKGGKTYPAYVDDPTVPSGSITPTFAAAALFIDNARWDGVPFLMKAGKALHTRRAEIRVQFRRVPGNLYGRRSRSVGGGGTTATRELEKATNELVLRVQPDEAIYLKINSKVPGLGMRLDSSDLNLLYSERYPAEIPDAYERLLLDAIEGERRLFIRSDELDAAWAIFTPVLADLEANKVAPELYPYGSRGPVGAHYLAANHNVRWGDIS

SEQ ID NO: 2408 - DNA, 1767 bp, Oryza sativa
  CDS (1)..(1767)
atggcgctctcctgcatgaggtgctccccggccgccggcgccgtacgacgaggattggcatcggcggctccgccggcggcgctctccttcgccagatgcggcctccgtagagcggccgcgctcgggtggcgcgtcgccgccgtcaccactacgggagtgcaaggtgccaaggatgctggtctggagaaggctgccagaagtgcttcccaatcaaaggtggaaaatggctcaccttcagaaatcattttagatgattttgaagacttgagccctctatcagaaaatgatgactccactgttagtatcactgtagtcggagcatctggtgaccttgccaagaagaagatatttcctgcactttttgctctatactatgaagattgtcttccaaagcatttcactatcttcggatatgcacgcagcaagatgacagatgctgaattgagaaacatggtcagcaaaacactgacatgcagaatagataaaagggaaaactgtaatgagaagatggaagagtttttaaagagatgcttctatcattcaggccaatatgattcagaggagcatttcatggaccttgacaagaagctgaaacaacatgagggttccagagtttctaaccgtcttttctacttgtcaataccaccaaatatattccttgatgttgtaaaatgtgcaagcaaatcagcatcatctgggaatggttggacaagggtaattgttgagaaaccttttggtcgtgactcagattcatcttctgcattaacaaggggtctgaagcagtacctggtagaggaccaaatcttcaggattgaccactacttgggaaaggaactagtggagaacctgtctgtccttcgcttctcaaatcttgtttttgaacctctatggtcaaggcagtatataaggaatgtgcagctgatattctcagaggatttcggcactgaaggacgaggagggtactttgataggtatggtattatccgtgacataatgcagaatcatcttcttcagatactagccctatttgcaatggaaactcctgttagcttggaggcagaggacataagaaacgaaaaggttaaagttctgcgttccatgaagcccctgcaactggaagatgtggtgataggacagtacaaaagtcatacaaagggtggtaccacataccctggatacactgaagataagacggtgcccaaggatagtgtaaccccaacatttgctgcagctgcacttttcataaataatgctagatgggatggagttccttttcttatgaaagctgggaaggctttacatacaaagggggctgagattagagtacagttccgacatgttcctggtaatctttataagaggagttttgggactgatcttgatacagccactaatgaacttgtcatacgtgtgcaacctgatgaagctatctacttgaagattaacaacaaaattcctggtcttggtatgagactagatagaagtaatttgaatcttcactatgcagcaaggtactccaaggagataccagatgcttatgagaggctcttacttgatgccattgaaggagagcgaaggctttttatccgttctgatgagttggatgccgcatgggagctcttcactcccttactcaaggagctggaagagaagcggatagcccctgagctatacccttatggaagccgcggtcctgtaggggctcactaccttgcagcaaagtacaacgtcagatggggtgatttgaccacagaacagaaggcatga

SEQ ID NO: 2409 - protein, 588 aa, Oryza sativa
MALSCMRCSPAAGAVRRGLASAAPPAALSFARCGLRRAAALGWRVAAVTTTGVQGAKDAGLEKAARSASQSKVENGSPSEIILDDFEDLSPLSENDDSTVSITVVGASGDLAKKKIFPALFALYYEDCLPKHFTIFGYARSKMTDAELRNMVSKTLTCRIDKRENCNEKMEEFLKRCFYHSGQYDSEEHFMDLDKKLKQHEGSRVSNRLFYLSIPPNIFLDVVKCASKSASSGNGWTRVIVEKPFGRDSDSSSALTRGLKQYLVEDQIFRIDHYLGKELVENLSVLRFSNLVFEPLWSRQYIRNVQLIFSEDFGTEGRGGYFDRYGIIRDIMQNHLLQILALFAMETPVSLEAEDIRNEKVKVLRSMKPLQLEDVVIGQYKSHTKGGTTYPGYTEDKTVPKDSVTPTFAAAALFINNARWDGVPFLMKAGKALHTKGAEIRVQFRHVPGNLYKRSFGTDLDTATNELVIRVQPDEAIYLKINNKIPGLGMRLDRSNLNLHYAARYSKEIPDAYERLLLDAIEGERRLFIRSDELDAAWELFTPLLKELEEKRIAPELYPYGSRGPVGAHYLAAKYNVRWGDLTTEQKA

SEQ ID NO: 2410 - DNA, 1551 bp, Brassica napus
  CDS (1)..(1551)
atggattctgggcagtggcacgttgagaagaggtccactttgaggaacgaatcgtttttaaaagagtacggtccagtctccgaaactggtagcctctccatcgtagttcttggtgcttctggtgatctcgccaagaagaagacttttcctgctcttttcaatctctaccaccaggggttccttaatccagatgaagttcatatctttggatatgcaaggagtaagatttctgatcaggagctgagagacaagatccatggatatcttgttgatgagaagaatgcttctgagaaagcggaagctttgtccaagtttctccagctgattaagtatgtgagtggtccttatgattctgaggacgggttcaaaaggctagaaaaggcaatctccgagcacgaaatctcgaaaaagacctctgaaggatcttcgaggagattgttttatcttgctctccctccctctgtataccctcctgtatgcaagatgatcaaggcatggtgcactaacacatctgatcttggtggatggacacgtgtcgtcgttgagaagccatttggaaaggacttggaatctgcagagcagcttagttcccagattggagcactgtttgatgagcctcagatttaccgtattgatcattacctgggaaaggaactagtccaaaacatgctggtccttaggtttgccaaccggttatttctgccgctatggaaccgtgacaacatagctaacgtccagattgttttcagggaagattttggaactgaaggccgtgggggatactttgatgaatacggaatcatccgtgatattattcaaaaccacttgctccaggttctttgccttgttgcaatggagaaaccagtctctcttaaacctgagcacatccgtgatgagaaagtgaaggttcttcaatcagtgatgcctataaaagatgaagaggtggttcttggacagtacgaaggttatagagatgatccaactgttccaaacgactcaaacactccaacctttgccacaacaattcttcgcatagacaatgaaagatgggaaggtgttccgtttatactgaaagccggaaaggcaatgagttcaaagaaggcagatattcggattcagtttaaggatgttcctggcgacatattcaaatgtcaaaagcaagggaggaacgagtttgtcatacgcttgcaaccttcggaggccatgtacatgaagctaactgtgaagcaaccgggtctagagatgcaaaccgtgcagagtgaactagacctatcttacaagcaacgttaccaagatgtcccgattccagaggcttacgagcgcctcattctcgacacaatcaaaggtgaccagcaacactttgttcgcagagatgagctgaaggcagcttgggaaatcttcactccactacttcacaggataggtaacggagaagtgaaatcgatcccatacaaaccaggaagccgagggccaacggaagcagatcagctgctagagaaaactggttatttgcagacccatggctacatatggatccctcctacgctgtaa

SEQ ID NO: 2411 - protein, 516 aa, Brassica napus
MDSGQWHVEKRSTLRNESFLKEYGPVSETGSLSIVVLGASGDLAKKKTFPALFNLYHQGFLNPDEVHIFGYARSKISDQELRDKIHGYLVDEKNASEKAEALSKFLQLIKYVSGPYDSEDGFKRLEKAISEHEISKKTSEGSSRRLFYLALPPSVYPPVCKMIKAWCTNTSDLGGWTRVVVEKPFGKDLESAEQLSSQIGALFDEPQIYRIDHYLGKELVQNMLVLRFANRLFLPLWNRDNIANVQIVFREDFGTEGRGGYFDEYGIIRDIIQNHLLQVLCLVAMEKPVSLKPEHIRDEKVKVLQSVMPIKDEEVVLGQYEGYRDDPTVPNDSNTPTFATTILRIDNERWEGVPFILKAGKAMSSKKADIRIQFKDVPGDIFKCQKQGRNEFVIRLQPSEAMYMKLTVKQPGLEMQTVQSELDLSYKQRYQDVPIPEAYERLILDTIKGDQQHFVRRDELKAAWEIFTPLLHRIGNGEVKSIPYKPGSRGPTEADQLLEKTGYLQTHGYIWIPPTL

SEQ ID NO: 2412 - DNA, 1713 bp, Brassica napus
  CDS (1)..(1713)
atggcgacgcatactatgatcgttcgttcctcatcctctgctctcgctgcttcgtctccattaacagagactctaccactcttcactactagatctctcacattcccgagaaaatcctccttctctcgtcttcgcttgagattctttgccgaaaaactttctcagctcgactcctctaatcgctgtgcctctttacaagactctggagaacatcttacagaggagcatgacacaaaagaagagtcatccactcttagtattacagtggttggagcctctggagatttggccaataagaaaatattccctgcattgtttgctctcttttacgagggttgtcttcctcaggacttctctgtttttggttatgctcggaccaaactcacccatgaggagcttcgtgtcatgatcagtagaactttaacttgtcggatagaccaaagggagaactgtgtggacaaaatggatcagttcttaaagagatgcttttaccattcgggtcagtataactctgaagatgattttgcagaactaaacaccaagctcaaagagaaagaggaaggaaagctatcaaacaggctgtactatttgtcaattccaccaaacatattcgtggatgtggtaaggtgtgcaagccttagagcctcctcagtgaatggctggacaagagtcattgtcgaaaagccattcggtcgcgactctgaatcatctggagagttaaccagatgtcttaaacagtatctcacagaggagcaaatcttcaggatcgaccactatttgggaaaagaactcgttgagaacctttcagtgcttcgattctcaaatcttgttttcgagcctctttggtctagaaattacatacgcaacgttcaactcattttctctgaagactttggtacagaaggacgcggaggttactttgatcaatatggaatcatacgagacatcatgcaaaaccatctcttgcaaattcttgcacttttcgcaatggagacacctgtgagcttagacgctgaggacataaggagcgaaaaggtcaaagttctgaggtcaatgaaaccgttgctgcttcaagatatgattgtgggtcagtacaaaggtcatagcaagggtggaaaggcttatcctggttatacggacgacccaacagttcccacaaacagtctcactcctacatttgctgcagccgctatgttcatcaacaacgcgagatgggacggtgtccctttccttatgaaagctggaaaagctctgcataccagaggtgcagagatcagagttcagttcagacatgtcccggggaacttgtacaagaagaatttcgccactgatttagacaaggcaactaatgagctagtgatcagagttcaacctgatgaaggtatatacctgaggatcaacaacaaagtccctggtctcggaatgagactcgaccgaagcgaccttaaccttctctatcggtccaggtatccaagagagatcccagatgcatatgaaaggctgcttcttgatgctattgaaggagaaaggaggttgtttataagaagtgatgagttagatgcagcatgggatctattcacaccggctttgaaggagctcgagcacaagaaaatagttcctgagctatatccatatgggagcagaggtcctgttggcgctcattaccttgcatctaagtacaatgtgagatggggagatcttgaagatgcttaa

SEQ ID NO: 2413 - protein, 570 aa, Brassica napus
MATHTMIVRSSSSALAASSPLTETLPLFTTRSLTFPRKSSFSRLRLRFFAEKLSQLDSSNRCASLQDSGEHLTEEHDTKEESSTLSITVVGASGDLANKKIFPALFALFYEGCLPQDFSVFGYARTKLTHEELRVMISRTLTCRIDQRENCVDKMDQFLKRCFYHSGQYNSEDDFAELNTKLKEKEEGKLSNRLYYLSIPPNIFVDVVRCASLRASSVNGWTRVIVEKPFGRDSESSGELTRCLKQYLTEEQIFRIDHYLGKELVENLSVLRFSNLVFEPLWSRNYIRNVQLIFSEDFGTEGRGGYFDQYGIIRDIMQNHLLQILALFAMETPVSLDAEDIRSEKVKVLRSMKPLLLQDMIVGQYKGHSKGGKAYPGYTDDPTVPTNSLTPTFAAAAMFINNARWDGVPFLMKAGKALHTRGAEIRVQFRHVPGNLYKKNFATDLDKATNELVIRVQPDEGIYLRINNKVPGLGMRLDRSDLNLLYRSRYPREIPDAYERLLLDAIEGERRLFIRSDELDAAWDLFTPALKELEHKKIVPELYPYGSRGPVGAHYLASKYNVRWGDLEDA

SEQ ID NO: 2414 - DNA, 1869 bp, Hordeum vulgare
  CDS (1)..(1869)
atggttacgacagtcctcgccgtggcggcttcagcagctccagcgccgcctccgtcgttggctgcgcgcttcagcccggttgcaggacctgctgtcggttttagagcgcattgttggattactgccaagatgaagctccacaaggccctggggaggcatggatggcaagtccagagaaagctggatattcgaggggatggtaaaattcctgactacttcgaggttgcatggcggactggaaatataactcgtcggaatgtacaacctgctggtgaaactggaggtgaaacggcaaatacaagctctgttatgtcagataactcgatcgatgacaaaggtttattgcatctgggactcaacaactctgaagctgatcgtcctgtactagaggaagaccttgttctgtttgataactttaatgaccaacctgaaagtgtaccatctctttgcattgctgtcattggagctactggcgaactggcaagaagtaaagtcttcccagcactatttgctctgtattacagtggttttcttcctcagaatgttgccatatttggatattctagaaagacattggcagacgaggatttaagatccatgattgaatccaatttgacctgtcgggtagatcaccacgaaaactgtgaagacaagttaaatgaattccttaaaaggacatactatgtcgatgcaggacacgataataaagatgggatggcgaaactaaatttgagaatgacacagatagagggcacttgtgcagcaaacaggatattctaccttgctgttccccaagaggcacttcttgatgtggcattgccattatctgacattgcccaaactaagcatggctggaataggataattatcgagaaaccatttggcttcactagtttgtcctcacaacgggtaacacagtctttgttgtcaagatttgaagagaagcaaatttaccgaattgatcatcttttggggaaggatctaattgaaaatctcactgtcttgagattttctaatttggtgtttgaaccattatggagtaggaagtacatacgtaatgtgcaggtcgttttttcagaagaaacatcaacagaaacacaagggaggtacttcggaaactatgggataatccgtgatatagtgcacagccacattcttcaaacgatagcactatttgctatggaaccacctgtaagtcttgatggggaggatatccgcgatgagaaggtgaaggtgctcagatcaattagaaaagtggacattgatgatgtcgtccttggtcaactcaaaaatacctgtggtaaagttgaccaatatacaaaatcaatgacacctacctacttggctgccgcaatgtacattgacaatgcacgttgggatggggtaccttttttgatcaagactggaatgggacttatggagaatagagctgagattcgtattcaatttcatcacgtccctggcaatatctaccgtgaacgttttggtcatgacatagatcttgacacaaatgagctggttttacgtgacctacccgaagaagccattctcttgaaagtcaacaataaggtcccgggtcttgggctccagttggatgcttcagagctcaacctactttacagagacaggtacgatgttgaagttccagattcatatgagcatcttcttttggatgttctagatggcgatagtcatctgttcatgcgaagtgatgaattagctgctgcatggagcgtgttggcgccaatactccatgagatcgaccagaagagggttgctcctgagctctacgaggctggggataaaggaccgattaatgcttactatctcgctgctaaacatggagtccgatgggatgatggctgctga

SEQ ID NO: 2415 - protein, 622 aa, Hordeum vulgare
MVTTVLAVAASAAPAPPPSLAARFSPVAGPAVGFRAHCWITAKMKLHKALGRHGWQVQRKLDIRGDGKIPDYFEVAWRTGNITRRNVQPAGETGGETANTSSVMSDNSIDDKGLLHLGLNNSEADRPVLEEDLVLFDNFNDQPESVPSLCIAVIGATGELARSKVFPALFALYYSGFLPQNVAIFGYSRKTLADEDLRSMIESNLTCRVDHHENCEDKLNEFLKRTYYVDAGHDNKDGMAKLNLRMTQIEGTCAANRIFYLAVPQEALLDVALPLSDIAQTKHGWNRIIIEKPFGFTSLSSQRVTQSLLSRFEEKQIYRIDHLLGKDLIENLTVLRFSNLVFEPLWSRKYIRNVQVVFSEETSTETQGRYFGNYGIIRDIVHSHILQTIALFAMEPPVSLDGEDIRDEKVKVLRSIRKVDIDDVVLGQLKNTCGKVDQYTKSMTPTYLAAAMYIDNARWDGVPFLIKTGMGLMENRAEIRIQFHHVPGNIYRERFGHDIDLDTNELVLRDLPEEAILLKVNNKVPGLGLQLDASELNLLYRDRYDVEVPDSYEHLLLDVLDGDSHLFMRSDELAAAWSVLAPILHEIDQKRVAPELYEAGDKGPINAYYLAAKHGVRWDDGC

SEQ ID NO: 2416 - DNA, 1800 bp, Brassica napus
  CDS (1)..(1800)
atgatggcgtctttgtcttcctccgtcacctcccaatcatatcgtaccggttattctgcttcttgctcaccggttaacggtaacaaacatcgatcactctcgttcctatctgcttctcctcaaggacttaaagctcatgagctctgtgttagattccagaggaagtctagtcgtagttctgtctttatgcaagatggtgcaatagtcaccaattcagattcaacagagagtagtaaatcttctctcaagggattgaaagatgaggtgttatcagtaatagctcaagaagcagccaaggttggagaaggatctaatggtcagaaccagtcaacagttagtatcacagtggttggagcctctggtgatctcgccaagaagaagattttcccggctcttttcgcactttactatgaagactgtcttcctgagcattttacaatatacggttactctaggagtaaaatgacagatggtgaacttagaaacatggtcagcaaaaccctcacctgcaggattgataagagggcaaactgtggtgagaagatggaagaatttctcaagagatgcttttaccattctggtcagtatgattctcaggaacattttactgaactggacaagaagctcaaggaacatgaggctggaagaatctcaaaccgcctcttttacttgtcaatccctccaaatatatttgtagacgctgtgaaatgtgcaagctcttctgcttcatctgtcaatggatggactagagtcattgtcgagaaaccttttggccgagattccaaaacctccgctgctttaacaaaatcccttaagcagtacctggaggaagaccaaatatttaggatagaccattacctaggaaaggagctagttgagaacttatcagttctcagattctcaaacctcatattcgaaccgttatggtcaaggcagtacataaggaacgtgcagttcatattctctgaggactttggcactgaaggacgtggagggtactttgaccattacggaatcataagagatataatgcagaatcatctccttcaaatactagcactcttcgccatggaaacacccgttagcttagacgcagaggacatcagaaacgaaaaggttaaggttctacgttcgatgaggccaattcaaatagaagatgtggtgataggacagtacaagagccacacaaagggaggagtcacatatccaggctacaccgatgataaaactgtaccaaaagatagcctgacaccgacgtttgcagctgctgcactcttcatagacaatgcaagatgggacggtgtgccttttctaatgaaagctggcaaagcactacacaccaggagggcagagataagagtgcagttcaggcatgtgccgggaaacttatataacaggaacaatactggtactaatcttgacaaaaccacaaacgagcttgtcatccgtgtccaaccagatgaagcaatatatctgaaaataaacaacaaggtccctggtttggggatgagactagatcgcagtaacttgaatcttctatattcagcaaggtattcaaaggagataccagatgcatatgagaggcttttgctggatgcaatagaaggagaaagaaggttgttcataagaagcgacgaacttgacgcagcttgggcactattcactccactgctcaaagagattgaagaaaagaagacaataccagagtactatccttacggcagtcgtggtccagttggtgctcattatctagctgcaaaacacaaggtccaatggggagacatgagtctcgaccagtaa

SEQ ID NO: 2417 - protein, 599 aa, Brassica napus
MMASLSSSVTSQSYRTGYSASCSPVNGNKHRSLSFLSASPQGLKAHELCVRFQRKSSRSSVFMQDGAIVTNSDSTESSKSSLKGLKDEVLSVIAQEAAKVGEGSNGQNQSTVSITVVGASGDLAKKKIFPALFALYYEDCLPEHFTIYGYSRSKMTDGELRNMVSKTLTCRIDKRANCGEKMEEFLKRCFYHSGQYDSQEHFTELDKKLKEHEAGRISNRLFYLSIPPNIFVDAVKCASSSASSVNGWTRVIVEKPFGRDSKTSAALTKSLKQYLEEDQIFRIDHYLGKELVENLSVLRFSNLIFEPLWSRQYIRNVQFIFSEDFGTEGRGGYFDHYGIIRDIMQNHLLQILALFAMETPVSLDAEDIRNEKVKVLRSMRPIQIEDVVIGQYKSHTKGGVTYPGYTDDKTVPKDSLTPTFAAAALFIDNARWDGVPFLMKAGKALHTRRAEIRVQFRHVPGNLYNRNNTGTNLDKTTNELVIRVQPDEAIYLKINNKVPGLGMRLDRSNLNLLYSARYSKEIPDAYERLLLDAIEGERRLFIRSDELDAAWALFTPLLKEIEEKKTIPEYYPYGSRGPVGAHYLAAKHKVQWGDMSLDQ

SEQ ID NO: 2418 - DNA, 1800 bp, Brassica napus
  CDS (1)..(1800)
atgatggcgtctttgtcttcctccgtcacctcccaatcatatcgtaccggttattctgcttcttgctcaccggttaacggtaacaaacatcgatcactctcgttcctatctgcttctcctcaaggacttaaagctcatgagctctgtgttagattccagaggaagtctagtcgtagttctgtctttatgcaagatggtgcaatagtcaccaattcagattcaacagagagtagtaaatcttctctcaagggattgaaagatgaggtgttatcagtaatagctcaagaagcagccaaggttggagaaggatctaatggtcagaaccagtcaacagttagtatcacagtggttggagcctctggtgatctcgccaagaagaagattttcccggctctttttgcactttactatgaagactgtcttcctgagcattttacaatatacggttactctaggagtaaaatgacagatggtgaacttagaaacatggtcagcaaaaccctcacctgcaggattgataagagggcaaactgtggtgagaagatggaagaatttctcaagagatgcttttaccattctggtcagtatgattctcaggaacattttactgaactggacaagaagctcaaggaacatgaggctggaagaatctcaaaccgcctcttttacttgtcaatccctccaaatatatttgtagacgctgtgaaatgtgcaagctcttctgcttcatctgtcaatggatggactagagtcattgtagagaagccttttggccgagattctgaaacctctgctgctttaaccaaatcactcaagcagtacttggaggaagatcaaatatttaggatagaccattacttaggaaaggagctagtagagaacttatcagttctcagattctcaaaccttatattcgaaccgttatggtcaaggcagtacataaggaacgtgcagttcatattctctgaggactttggcaccgaaggacgcggagggtactttgaccactacggaataataagagacataatgcagaatcacctccttcaaatactagcactcttcgccatggaaacacctgttagcttagacgcagaggacatcagaaacgaaaaggttaaggttctacgttcgatgaggccaattcaaatagaagatgtggtgataggacagtacaagagccacacaaagggaggagtcacatatccaggctacaccgatgataaaactgtaccaaaagatagcctgacaccgacgtttgcagctgctgcactcttcatagacaatgcaagatgggacggtgtgccttttctaatgaaagctggcaaagcactacacaccaggagggcagagataagagtgcagttcaggcatgtgccgggaaacttatataacaggaacaatactggtactaatcttgacaaaaccacaaacgagcttgtcatccgtgtccaaccagatgaagcaatatatctgaaaataaacaacaaggtccctggtttggggatgagactagatcgcagtaacttgaatcttctatattcagcaaggtattcaaaggagataccagatgcatatgagaggcttttgctggatgcaatagaaggagaaagaaggttgttcataagaagcgacgaacttgacgcagcttgggcactattcactccactgctcaaagagattgaagaaaagaagacaataccagagtactatccttacggcagtcgtggtccagttggtgctcattatctagctgcaaaacacaaggtccaatggggagacatgagtctcgaccagtaa

SEQ ID NO: 2419 - protein, 599 aa, Brassica napus
MMASLSSSVTSQSYRTGYSASCSPVNGNKHRSLSFLSASPQGLKAHELCVRFQRKSSRSSVFMQDGAIVTNSDSTESSKSSLKGLKDEVLSVIAQEAAKVGEGSNGQNQSTVSITVVGASGDLAKKKIFPALFALYYEDCLPEHFTIYGYSRSKMTDGELRNMVSKTLTCRIDKRANCGEKMEEFLKRCFYHSGQYDSQEHFTELDKKLKEHEAGRISNRLFYLSIPPNIFVDAVKCASSSASSVNGWTRVIVEKPFGRDSETSAALTKSLKQYLEEDQIFRIDHYLGKELVENLSVLRFSNLIFEPLWSRQYIRNVQFIFSEDFGTEGRGGYFDHYGIIRDIMQNHLLQILALFAMETPVSLDAEDIRNEKVKVLRSMRPIQIEDVVIGQYKSHTKGGVTYPGYTDDKTVPKDSLTPTFAAAALFIDNARWDGVPFLMKAGKALHTRRAEIRVQFRHVPGNLYNRNNTGTNLDKTTNELVIRVQPDEAIYLKINNKVPGLGMRLDRSNLNLLYSARYSKEIPDAYERLLLDAIEGERRLFIRSDELDAAWALFTPLLKEIEEKKTIPEYYPYGSRGPVGAHYLAAKHKVQWGDMSLDQ

SEQ ID NO: 2420 - DNA, 1551 bp, Brassica napus
  CDS (1)..(1551)
atggattctgggcagtggcacgttgagaagaggtccactttgaggaacgaatcgtttttaaaagagtacggtccagtctccgaaactggtagcctctccatcgtagttcttggtgcctctggtgatctcgccaagaagaagacttttcctgctcttttcaatctctaccaccaggggtttcttaatccagatgaagttcacatctttggatacgcaaggagtaagatctctgatcaggagctgagagacaagatccgtggatatcttgttgatgagaagaatgcttctgagaaagcagaagctttgtccaagtttcttcagctgattaagtatgtgagtggcccttatgattctgaggacgggttcaaaaggctagacaaggcaatctcagagcacgaaatctcgaaaaagacctctgaaggatcttccaggagattgttttatcttgcactccctccctctgtataccctcctgtatgcaagatgatcaaggcatggtgcactaacaaatctgatcttggtggatggacacgtgtcgtcgttgagaagccatttggaaaggacttggaatctgcagagcagcttagttcccagattggagcactgtttgatgagcctcagatttaccgtattgatcattacctgggaaaggaactagtccaaaacatgctggtccttaggtttgccaaccggttatttctgccgctatggaaccgtgacaacatagctaacgtccagattgttttcagggaagattttggaactgaaggccgtgggggatactttgatgaatacggaatcatccgtgatattattcaaaaccacttgctccaggttctttgccttgttgcaatggagaaaccagtctctcttaaacctgagcacatccgcgatgagaaagtgaaggtgcttcaatcagtgatgccaataaaagatgaagaggtggttcttggacaatacgaagggtatagagatgatcctactgttccagacgactcaaatactccaacgtttgccacaacaattcttcgcatacacaacgaaagatgggaaggtgtaccctttatactgaaagctggaaaagcaatgaattcaaagaaggcagaaattcgaattcagttcaaggatgttccaggcgacatattcaaatgtcaaaagcaagggaggaacgagtttgtgatacgcttgcaaccttcggaggccatgtacatgaagctaactgtgaagcaaccgggtctagagatgcaaaccgtgcagagtgaactagacctatcatacaagcaacgttaccaagatgtctcgattccagaggcttacgagcgcctcattcttgacacaatcaaaggtgaccagcaacactttgttcgcagagacgagctgaaggcagcttgggaaatcttcactccactgcttcacaggatagacaaaggagaagtgaaatcgatcccatacaaaccaggaagccgagggccaacggaagcagatcagctgctagagaaagctggttatttgcagactcatggctacatctggatccctcctacattataa

SEQ ID NO: 2421 - protein, 516 aa, Brassica napus
MDSGQWHVEKRSTLRNESFLKEYGPVSETGSLSIVVLGASGDLAKKKTFPALFNLYHQGFLNPDEVHIFGYARSKISDQELRDKIRGYLVDEKNASEKAEALSKFLQLIKYVSGPYDSEDGFKRLDKAISEHEISKKTSEGSSRRLFYLALPPSVYPPVCKMIKAWCTNKSDLGGWTRVVVEKPFGKDLESAEQLSSQIGALFDEPQIYRIDHYLGKELVQNMLVLRFANRLFLPLWNRDNIANVQIVFREDFGTEGRGGYFDEYGIIRDIIQNHLLQVLCLVAMEKPVSLKPEHIRDEKVKVLQSVMPIKDEEVVLGQYEGYRDDPTVPDDSNTPTFATTILRIHNERWEGVPFILKAGKAMNSKKAEIRIQFKDVPGDIFKCQKQGRNEFVIRLQPSEAMYMKLTVKQPGLEMQTVQSELDLSYKQRYQDVSIPEAYERLILDTIKGDQQHFVRRDELKAAWEIFTPLLHRIDKGEVKSIPYKPGSRGPTEADQLLEKAGYLQTHGYIWIPPTL

SEQ ID NO: 2422 - DNA, 1551 bp, Brassica napus
  CDS (1)..(1551)
atggattctgggcagtggcacgttgagaagaggtccactttgaggaacgaatcgtttttaaaagagtacggtccagtctccgaaactggtagcctctccatcgtagttcttggtgcttctggtgatctcgccaagaagaagacttttcctgctcttttcaatctctaccaccaggggttccttaatccagatgaagttcatatctttggatatgcaaggagtaagatttctgatcaggagctgagagacaagatccatggatatcttgttgatgagaagaatgcttctgagaaagcggaagctttgtccaagtttctccagctgattaagtatgtgagtggtccttatgattctgaggacgggttcaaaaggctagaaaaggcaatctccgagcacgaaatctcgaaaaagacctctgaaggatcttcgaggagattgttttatcttgctctccctccctctgtataccctcctgtatgcaagatgatcaaggcatggtgcactaacacatctgatcttggtggatggacacgtgtcgtcgttgagaagccatttggaaaggacttggaatctgcagagcagcttagttcccagattggagcactgtttgatgagcctcagatttaccgtattgatcattacctgggaaaggaactagtccaaaacatgctggtccttaggtttgccaaccggttatttctgccgctatggaaccgtgacaacatagctaacgtccagattgttttcagggaagattttggaactgaaggccgtgggggatactttgatgaatacggaatcatccgtgatattattcaaaaccacttgctccaggttctttgccttgttgcaatggagaaaccagtctctcttaaacctgagcacatccgtgatgagaaagtgaaggttcttcaatcagtgatgcctataaaagatgaagaggtggttcttggacagtacgaaggttatagagatgatccaactgttccaaacgactcaaacactccaacctttgccacaacaattcttcgcatagacaatgaaagatgggaaggtgttccgtttatactgaaagccggaaaggcaatgagttcaaagaaggcagatattcggattcagtttaaggatgttcctggcgacatattcaaatgtcaaaagcaagggaggaacgagtttgtcatacgcttgcaaccttcggaggccatgtacatgaagctaactgtgaagcaaccgggtctagagatgcaaaccgtgcagagtgaactagacctatcttacaagcaacgttaccaagatgtcccgattccagaggcttacgagcgcctcattctcgacacaatcaaaggtgaccagcaacactttgttcgcagagatgagctgaaggcagcttgggaaatcttcactccactacttcacaggataggtaacggagaagtgaaatcgatcccatacaaaccaggaagccgagggccaacggaagcagatcagctgctagagaaagctggttatttgcagacccatggctacatatggatccctcctacgctgtaa

SEQ ID NO: 2423 - protein, 516 aa, Brassica napus
MDSGQWHVEKRSTLRNESFLKEYGPVSETGSLSIVVLGASGDLAKKKTFPALFNLYHQGFLNPDEVHIFGYARSKISDQELRDKIHGYLVDEKNASEKAEALSKFLQLIKYVSGPYDSEDGFKRLEKAISEHEISKKTSEGSSRRLFYLALPPSVYPPVCKMIKAWCTNTSDLGGWTRVVVEKPFGKDLESAEQLSSQIGALFDEPQIYRIDHYLGKELVQNMLVLRFANRLFLPLWNRDNIANVQIVFREDFGTEGRGGYFDEYGIIRDIIQNHLLQVLCLVAMEKPVSLKPEHIRDEKVKVLQSVMPIKDEEVVLGQYEGYRDDPTVPNDSNTPTFATTILRIDNERWEGVPFILKAGKAMSSKKADIRIQFKDVPGDIFKCQKQGRNEFVIRLQPSEAMYMKLTVKQPGLEMQTVQSELDLSYKQRYQDVPIPEAYERLILDTIKGDQQHFVRRDELKAAWEIFTPLLHRIGNGEVKSIPYKPGSRGPTEADQLLEKAGYLQTHGYIWIPPTL

SEQ ID NO: 2424 - DNA, 1713 bp, Brassica napus
  CDS (1)..(1713)
atggcgacgcatactatgatcgttcgttcctcatcctctgctctcgctgcttcgtctccattaacagagactctaccactcttcactactagatctctcacattcccgagaaaatcctccttctctcgtcttcgcttgagattctttgccgagaaactttctcagctcgactcctctaatggctgtgcctctttacaagactctggagaacatcttacagaggagcatgacacaaaagaagagtcatccactcttagtattacagtggttggagcctctggagatttggccaataagaaaatattccctgcattgtttgctctcttttacgagggttgtcttcctcaggacttctctgtttttggttatgctcggaccaaactcacccatgaggagcttcgtgtcatgatcagtagaactttaacttgtcggatagaccaaagggagaactgtgtggacaaaatggatcagttcttaaagagatgcttttaccattcgggtcagtataactctgaagatgattttgcagaactaaacaccaagctcaaagagaaagaggaaggaaagctatcaaacaggctgtactatttgtcaattccaccaaacatattcgtggatgtggtaaggtgtgcaagccttagagcctcctcagtgaatggctggacaagagtcattgtcgaaaagccattcggtcgcgactctgaatcatctggagagttaaccagatgtcttaaacagtatctcacagaggagcaaatcttcaggatcgaccactatttgggaaaagaactcgttgagaacctttcagtgcttcgattctcaaatcttgttttcgagcctctttggtctagaaattacatacgcaacgttcaactcattttctctgaagactttggtacagaaggacgcggaggttactttgatcaatatggaatcatacgagacatcatgcaaaaccatctcttgcaaatccttgcacttttcgcaatggagacacctgtgagcttagacgctgaggacataaggagcgaaaaggtcaaagttctgaggtcaatgaaaccgttgctgcttcaagatatgattgtgggtcagtacaaaggtcatagcaagggtggaaaggcttatcctggttatacggacgacccaacagttcccacaaacagtctcactcctacatttgctgcagccgctatgttcatcaacaacgcgagatgggacggtgtccctttccttatgaaagctggaaaagctctgcataccagaggtgcagagatcagagttcagttcagacatgtcccggggaacttgtacaagaagaatttcgccactgatttagacaaggcaactaatgaactagtgatcagagttcagcctgatgaaggtatatacctgaggatcaacaacaaagtccctggtctcggaatgagactcgaccgaagcgaccttaaccttctctatcgatccaggtatccaagagagatcccagatgcatatgaaaggctgcttcttgatgcaattgaaggagaaaggaggttgtttataagaagtgatgagttagatgcagcatgggatctattcacaccggctttgaaggagctcgagcagaagaaaatagttcctgagctatatccatatgggagcagaggtcctgttggcgctcattaccttgcatctaagtacaatgtgagatggggagatcttgaagatgcttaa

SEQ ID NO: 2425 - protein, 570 aa, Brassica napus
MATHTMIVRSSSSALAASSPLTETLPLFTTRSLTFPRKSSFSRLRLRFFAEKLSQLDSSNGCASLQDSGEHLTEEHDTKEESSTLSITVVGASGDLANKKIFPALFALFYEGCLPQDFSVFGYARTKLTHEELRVMISRTLTCRIDQRENCVDKMDQFLKRCFYHSGQYNSEDDFAELNTKLKEKEEGKLSNRLYYLSIPPNIFVDVVRCASLRASSVNGWTRVIVEKPFGRDSESSGELTRCLKQYLTEEQIFRIDHYLGKELVENLSVLRFSNLVFEPLWSRNYIRNVQLIFSEDFGTEGRGGYFDQYGIIRDIMQNHLLQILALFAMETPVSLDAEDIRSEKVKVLRSMKPLLLQDMIVGQYKGHSKGGKAYPGYTDDPTVPTNSLTPTFAAAAMFINNARWDGVPFLMKAGKALHTRGAEIRVQFRHVPGNLYKKNFATDLDKATNELVIRVQPDEGIYLRINNKVPGLGMRLDRSDLNLLYRSRYPREIPDAYERLLLDAIEGERRLFIRSDELDAAWDLFTPALKELEQKKIVPELYPYGSRGPVGAHYLASKYNVRWGDLEDA

SEQ ID NO: 2426 - DNA, 1842 bp, Glycine max
  CDS (1)..(1842)
atgtctgtgtctttctcttcaacctcggtttcgttctcggaatcctcatttgcattccaaagacctgctccagcacatctttgctcaaattcactcaccgttgcatccaacaactttcattcggtaccaggtggtctcggtcgtcttgtgctgaatgttagaagcaccagcttgtgtcgaaggtttcgtggcttgaaactgtgggtacttgagagactcaacttccaattccagccaccaaagcaacctaagaatagaaatcatcacttcaaaaataatttggaaaatgaaaagggatcggtttctgattcatcctcaaatcttcatgttcctgatgataaggtcactcccatggagtctccatctttgctgcagacaggtttgtctggtgctcccatggatgttagcagaaagccctctctttgtattgcagtcataggggccactggcgagctggcaaagaggaagattttccctgctttatttgccctctactacagtggcttccttcccgagaatgtaggcatttttggttattcaaggaaggatataactgatgaagacctgcaatctattatagcttcaacgttaacatgccgagttgatcatcaagaaaactgtgacgacaaattaaatgctttccttagtagaacatattacattaatggaggctatgacaataaatatgggatgtccatgctgaatgctcgaatggagcaaattgagggaggatccaaaaccaacaggatattctacctttctgtgccacaagaagcacttttggatgttgcgtcatgtcttgcaagcagtgctcagacccagaagggatggaatcgcataatatttgagaagccatttggctttgatgcactttcttcccataggctgacacaatatcttctttcaaactttcaggaaaagcaaatatatagaattgatcatctactaggaaggaatctcattgaaaatcttacagttttaaggttttcaaatctagtttttgagccactttggagtcgtacttatatagataatgtacaggtcattttatcagaggacttggctgtgcatcctggaagatatttcagtggctatggaattatccgtgatattgtacacagtcatgtgctccaaacaattgcattgcttgccatggaaccaccaataagccttgatggagaagatattcgaaatgaaaagcttaaggttttgaggtcaattcgcaaattggagccaaaggatgtcattctcggccaatataaaacaagtggtggagccaaagttgatgcgtgcctaaatggtctgacacctacttattttgctgctgcactatacattgacaatgcacgatgggatggcgtgccatttctgattaaaacaggcttggggctcatcaaacaccaaatggagatacggattcaatttcgcaatgtaccggggaatgtgtaccacgagtgcatcgggcataatatggaccgcgctgtaaatgagctcattcttcgcgatgttcctgatgaagctattttagtgagagtcaacaataaggttccaggactaggcctacaactggactcttcagaattaaatttgctttacaaggacaagtacaacatggaggtgccggattcatacgagcatcttcttctcgatgtcattgatggggacagccatttgtttatgagaagtgatgagttggcagcagcgtggaatattctgactccaattctgaatgagatagacaaagacaatatgtcagtggagctttatgagatggggggtcgcggtcctgttggggcatactacctctgggcgaaacatggtgtccgatgggtggaggattag

SEQ ID NO: 2427 - protein, 613 aa, Glycine max
MSVSFSSTSVSFSESSFAFQRPAPAHLCSNSLTVASNNFHSVPGGLGRLVLNVRSTSLCRRFRGLKLWVLERLNFQFQPPKQPKNRNHHFKNNLENEKGSVSDSSSNLHVPDDKVTPMESPSLLQTGLSGAPMDVSRKPSLCIAVIGATGELAKRKIFPALFALYYSGFLPENVGIFGYSRKDITDEDLQSIIASTLTCRVDHQENCDDKLNAFLSRTYYINGGYDNKYGMSMLNARMEQIEGGSKTNRIFYLSVPQEALLDVASCLASSAQTQKGWNRIIFEKPFGFDALSSHRLTQYLLSNFQEKQIYRIDHLLGRNLIENLTVLRFSNLVFEPLWSRTYIDNVQVILSEDLAVHPGRYFSGYGIIRDIVHSHVLQTIALLAMEPPISLDGEDIRNEKLKVLRSIRKLEPKDVILGQYKTSGGAKVDACLNGLTPTYFAAALYIDNARWDGVPFLIKTGLGLIKHQMEIRIQFRNVPGNVYHECIGHNMDRAVNELILRDVPDEAILVRVNNKVPGLGLQLDSSELNLLYKDKYNMEVPDSYEHLLLDVIDGDSHLFMRSDELAAAWNILTPILNEIDKDNMSVELYEMGGRGPVGAYYLWAKHGVRWVED

SEQ ID NO: 2428 - DNA, 1557 bp, Glycine max
  CDS (1)..(1557)
atggaaactagtgaatggcatatcgagcgaagatctagcttcggctctgaatcccccttagcaagagaggcaggaaatgtgcctgaaactgggtcactctctattgtggtgcttggtgcttctggtgatcttgctaagaagaagacatttcctgcacttttccacctatacctgcagggattcttaccaccagatgaagttcatatttttggctatgcaaggacaaaaatctctgatgatgaattgagaaaccggttgcgcggctatcttgttccaaagaaaggtgcttccccccaacagttggaggatgtagagaagtttttacagctgatcaaatatgtaagcggctcttatgattctgaggatggcttccgcctgttggataaagagatttcagagcatgaatatttgaaaaacagtgttgagggtttatctcggaggcttttctatcttgctcttccaccttcagtatatccatcagtttgcaagatgatcaagacttgttgcatgaataaatctgatcttggtggatggacacgtgttgttgttgagaaaccttttggtaaggatctagaatctgcagaggaactcagtactgagattggaaagttgtttgaggaaccacagatttatcgtattgatcactacttgggaaaggaactagtgcagaacttgttggtacttcgctttgcaaatcggtttttcttgccactttggaaccgcgacaacattgacaacgtacagatagttttcagagaggattttggaactgatggccgtggtggatattttgaccagtatggaattattcgagatattattcaaaaccatctgctgcaggttctttgcttggttgctatggaaaaaccagtttctctcaggcctgagcacattcgggatgagaaagtgaaggttcttgaatcagtgctccctattaatgatgatgaggttgttcttggacaatatgaaggctataaagatgacccaaccgtacctgatgagtctaacaccccaacatttgcaactgttgttctgcgaatacacaatgaaagatgggaaggtgttcctttcatactaaaagcagggaaggcactaaattctagaaaggcagagataagggttcaattcaaggatgtccctggtgatattttcaagtgtaaaaagcaggggagaaatgagtttgttatccgcctacagccttcagaagctatttacatgaagcttacggtcaagcaacctggactggagatgtctacggttcaaagtgagcttgacttgtcatatggacaacggtatcaaggagtaaccattcctgaggcttatgaacgcctaattcttgacacaattagaggtgatcagcaacattttgttcgcagagatgagttgaaggcatcctggcagatcttcaccccacttctgcacagaattgatgaaggggaattcaagccactcccctacaaaccaggaagcagaggtcctgcagaagcagatcagttacttgaaaaagctggctatgttcaaacacacggctacatatggatccctcctaccttgtag

SEQ ID NO: 2429 - protein, 518 aa, Glycine max
METSEWHIERRSSFGSESPLAREAGNVPETGSLSIVVLGASGDLAKKKTFPALFHLYLQGFLPPDEVHIFGYARTKISDDELRNRLRGYLVPKKGASPQQLEDVEKFLQLIKYVSGSYDSEDGFRLLDKEISEHEYLKNSVEGLSRRLFYLALPPSVYPSVCKMIKTCCMNKSDLGGWTRVVVEKPFGKDLESAEELSTEIGKLFEEPQIYRIDHYLGKELVQNLLVLRFANRFFLPLWNRDNIDNVQIVFREDFGTDGRGGYFDQYGIIRDIIQNHLLQVLCLVAMEKPVSLRPEHIRDEKVKVLESVLPINDDEVVLGQYEGYKDDPTVPDESNTPTFATVVLRIHNERWEGVPFILKAGKALNSRKAEIRVQFKDVPGDIFKCKKQGRNEFVIRLQPSEAIYMKLTVKQPGLEMSTVQSELDLSYGQRYQGVTIPEAYERLILDTIRGDQQHFVRRDELKASWQIFTPLLHRIDEGEFKPLPYKPGSRGPAEADQLLEKAGYVQTHGYIWIPPTL

SEQ ID NO: 2430 - DNA, 1557 bp, Glycine max
  CDS (1)..(1557)
atgggaactagtgaatggcatatcgagcgaagatctagcttcggcactgaatcccccttagcaagagaggcaggaaatgtgcctgaaactgggtcactctctattgttgtgcttggcgcttctggggatcttgctaagaagaagacatttcctgcacttttccacctataccggcagggattcttaccaccagatgaagttcacatttttggctatgcaaggacaaaaatatctgatgatgaattgagaaaccggttgcgcggctatcttgttccaaacaaaggtgcttctccccaactgttggaggatgtagagaagtttttacagctgatcaaatatgtaagtggctcttatgattctgaggatggatttcgcttgttggataaagagatttcagagcatgaatatttgaaaaagagtgttgagggtttatctcggaggctcttctatcttgctcttccaccttcagtatatccatctgtttgcaagatgatcaagaactggtgcatgaataaatctgatcttggtggatggacacgtgttgttgtcgagaagccttttggtaaggatctagaatctgcagaggaactcagtactgagattggaaagttgtttgaggaaccacagatttatcgtattgatcactacttgggaaaggaactagtgcagaacttgttggtacttcgctttgcaaatcggtttttcttgccactttggaaccgcgacaacattgacaatgtacagatagttttcagagaggattttggaactgatggccgtggtggatattttgaccaatatggaattattcgagatattattcaaaaccatttgctgcaggttctttgcttggttgctatggaaaaaccagtttctctcaggcctgagcacattcgggatgagaaagtgaaggttcttgaatcagtgctccctattagagatgatgaggttgttcttggacaatacgaaggctataaagatgacccaacagtacctgacaagtcaaacaccccaacatttgcaactgttattctgcgaatacacaatgaaagatgggaaggtgttccgttcatactaaaagcagggaaggcactaaattctagaaaggcagagatcagggttcaattcaaggatgtccctggtgatattttcaagtgtaaaaagcaggggagaaatgagtttgttatccgcctacaacctttagaagctatgtacatgaagcttacggtcaagcaacctggactggagatgtcaacagttcaaagtgagctagacttgtcatatggacaacggtatcaaggagtaaccattcctgaggcttatgaacgcctaattcttgacacaattaaaggtgatcagcagcattttgttcgcagagatgagttgaaggcatcctggcagatcttcaccccacttttgcacagaattgatgaaggggaattcaagccactcccctacaaaccaggaagcagaggtcctgcagaagcagatcagttacttgaaaaagcaggctatgttcaaacacacggctacatatggatccctcctaccttgtag

SEQ ID NO: 2431 - protein, 518 aa, Glycine max
MGTSEWHIERRSSFGTESPLAREAGNVPETGSLSIVVLGASGDLAKKKTFPALFHLYRQGFLPPDEVHIFGYARTKISDDELRNRLRGYLVPNKGASPQLLEDVEKFLQLIKYVSGSYDSEDGFRLLDKEISEHEYLKKSVEGLSRRLFYLALPPSVYPSVCKMIKNWCMNKSDLGGWTRVVVEKPFGKDLESAEELSTEIGKLFEEPQIYRIDHYLGKELVQNLLVLRFANRFFLPLWNRDNIDNVQIVFREDFGTDGRGGYFDQYGIIRDIIQNHLLQVLCLVAMEKPVSLRPEHIRDEKVKVLESVLPIRDDEVVLGQYEGYKDDPTVPDKSNTPTFATVILRIHNERWEGVPFILKAGKALNSRKAEIRVQFKDVPGDIFKCKKQGRNEFVIRLQPLEAMYMKLTVKQPGLEMSTVQSELDLSYGQRYQGVTIPEAYERLILDTIKGDQQHFVRRDELKASWQIFTPLLHRIDEGEFKPLPYKPGSRGPAEADQLLEKAGYVQTHGYIWIPPTL

SEQ ID NO: 2432 - DNA, 1557 bp, Glycine max
  CDS (1)..(1557)
atggaaactagtgaatggcatatcgagcgaagatctagcttcggctctgaatcccccttagcaagagaggcaggaaatgtgcctgaaactgggtcactctctattgtggtgcttggcgcttctggtgatcttgctaagaagaagacatttcctgcacttttccacctatacctgcagggattcttaccaccagatgaagttcatatttttggctatgcaaggacaaaaatctctgatgatgaattgagaaaccggttgcgcggctatcttgttccaaagaaaggtgcttctccccaacagttggaggatgtagagaagtttttacagctgatcaaatatgtaagtggctcttatgattctgaggatggatttcgcttgttggataaagagatttcagagcatgaatatttgaaaaagagtgttgagggtttatctcggaggcttttctatcttgctcttccaccttcagtatatccatctgtttgcaagatgatcaagacttgttgcatgaataaatctgatcttggtggatggacacgtgttgttgtcgagaagccttttggtaaggatctagaatctgcagaggaactcagtactgagattggaaagttgtttgaggaaccacagatttatcgtattgatcactacttgggaaaggaactagtgcagaacttgttggtacttcgctttgcaaatcggtttttcttgccactttggaaccgcgacaacattgacaatgtacagatagttttcagagaggattttggaactgatggccgtggtggatattttgaccaatatggaattattcgagatattattcaaaaccatttgctgcaggttctttgcttggttgctatggaaaaaccagtttctctcaggcctgagcacattcgggatgagaaagtgaaggttcttgaatcagtgctccctattagagatgatgaggttgttcttggacaatacgaaggctataaagatgacccaacagtacctgacaagtcaaacaccccaacatttgcaactgttattctgcgaatacacaatgaaagatgggaaggtgttcctttcatactaaaagcagggaaggcactaaattctagaaaggcagagatcagggttcaattcaaggatgtccctggtgatattttcaagtgtaaaaagcaggggagaaatgagtttgttatccgcctacaacctttagaagctatgtacatgaagcttacggtcaagcaacctggactggagatgtcaacagttcaaagtgagctagacttgtcatatggacaacggtatcaaggagtaaccattcctgaggcttatgaacgcctaattcttgacacaattaaaggtgatcagcagcattttgttcgcagagatgagttgaaggcatcctggcagatcttcaccccacttttgcacagaattgatgaaggggaattcaagccactcccctacaaaccaggaagcagaggtcctgcagaagcagatcagttacttgaaaaagcaggctatgttcaaacacacggctacatatggatccctcctaccttgtag

SEQ ID NO: 2433 - protein, 518 aa, Glycine max
METSEWHIERRSSFGSESPLAREAGNVPETGSLSIVVLGASGDLAKKKTFPALFHLYLQGFLPPDEVHIFGYARTKISDDELRNRLRGYLVPKKGASPQQLEDVEKFLQLIKYVSGSYDSEDGFRLLDKEISEHEYLKKSVEGLSRRLFYLALPPSVYPSVCKMIKTCCMNKSDLGGWTRVVVEKPFGKDLESAEELSTEIGKLFEEPQIYRIDHYLGKELVQNLLVLRFANRFFLPLWNRDNIDNVQIVFREDFGTDGRGGYFDQYGIIRDIIQNHLLQVLCLVAMEKPVSLRPEHIRDEKVKVLESVLPIRDDEVVLGQYEGYKDDPTVPDKSNTPTFATVILRIHNERWEGVPFILKAGKALNSRKAEIRVQFKDVPGDIFKCKKQGRNEFVIRLQPLEAMYMKLTVKQPGLEMSTVQSELDLSYGQRYQGVTIPEAYERLILDTIKGDQQHFVRRDELKASWQIFTPLLHRIDEGEFKPLPYKPGSRGPAEADQLLEKAGYVQTHGYIWIPPTL

SEQ ID NO: 2434 - DNA, 1530 bp, Hordeum vulgare
  CDS (1)..(1530)
atggcgggaactgactcctcggcgtcatcgagacaaagcagttttaactcattagcaaaggatctagaacttcctttggagcaagggtgcctgactatcgttgtacttggggcttctggagaccttgccaagaagaaaacgttcccggcactctaccacctttttgaacaggggttcttacaatctggtgaagtgcatatagttgggtatgcgagaacaaatctttctgatgatgggttgagagggcgcatccgtgcataccttaaaggagcctcagaggagcatgtttcagaattcttgcaattgataaaatatgtcagtggctcctatgacagtggagaaggttttgaaaaactgaacaaggaaatatcagattatgagatgtcaaacaactcaggaagctcccgtaggctcttttacttggcattgcctccatctgtctacccttcagtgtgcaaaatgatccgaacatattgcatgagtccaacttctcgcactggatggactagagtaattgttgagaagccctttggaagggacctggactcagcagaagaattaagttcccaacttggggagctattccaggaagatcaactctacaggattgaccactacttgggaaaagagttggtccaaaacttgcttgtgcttcgttttgcgaaccgtttgttcttaccactttggaaccgtgataatgttgataatatacagattgtattcagggaggacttcggaactgatgggcgtggaggatattttgatcaatatggaatcatccgtgatatcattcagaaccatttgttgcaggttttctgtttggttgcaatggaaaagcctgtatctcttaagcctgagcacattagagatgagaaagtcaaggttctgcaatctgtgaacccgataaaggacgaagaggtagtccttggacaatatcagggctacaaggatgaccctacagtgccagatgactctaataccccaacgtttgcatctattgtacttagggtacacaatgaaagatgggaaggtgtccctttcattcttaaagctggtaaagcattaaactcaagaaaagcagaaattcgtgtgcagttcaaggatgttcccggtgacatttttaaatgtaagaagcaaggaagaaatgagtttgtcatacgcctccagccatcagaagccatgtatatgaaactaactgtgaagaaacctggattggaaatggctactgaacagagtgaacttgatctgtcatatgggatgcgttaccaagatgtcaaaattccagaggcatacgagcgcctcattttggatacaataagaggagaccagcaacactttgtgcgccgggatgagctgaaggctgcctggcagatcttcactcccttgttgcacaacatcgacgctggcaagctgaaggctgtttcatacaagcctggcagccgtggccccaaggaagctgatgaactgagtgagaaggttgggtacatgcagacccacggttacatctggataccacccacccttgcatag

SEQ ID NO: 2435 - protein, 509 aa, Hordeum vulgare
MAGTDSSASSRQSSFNSLAKDLELPLEQGCLTIVVLGASGDLAKKKTFPALYHLFEQGFLQSGEVHIVGYARTNLSDDGLRGRIRAYLKGASEEHVSEFLQLIKYVSGSYDSGEGFEKLNKEISDYEMSNNSGSSRRLFYLALPPSVYPSVCKMIRTYCMSPTSRTGWTRVIVEKPFGRDLDSAEELSSQLGELFQEDQLYRIDHYLGKELVQNLLVLRFANRLFLPLWNRDNVDNIQIVFREDFGTDGRGGYFDQYGIIRDIIQNHLLQVFCLVAMEKPVSLKPEHIRDEKVKVLQSVNPIKDEEVVLGQYQGYKDDPTVPDDSNTPTFASIVLRVHNERWEGVPFILKAGKALNSRKAEIRVQFKDVPGDIFKCKKQGRNEFVIRLQPSEAMYMKLTVKKPGLEMATEQSELDLSYGMRYQDVKIPEAYERLILDTIRGDQQHFVRRDELKAAWQIFTPLLHNIDAGKLKAVSYKPGSRGPKEADELSEKVGYMQTHGYIWIPPTLA

SEQ ID NO: 2436 - DNA, 1530 bp, Triticum aestivum
  CDS (1)..(1530)
atggcgggaactgactcctcggcgtcatcgagacaaagcagtttcaactcattagcaaaggacctagaacttcctttggagcaagggtgcctcaccatcgttgtacttggggcttctggagatcttgccaagaagaaaacgttcccggcactctaccacctttttgagcaggggttcttacaatctggtgaagtgcatatagtggggtatgcgagaacaaatctttctgatgatgggttgagagggcgcatccgtgcataccttaaaggagcctcagaggaacatgtttcagaattcttgcaattgataaaatatgtcagtggttcctatgacagtggagaaggttttgaaaaactgaacaaggaaatatcagattatgagatgtcaaacaactcaggaagctcccgtaggctcttttatttggcattgcctccatctgtctacccttcagtgtgcaaaatgatccgaacatattgcatgagtccaacttctcgcgctggatggactagagtaattgttgagaagccctttggaagggacctggactctgcagaagaattgagttcccaacttggggagctattcgaggaagatcaactctacaggattgaccactacttgggaaaagagttggtccaaaacttgcttgtgcttcgttttgcgaaccgtttgttcttaccactttggaaccgtgacaatgttgataatatacagattgtattcagggaggacttcggaactgatggacgtggaggatattttgatcaatatggaatcatccgtgatatcattcagaaccatttgttgcaggttttctgtttggttgcaatggaaaagcctgtatctcttaagcctgagcacatcagagatgagaaagtcaaggttctgcaatccgtgaacccgataaaggacgaagaggtagtccttggacaatatcagggctacaaggatgaccctacagtgccagatgactctaataccccaacgtttgcatctattgtacttagggtacacaatgaaagatgggaaggtgttcctttcattcttaaagctggtaaagcattaaactcaagaaaagcagaaattcgtgtgcagttcaaggatgttcccggtgacatttttaaatgtaagaagcagggaagaaatgagtttgtcatacgcctccagccatcagaagccatgtacatgaaactaactgtgaagaaacctggattggaaatggctactgaacagagtgaacttgatctgtcatatgggatgcgttaccaagatgtcaaaattccagaggcatacgagcgcctcattttggatacaataagaggagaccagcaacactttgtgcgccgagatgagctgaaggctgcctggcagatcttcactcccttgttgcacgacatcgacgctggcaagctgaaggctgtttcatacaagcctggcagccgaggccccaaggaagctgatgaactgagtgagaaggttgggtacatgcagacccacggttacatctggataccacccacccttgcatag

SEQ ID NO: 2437 - protein, 509 aa, Triticum aestivum
MAGTDSSASSRQSSFNSLAKDLELPLEQGCLTIVVLGASGDLAKKKTFPALYHLFEQGFLQSGEVHIVGYARTNLSDDGLRGRIRAYLKGASEEHVSEFLQLIKYVSGSYDSGEGFEKLNKEISDYEMSNNSGSSRRLFYLALPPSVYPSVCKMIRTYCMSPTSRAGWTRVIVEKPFGRDLDSAEELSSQLGELFEEDQLYRIDHYLGKELVQNLLVLRFANRLFLPLWNRDNVDNIQIVFREDFGTDGRGGYFDQYGIIRDIIQNHLLQVFCLVAMEKPVSLKPEHIRDEKVKVLQSVNPIKDEEVVLGQYQGYKDDPTVPDDSNTPTFASIVLRVHNERWEGVPFILKAGKALNSRKAEIRVQFKDVPGDIFKCKKQGRNEFVIRLQPSEAMYMKLTVKKPGLEMATEQSELDLSYGMRYQDVKIPEAYERLILDTIRGDQQHFVRRDELKAAWQIFTPLLHDIDAGKLKAVSYKPGSRGPKEADELSEKVGYMQTHGYIWIPPTLA

SEQ ID NO: 2438 - DNA, 1788 bp, Triticum aestivum
  CDS (1)..(1788)
atggcgctctcctgcatgaggtgcccggcggccggcaccggcggaggcgctgcggccgcccgccgccccgcgggcccgcggctgatgccctcctcgtccgtcgccttctccttggccagatgcggcgggagatcggcggccgccgcctcggggtggcgcatccacgccgtcgccgggaaaggagtgaaagctcccatggatgctgtggagaacgctgtcgcccctgccgccccgtcaacggtggcaaatggcacttcttcagcaatcaccgtagaggaatttgaagatttagccgctctagccaaggatgacgaggcgtcggttagcatcaccgtagttggagcgtccggtgaccttgcaaagaagaagatatttcctgcccttttcgctctttactatgaaggctgtcttcccaagcatttctccatctttggctatgcgcggagtaaaatgacagatgctgaactgagagacatggtcagcaaaacactgacttgcaggattgataaaagggagaactgtagtgagaaaatggaagagtttctgaaacgatgcttctaccactcaggtcaatatgattcagaggaagatttcaaggagctaggcaagaagatcaaacaacatgagggtcccagagtatctaaccatcttttctacttgtcgatacctccaaatatattcctggatgttgtaaaatgtgcaagcaaatcagcatcatctgtgagtggctggacaagggtaattgttgaaaaaccctttggccgggactcagagtcttctgctgccctgacaaaaggtctgaagcagtacctgacagaggaccaaatcttcaggattgaccattacttgggtaaggagctggtggagaacttatccgtccttcgcttctcgaatcttgtttttgagcctctgtggtcaaggcagtatataaggaatgtgcaactgatattctcagaagactttggcactgaagggagaggagggtactttgatagctatggtattatccgagacataatgcagaatcatcttcttcagatactagctctatttgcaatggaaactcctattagcttggaagcagaggacatacgaaacgagaaggttaaagttttgcgctccatgaagccgttgcgactagaagatgtggtaataggacagtataaaagtcatacgaagggtggtattacataccctggatacactgaagataagacggtgcccaagggtagtctgactccaacatttgctgcagctgcgctttttataaataacgctagatgggatggagttccctttctcatgaaggctgggaaagccttgcatactaaacaggctgagattagagtacagttccgacatgttcctggaaatctctacaaggggtcttttggaaccgatcttgacagggctactaatgaacttgtgatacgcgtgcaaccagatgaaggaatttacctaaagattaacaacaagattcctggtcttggtatgagactagataggagtaatctgaatcttcactatgcagcaaggtaccccaaggagataccagatgcgtacgagaggctcctgctcgacgcgatagaaggagagcgaaggctcttcatccggtcggacgagctggacgcggcgtgggagctcttcacgcccctcctgaaggagctggagcagaagcggatggcccccgagctatacccctacgggagccgcgggcccgtgggcgcccactacctggcagccaagtacaaggtgagatggggcgacctgggtggctcggaacactag

SEQ ID NO: 2439 - protein, 595 aa, Triticum aestivum
MALSCMRCPAAGTGGGAAAARRPAGPRLMPSSSVAFSLARCGGRSAAAASGWRIHAVAGKGVKAPMDAVENAVAPAAPSTVANGTSSAITVEEFEDLAALAKDDEASVSITVVGASGDLAKKKIFPALFALYYEGCLPKHFSIFGYARSKMTDAELRDMVSKTLTCRIDKRENCSEKMEEFLKRCFYHSGQYDSEEDFKELGKKIKQHEGPRVSNHLFYLSIPPNIFLDVVKCASKSASSVSGWTRVIVEKPFGRDSESSAALTKGLKQYLTEDQIFRIDHYLGKELVENLSVLRFSNLVFEPLWSRQYIRNVQLIFSEDFGTEGRGGYFDSYGIIRDIMQNHLLQILALFAMETPISLEAEDIRNEKVKVLRSMKPLRLEDVVIGQYKSHTKGGITYPGYTEDKTVPKGSLTPTFAAAALFINNARWDGVPFLMKAGKALHTKQAEIRVQFRHVPGNLYKGSFGTDLDRATNELVIRVQPDEGIYLKINNKIPGLGMRLDRSNLNLHYAARYPKEIPDAYERLLLDAIEGERRLFIRSDELDAAWELFTPLLKELEQKRMAPELYPYGSRGPVGAHYLAAKYKVRWGDLGGSEH

SEQ ID NO: 2440 - DNA, 1554 bp, Zea mays
  CDS (1)..(1554)
atgtcaggagggtcgtctgaatcttccccgttatctggacaaaatagccttagttctctatcaatttccaaggacaatgaactatcttcagagtctggctgcttgtccattgttgtactaggcgcttctggagaccttgctaagaagaaaacattcccagccctctaccacctcttccagcagggattcatacaatctggagaagtccatatatttgggtacgcaagatcaaatctttctgatgatggattaagagaacgcattcgtggatacctcaagggagcttcagatgaacatctttctcagtttttgcagttagtaaaatatgttagtggctcctatgatagggtggaaggatttgagttattaaataaggcaatctctgagtatgaaacttcaaaaaacaatgactcgggaagctaccgcagattattttatttggcattgcctccatcagtctacccatcagtatgcaaaatgataagatcatattgcatgagtccatcttcacacaccggttggacaagggttattgttgaaaagccctttggaaaggatttgaacactgcagaggaactgagtgctgaacttgggcagctgtttcaagaagaacaactctatagaattgaccactatttaggaaaagagcttgtccaaaacctgcttgtgcttcgttttgcaaaccgcttatttttgcctctctggaaccgtgataacatagctaacgtacagatcgtatttaaggaggactttggaactgaaggacgtggaggatattttgatcaatatggtatcattcgtgatatcattcaaaaccacttgttgcaggtcttctgtttggtggctatggaaaagcctgtctctcttaaacccgagcacattagagatgaaaaagtcaaggttctgcaatcggtggagcctataaagcatgaagaggtagtcatcggacaatatgatggctacaaggatgaccctactgtgccagatgactccaacacccctacttttgcatctgttgtactgagggtacacaacgaaagatgggagggggttccattcatcctcaaggctggcaaagcactaaattcgaggaaagcagagatacgtgtacagttcaaggatgctcctggtgacatttttagatgcaagaaacaaggcaggaatgagtttgtcatacgcctgcagccatcagaagccatgtacatgaaactaacggtcaaaaaacccggactggaaatggcaaccgaacaaagcgaactggatctatcgtatgggatgcggtacaatggcgtcaaaatcccagaagcatacgagcgtctcatcttggatacgataagaggagaccagcagcacttcgttcgccgagatgagctgagggccgcatgggaaatcttcactcctttgcttcacgacatcgatggtggcaagctcaggtccgttccgtacaagccgggaacccgaggaccgcaggaagccgacgagttgagcaggaggatggggtatgtgcagacccatgggtatgtatgggttccgccgaccctttctaaggtttag

SEQ ID NO: 2441 - protein, 517 aa, Zea mays
MSGGSSESSPLSGQNSLSSLSISKDNELSSESGCLSIVVLGASGDLAKKKTFPALYHLFQQGFIQSGEVHIFGYARSNLSDDGLRERIRGYLKGASDEHLSQFLQLVKYVSGSYDRVEGFELLNKAISEYETSKNNDSGSYRRLFYLALPPSVYPSVCKMIRSYCMSPSSHTGWTRVIVEKPFGKDLNTAEELSAELGQLFQEEQLYRIDHYLGKELVQNLLVLRFANRLFLPLWNRDNIANVQIVFKEDFGTEGRGGYFDQYGIIRDIIQNHLLQVFCLVAMEKPVSLKPEHIRDEKVKVLQSVEPIKHEEVVIGQYDGYKDDPTVPDDSNTPTFASVVLRVHNERWEGVPFILKAGKALNSRKAEIRVQFKDAPGDIFRCKKQGRNEFVIRLQPSEAMYMKLTVKKPGLEMATEQSELDLSYGMRYNGVKIPEAYERLILDTIRGDQQHFVRRDELRAAWEIFTPLLHDIDGGKLRSVPYKPGTRGPQEADELSRRMGYVQTHGYVWVPPTLSKV

SEQ ID NO: 2442 - DNA, 1554 bp, Zea mays
  CDS (1)..(1554)
atgtcaggagggtcgtctgaatcttccccgttatctggacaaaatagccttagttctctatcaatttccaaggacaatgaactatcttcagagtctggctgcttgtccattgttgtactaggcgcttctggagaccttgctaagaagaaaactttcccagcgctctttcaccttttccagcagggatttctgcaatctggagaagtccatatatttgggtacgcaagatcaaatctttctgatgatggattaagagaacgcattcgtggatacctcaagggagcttcagatgaacatctttctcagtttttgcagctagtaaaatatgttagtggctcctatgataggggggaaggatttgagttattaaataaggcaatctctgagtatgaaacttcaaaaaacaatgactcgggaagctaccacagattattttatttggcattgcctccatcagtctacccatcagtatgcaaaatgatgagatcatattgcatgagtccatcttcacacaccggttggacaagggttattgttgaaaagccctttggaaaggatttgaacactgcagaggaactgagtgctgaacttgggcagctgtttcaagaagaacaactctatagaattgaccactatttaggaaaagagcttgtccaaaacctgcttgtgcttcgttttgcaaaccgcttatttttgcctctctggaaccgtgataacatagctaacgtacagatcgtatttaaggaggactttggaactgaaggacgtggaggatattttgatcaatatggtatcattcgtgatatcattcagaaccacttgttgcaggtcttctgtttggtggctatggaaaagcctgtctctcttaaacccgagcacattagagatgaaaaagtcaaggttctgcaatcggtggagcctataaagcatgaagaggtagtcatcggacaatatgatggctacaaggatgaccctactgtgccagatgactccaacacccctacttttgcatctgttgtactgagggtacacaacgaaagatgggagggggttccattcatcctcaaggctggcaaagcactaaattcgaggaaagcagagatacgtgtacagttcaaggatgctcctggtgacatttttagatgcaagaaacaaggcaggaatgagtttgtcatacgcctgcagccatcagaagccatgtacatgaaactaacggtcaaaaaacccggactggaaatggcaaccgaacaaagcgaactggatctatcgtatgggatgcggtacaatggcgtcaaaatcctagaagcatacgagcgtctcatcttggatacgataagaggagaccagcagcacttcgttcgccgagatgagctgagggccgcatgggaaatcttcactcctttgcttcacgacatcgatggtggcaagctcaggtccgttccgtacaagccgggaacccgaggaccgcaggaagccgacgagttgagcaggaggatggggtatgtgcagacccatgggtatgtatgggttccgccgaccctttctaaggtttag

SEQ ID NO: 2443 - protein, 517 aa, Zea mays
MSGGSSESSPLSGQNSLSSLSISKDNELSSESGCLSIVVLGASGDLAKKKTFPALFHLFQQGFLQSGEVHIFGYARSNLSDDGLRERIRGYLKGASDEHLSQFLQLVKYVSGSYDRGEGFELLNKAISEYETSKNNDSGSYHRLFYLALPPSVYPSVCKMMRSYCMSPSSHTGWTRVIVEKPFGKDLNTAEELSAELGQLFQEEQLYRIDHYLGKELVQNLLVLRFANRLFLPLWNRDNIANVQIVFKEDFGTEGRGGYFDQYGIIRDIIQNHLLQVFCLVAMEKPVSLKPEHIRDEKVKVLQSVEPIKHEEVVIGQYDGYKDDPTVPDDSNTPTFASVVLRVHNERWEGVPFILKAGKALNSRKAEIRVQFKDAPGDIFRCKKQGRNEFVIRLQPSEAMYMKLTVKKPGLEMATEQSELDLSYGMRYNGVKILEAYERLILDTIRGDQQHFVRRDELRAAWEIFTPLLHDIDGGKLRSVPYKPGTRGPQEADELSRRMGYVQTHGYVWVPPTLSKV

SEQ ID NO: 2444 - DNA, 1797 bp, Zea mays
  CDS (1)..(1797)
atggcgctctcctgcatgaggtgccccgcgggcgccggcgccgcctccgcccgacgcgccgcagcgcagccgttggccgcggaggctgcggtctccttcgccagatgccgcggcttcgggaggtccgccaccgctgcgactgccgcctggttttggcgcaaccatgccgttgcctcacagggagtgaaagctcccatggatgctgatgtcaagaatgctgtcatacctcctacctcaccaaaggtggaaagtggctctccttcagaaatcactctggatgaatttgaagacttgagcgctctatgcaagaatgatgattctactgttagcatcacagtagttggagcatctggtgaccttgccaagaagaagatatttcctgccctttttgctctctactatgaagattgccttcccaagcatttcaccatctttggctatgcacggagcaagatgacagatgctgaactgaggaacatggttagcaaaacactgacttgcagaatagataaaagggaaaattgtagcgagaaaatggaagagttcctcaaaagatgcttctatcattcaggccaatatgattcagaagagcatttcatagatctagacaagaagctaaagcaacatgagggttccagagtttctaaccgccttttctacttgtcaatacctcctaatatattcttggatgttgtaaaatgtgcaagcaaatcagcatcttcggtgaatggttggacacgagtaattgttgagaagcccttcggccgagactcagaatcctctgctgcattaacaagcggtctgaagcagtaccttgtagaggaccaaattttcaggattgaccattatttgggaaaagaactggtggagaatttgtctgtcctgcgcttctcaaatctcgtttttgagcctctctggtcaagacaatatataagaaatgtgcaacttatattctcagaagactttggtactgaaggacgtggaggatactttgatggctacggtattattcgagacataatgcagaatcatctcattcagatactagctttatttgctatggaaactcctattagtttggaagcagaggatataagaaatgagaaggttaaagttcttcgttccatgaagccgttgcagctggaagatgtggtcgtaggacagtataaaagtcacacaaaaggtggtaccacataccctgggtatactgatgataagacagtgcccaaggatagtgtgactccaacgtttgctgctgcggcacttttcataaataatgccagatgggatggagttccctttcttatgaaagctgggaaagctttgcacacaaaacgagctgagattagggtacagttccgacatgttcctggaaatctctacaaggggagttttggcacagatcttgatagggccactaatgagcttgtgatacgtgtgcaaccggatgaagcaatttacctaaagattaacaacaagattcctggtctcggtatgcgactagataggagtaacttgaatctccattatgccgcaaggtactcaaaggagatacctgatgcttacgagagactcctgcttgatgccatcgaaggagagcgcaggcttttcatccgctcagatgagttggatgctgcatggtcactcttcacacccctcctgaaggagctggaagagaagcggatagctcctgagctctacccatatggaagccgtggacctgtcggggcccactatctcgccgccaagtacaacgtaagatggggtgacttgagtgcggagcactacaaggcatga

SEQ ID NO: 2445 - protein, 598 aa, Zea mays
MALSCMRCPAGAGAASARRAAAQPLAAEAAVSFARCRGFGRSATAATAAWFWRNHAVASQGVKAPMDADVKNAVIPPTSPKVESGSPSEITLDEFEDLSALCKNDDSTVSITVVGASGDLAKKKIFPALFALYYEDCLPKHFTIFGYARSKMTDAELRNMVSKTLTCRIDKRENCSEKMEEFLKRCFYHSGQYDSEEHFIDLDKKLKQHEGSRVSNRLFYLSIPPNIFLDVVKCASKSASSVNGWTRVIVEKPFGRDSESSAALTSGLKQYLVEDQIFRIDHYLGKELVENLSVLRFSNLVFEPLWSRQYIRNVQLIFSEDFGTEGRGGYFDGYGIIRDIMQNHLIQILALFAMETPISLEAEDIRNEKVKVLRSMKPLQLEDVVVGQYKSHTKGGTTYPGYTDDKTVPKDSVTPTFAAAALFINNARWDGVPFLMKAGKALHTKRAEIRVQFRHVPGNLYKGSFGTDLDRATNELVIRVQPDEAIYLKINNKIPGLGMRLDRSNLNLHYAARYSKEIPDAYERLLLDAIEGERRLFIRSDELDAAWSLFTPLLKELEEKRIAPELYPYGSRGPVGAHYLAAKYNVRWGDLSAEHYKA

SEQ ID NO: 2446 - DNA, 1818 bp, Zea mays
  CDS (1)..(1818)
atgtccattcgaccattcctgacaacccatatcccaatcaatctaccacctctccggccgttccacactgatcggatggcggccttgaccttccacccggccgcctgcttcttcccacgaccacgagaggcagcagcgacaacgaagcagccgctccaccattactgctcgcctctccggaccctcgtccctagaactacaagaccgtgccttctcagggccaggtcctccaacgggctcccgcagaccggcggcgcctcgttcggcagcagcaacgaggtgctggatgggacgccgacgggagatggggcaccggggcaggggcagcggggagggagcaccgtcagcatcacggtcgtcggcgcctccggcgacctcgccaagaagaagatcttcccggctctcttcgccttgttctacgagggctggctcccggagcattttacagtgttcggctatgcccgtagcgagatgaacgaccaagagctcaggaacatgattagcatgaccctgacgtgccgaatcgacaaaagtgagaactgcggcgacaagatggaacagttcctgaagaggtgcttctaccagtctgggcagtacaactcggaggaggggtttgcggagttagacagaaagctcaaagaaaaagaggcaggcaggctaccgaacaggctattttacctgtcgatcccgccaaacatattcgtggatgtggttagatccgctagccgcaccgcgtcgtcttcaagcgggtggacaagatttatagtggagaagccattcggccgtgactcggagtcctccggcgagctcactcggtccttgaagaagtacttggtcgaggagcaaatattcaggatcgaccattacctgggcaaggaactggttgagaatctctccgtcctccgcttctccaacctcgtcttcgagccgctgtggtcgaggaactacatccggaacgtgcagctcatattctctgaagatttcggcaccgagggtcgaggcggctacttcgacaactacggcatcatccgggacatcatgcagaaccacctgctgcagatcctggccctgttcgccatggagaccccggtgagccttgacgccgaggacatccgcaacgagaaggtgaaggtgctgaggtccatgaggcagctgaagctcgaggacgtggtggtgggccagtacaagggccactccaagggcggcaagtcgtacccgggctacgccgacgaccccaccgtgcccaagggcagcgtcacgcccaccttcgccgccgccgcgctcttcatcgacaacgcgcgctgggacggcgtgccgttcctgatgaaggcaggcaaggcgctgcacacacgacgcgcggagatccgggtgcagttccggcgcgtgccgggaaacctgtaccggcggaacatcggcgcggacctggacaaggcgaccaacgagctggtgctccgggtgcagcccgacgaggccatctacctcaaggtcaacaacaaggtgcccgggctgggcatgcgcctcgaccgcagcaacctcaacctgctctactccgagcgctaccgccgcgagatccccgacgcgtacgagcgccttctgctggacgccatggagggcgagcgccgcctcttcatccggagcgacgagctcgacgccgcctgggccatcttcacgcccgcgctcagggagctggaggacaggaaagtggcgccggagctctacccgtacggcagcaggggccccgtcggcgcgcactacctcgccgccaactacaacgtcaggtggggagacatcaccagcgatgacgacggcgccttctag

SEQ ID NO: 2447 - protein, 605 aa, Zea mays
MSIRPFLTTHIPINLPPLRPFHTDRMAALTFHPAACFFPRPREAAATTKQPLHHYCSPLRTLVPRTTRPCLLRARSSNGLPQTGGASFGSSNEVLDGTPTGDGAPGQGQRGGSTVSITVVGASGDLAKKKIFPALFALFYEGWLPEHFTVFGYARSEMNDQELRNMISMTLTCRIDKSENCGDKMEQFLKRCFYQSGQYNSEEGFAELDRKLKEKEAGRLPNRLFYLSIPPNIFVDVVRSASRTASSSSGWTRFIVEKPFGRDSESSGELTRSLKKYLVEEQIFRIDHYLGKELVENLSVLRFSNLVFEPLWSRNYIRNVQLIFSEDFGTEGRGGYFDNYGIIRDIMQNHLLQILALFAMETPVSLDAEDIRNEKVKVLRSMRQLKLEDVVVGQYKGHSKGGKSYPGYADDPTVPKGSVTPTFAAAALFIDNARWDGVPFLMKAGKALHTRRAEIRVQFRRVPGNLYRRNIGADLDKATNELVLRVQPDEAIYLKVNNKVPGLGMRLDRSNLNLLYSERYRREIPDAYERLLLDAMEGERRLFIRSDELDAAWAIFTPALRELEDRKVAPELYPYGSRGPVGAHYLAANYNVRWGDITSDDDGAF

SEQ ID NO: 2448 - DNA, 23 bp, Artificial sequence
  primer
atgagtgaaggccccgtcaaatt

SEQ ID NO: 2449 - DNA, 25 bp, Artificial sequence
  primer
ctaattatccttcgtatcttctggc

SEQ ID NO: 2450 - protein, 522 aa, Artificial sequence
  consensus sequence
  Variant (2)..(3): Xaa in position 2 to 3 is any amino acid
  Variant (7)..(9): Xaa in position 7 to 9 is any amino acid
  Variant (11)..(12): Xaa in position 11 to 12 is any amino acid
  Variant (14)..(14): Xaa in position 14 is any amino acid
  Variant (16)..(17): Xaa in position 16 to 17 is any amino acid
  Variant (19)..(23): Xaa in position 19 to 23 is any amino acid
  Variant (25)..(29): Xaa in position 25 to 29 is any amino acid
  Variant (30)..(32): Xaa in position 30 to 32 is any or no amino acid
  Variant (34)..(35): Xaa in position 34 to 35 is any amino acid
  Variant (37)..(59): Xaa in position 37 to 59 is any amino acid
  Variant (60)..(81): Xaa in position 60 to 81 is any or no amino acid
  Variant (83)..(92): Xaa in position 83 to 92 is any amino acid
  Variant (93)..(96): Xaa in position 93 to 96 is any or no amino acid
  Variant (98)..(107): Xaa in position 98 to 107 is any amino acid
  Variant (108)..(121): Xaa in position 108 to 121 is any or no amino acid
  Variant (124)..(126): Xaa in position 124 to 126 is any amino acid
  Variant (128)..(146): Xaa in position 128 to 146 is any amino acid
  Variant (147)..(155): Xaa in position 147 to 155 is any or no amino acid
  Variant (157)..(157): Xaa in position 157 is any amino acid
  Variant (158)..(159): Xaa in position 158 to 159 is any or no amino acid
  Variant (163)..(163): Xaa in position 163 is any amino acid
  Variant (165)..(165): Xaa in position 165 is any amino acid
  Variant (167)..(168): Xaa in position 167 to 168 is any amino acid
  Variant (170)..(177): Xaa in position 170 to 177 is any amino acid
  Variant (178)..(182): Xaa in position 178 to 182 is any or no amino acid
  Variant (184)..(187): Xaa in position 184 to 187 is any amino acid
  Variant (197)..(197): Xaa in position 197 is any amino acid
  Variant (199)..(199): Xaa in position 199 is any amino acid
  Variant (201)..(204): Xaa in position 201 to 204 is any amino acid
  Variant (207)..(207): Xaa in position 207 is any amino acid
  Variant (209)..(214): Xaa in position 209 to 214 is any amino acid
  Variant (215)..(215): Xaa in position 215 is any or no amino acid
  Variant (217)..(221): Xaa in position 217 to 221 is any amino acid
  Variant (222)..(224): Xaa in position 222 to 224 is any or no amino acid
  Variant (227)..(229): Xaa in position 227 to 229 is any amino acid
  Variant (231)..(232): Xaa in position 231 to 232 is any amino acid
  Variant (234)..(235): Xaa in position 234 to 235 is any amino acid
  Variant (236)..(237): Xaa in position 236 to 237 is any or no amino acid
  Variant (239)..(240): Xaa in position 239 to 240 is any amino acid
  Variant (242)..(242): Xaa in position 242 is any amino acid
  Variant (244)..(245): Xaa in position 244 to 245 is any amino acid
  Variant (247)..(248): Xaa in position 247 to 248 is any amino acid
  Variant (249)..(249): Xaa in position 249 is any or no amino acid
  Variant (252)..(253): Xaa in position 252 to 253 is any amino acid
  Variant (257)..(258): Xaa in position 257 to 258 is any amino acid
  Variant (260)..(263): Xaa in position 260 to 263 is any amino acid
  Variant (264)..(264): Xaa in position 264 is any or no amino acid
  Variant (268)..(268): Xaa in position 268 is any amino acid
  Variant (270)..(273): Xaa in position 270 to 273 is any amino acid
  Variant (274)..(278): Xaa in position 274 to 278 is any or no amino acid
  Variant (280)..(280): Xaa in position 280 is any amino acid
  Variant (283)..(283): Xaa in position 283 is any amino acid
  Variant (287)..(304): Xaa in position 287 to 304 is any amino acid
  Variant (305)..(319): Xaa in position 305 to 319 is any or no amino acid
  Variant (321)..(324): Xaa in position 321 to 324 is any amino acid
  Variant (325)..(333): Xaa in position 325 to 333 is any or no amino acid
  Variant (335)..(335): Xaa in position 335 is any amino acid
  Variant (337)..(337): Xaa in position 337 is any amino acid
  Variant (339)..(347): Xaa in position 339 to 347 is any amino acid
  Variant (349)..(349): Xaa in position 349 is any amino acid
  Variant (352)..(352): Xaa in position 352 is any amino acid
  Variant (357)..(360): Xaa in position 357 to 360 is any amino acid
  Variant (363)..(374): Xaa in position 363 to 374 is any amino acid
  Variant (376)..(385): Xaa in position 376 to 385 is any amino acid
  Variant (386)..(412): Xaa in position 386 to 412 is any or no amino acid
  Variant (415)..(415): Xaa in position 415 is any amino acid
  Variant (417)..(424): Xaa in position 417 to 424 is any amino acid
  Variant (425)..(428): Xaa in position 425 to 428 is any or no amino acid
  Variant (430)..(430): Xaa in position 430 is any amino acid
  Variant (432)..(445): Xaa in position 432 to 445 is any amino acid
  Variant (446)..(463): Xaa in position 446 to 463 is any or no amino acid
  Variant (469)..(470): Xaa in position 469 to 470 is any amino acid
  Variant (472)..(474): Xaa in position 472 to 474 is any amino acid
  Variant (476)..(479): Xaa in position 476 to 479 is any amino acid
  Variant (481)..(483): Xaa in position 481 to 483 is any amino acid
  Variant (486)..(489): Xaa in position 486 to 489 is any amino acid
  Variant (491)..(499): Xaa in position 491 to 499 is any amino acid
  Variant (500)..(513): Xaa in position 500 to 513 is any or no amino acid
  Variant (515)..(516): Xaa in position 515 to 516 is any amino acid
  Variant (518)..(519): Xaa in position 518 to 519 is any amino acid
  Variant (520)..(520): Xaa in position 520 is any or no amino acid
GXXGDLXXXKXXPXLXXLXXXXXLXXXXXXXXGXXRXXXXXXXXXXXXXXXXXXXXXXXXXXXXXXXXXXXXXXXXXXXXXYXXXXXXXXXXXXXXLXXXXXXXXXXXXXXXXXXXXXXXXYLXXXPXXXXXXXXXXXXXXXXXXXXXXXXXXXXRXXXEKPXGXDXXSXXXXXXXXXXXXXEXXXXRIDHYLGKEXVXNXXXXRFXNXXXXXXXWXXXXXXXXQIXXXEXXGXXXXRXXYXDXXGXXXRDXXQNHXXQXXXXXAMEXPXXXXXXXXXRXEKXKVLXXXXXXXXXXXXXXXXXXXXXXXXXXXXXXXXXYXXXXXXXXXXXXXSXTXTXXXXXXXXXNXRWXGVPFXXXXGKXXXXXXXXXXXXFXXXXXXXXXXXXXXXXXXXXXXXXXXXXXXXXXXXXXQPXEXXXXXXXXXXXXKXPXXXXXXXXXXXXXXXXXXXXXXXXXXXXXXXXAYERLXXDXXXGXXXXFXXXDEXXXXWXXXXXXXXXXXXXXXXXXXXXXXYXXGXXXGP

SEQ ID NO: 2451 - protein, 21 aa, Artificial sequence
  protein pattern
  Variant (10)..(10): Xaa in position 10 is any amino acid
  Variant (12)..(12): Xaa in position 12 is any amino acid
  Variant (14)..(14): Xaa in position 14 is Ile, Leu, Met or Val
  Variant (15)..(17): Xaa in position 15 to 17 is any amino acid
  Variant (19)..(19): Xaa in position 19 is Phe or Met
  Variant (20)..(20): Xaa in position 20 is any amino acid
RIDHYLGKEXVXNXXXXRXXN

SEQ ID NO: 2452 - protein, 15 aa, Artificial sequence
  protein pattern
  Variant (2)..(3): Xaa in position 2 to 3 is any amino acid
  Variant (6)..(6): Xaa in position 6 is Ile, Met or Val
  Variant (7)..(7): Xaa in position 7 is Phe, Ile, Leu, Met or Val
  Variant (11)..(11): Xaa in position 11 is any or no amino acid
  Variant (13)..(13): Xaa in position 13 is any or no amino acid
  Variant (15)..(15): Xaa in position 15 is Ile, Leu, Met or Val
GXXRDXXQNHXLXQX

SEQ ID NO: 2453 - protein, 17 aa, Artificial sequence
  protein pattern
  Variant (2)..(3): Xaa in position 2 to 3 is any or no amino acid
  Variant (5)..(6): Xaa in position 5 to 6 is any or no amino acid
  Variant (9)..(9): Xaa in position 9 is Ala, Ser or Thr
  Variant (10)..(10): Xaa in position 10 is any amino acid
  Variant (11)..(11): Xaa in position 11 is Lys or Arg
  Variant (13)..(14): Xaa in position 13 to 14 is any amino acid
  Variant (16)..(16): Xaa in position 16 is Ala, Ser or Thr
  Variant (17)..(17): Xaa in position 17 is Ile, Leu or Val
GXXGXXDLXXXKXXPXX

SEQ ID NO: 2454 - protein, 14 aa, Artificial sequence
  protein pattern
  Variant (2)..(2): Xaa in position 2 is Ile, Leu or Val
  Variant (3)..(3): Xaa in position 3 is Ile, Met or Val
  Variant (4)..(4): Xaa in position 4 is Phe, Ile, Leu, Met or Val
  Variant (8)..(8): Xaa in position 8 is Phe, Ile or Leu
  Variant (10)..(10): Xaa in position 10 is any amino acid
  Variant (12)..(13): Xaa in position 12 to 13 is any amino acid
  Variant (14)..(14): Xaa in position 14 is Asn, Pro, Ser or Thr
RXXXEKPXGXDXXX

SEQ ID NO: 2455 - DNA, 1737 bp, Saccharomyces cerevisiae
  CDS (1)..(1737)
atgtcaattcaggcttttgtcttttgcggtaaaggttccaatttggctcccttcacccagccagattttccattccaaacgcagaacaaagacagtacagctgccacgagcggtgacaaacttaatgagttggtcaatagcgccctcgattcaactgtcataaatgagttcatgcaacattcaacgcgcttgcccaaggctcttttgcccatcggtaatagacctatgattgaatacgtcttggattggtgtgatcaggcagatttcaaagaaatcagtgtggtcgcacccgttgacgaaatcgaattaattgaaagtggactgacttcgtttttgtccctaagaaagcaacaatttgaactaatatacaaggctttgtcaaattccaaccacagtcatcacttgcaagatcctaagaaaattaatttcatcccttcgaaggcaaattctacaggtgagtccttgcaaaaagagcttttgcctagaatcaatggcgattttgtaatcttgccctgtgattttgtcacagatatacctccacaagtcttggtcgatcaatttaggaatagggatgataataacctagcaatgactatctactataagaactctttagatagtagtatcgataaaaagcaacagcaaaagcaaaaacaacagcaatttttcactgtttattcagaaaacgaagactcagagaggcagccaatacttttggacgtttattctcaaagggacgtcacaaagacaaaatatctacagatcagatctcatttattatggaactatccaaatttaacagtatccactaagttactgaactcattcatctacttttgttcctttgaactttgccagttgttaaaattaggacctcaatcaatgtcaagacaagcttcattcaaagatccatttactggaaaccaacaacagcaaaaccctcctactactgatgatgatgaagatcgcaatcatgatgatgacgatgattacaaaccttcggctacatctatccagcctacctacttcaaaaaaaagaatgatctcatcttggacccaataaactgtaataaatcattgagtaaggtttttagagatttatctcgtcgttcgtggcaacattcgaaaccgagggaaccaataggtatttttattttaccaaacgaaaccttgttcatcagagccaataacttgaatgcttacatggacgctaatagatttgtactaaagataaaatcacaaacgatgttcacgaaaaatatacagattcaatctgccgctatcggtgctgatgccatagtagatcccaaatgccaaatctctgctcatagtaatgtcaagatgtctgttctcggtactcaggccaatattggttccagatgtcgtgttgcagggtctctcttatttcctggagtccatcttggtgacgaagtaatcctggaaaattgtattattggacctatggcaaaaatcggttcaaagtgtaaactcagcaattgttatatcgaaggccattatgttgtggagcctaaaaataactttaaaggtgaaacactggccaacgtttatttggatgaagatgaggaggacgagttaatatatgatgatagtgttattgctggagaaagtgaaatcgccgaagaaactgacagtgatgatagaagcgatgaagattctgatgatagtgaatataccgacgagtacgagtacgaagatgacggattatttgagcgttaa

SEQ ID NO: 2456 - protein, 578 aa, Saccharomyces cerevisiae
MSIQAFVFCGKGSNLAPFTQPDFPFQTQNKDSTAATSGDKLNELVNSALDSTVINEFMQHSTRLPKALLPIGNRPMIEYVLDWCDQADFKEISVVAPVDEIELIESGLTSFLSLRKQQFELIYKALSNSNHSHHLQDPKKINFIPSKANSTGESLQKELLPRINGDFVILPCDFVTDIPPQVLVDQFRNRDDNNLAMTIYYKNSLDSSIDKKQQQKQKQQQFFTVYSENEDSERQPILLDVYSQRDVTKTKYLQIRSHLLWNYPNLTVSTKLLNSFIYFCSFELCQLLKLGPQSMSRQASFKDPFTGNQQQQNPPTTDDDEDRNHDDDDDYKPSATSIQPTYFKKKNDLILDPINCNKSLSKVFRDLSRRSWQHSKPREPIGIFILPNETLFIRANNLNAYMDANRFVLKIKSQTMFTKNIQIQSAAIGADAIVDPKCQISAHSNVKMSVLGTQANIGSRCRVAGSLLFPGVHLGDEVILENCIIGPMAKIGSKCKLSNCYIEGHYVVEPKNNFKGETLANVYLDEDEEDELIYDDSVIAGESEIAEETDSDDRSDEDSDDSEYTDEYEYEDDGLFER

SEQ ID NO: 2457 - DNA, 1605 bp, Candida glabrata CBS 138
  CDS (1)..(1605)
atgcagattcaggcgtttatattctgtggtcgtggccacaacttatctccctttgctaagcatcccaacagtgctgctgttacacaggaggatactattttgagcgatgacactgtgccaaaggcattgatgcctttggctaacaagcccatgctggagtataccattgattggtgtgaccaggcaaatttctcggagattaacattgtcgcacaccatgatcagattgatgagatcaagcaattcctatctacattcctggcattgcgtacacagcaatttgaaatcatctccaaggcattgtctgcagcaaaccacaaccaccatttacagaaaccaaagcctatcaatttcatcagttctaagatgaactccaacggtgaagctctacagaaggagttgctggataagatcaaaggtgattttgtgctattgccatgcgattttatcacggatatcccacctcaggtgttactagaccagttccaaaacagagacgacgacaatttggctttaactgtgtactacaagaacaatgttgagagtgtcgataagaaacaatttcaacgtcaacaattttttaccatatacagtgagaatgaggatacagagaaacagccggtcttactggatgtgtaccctaaggaagatgtcatgaaaaacaaatacctacaagtcagaaaccaaatgctttggaaatacccaaatgcaacagtgtccaccagtattttaaactcttccatatacatgtgctcctacgatctatgccaattgttacgcgaacagacccaccaagagaagaacaatgacgacagtgaaggcaataacgtaaatgactctccaagaactaagaactcaaaaggtacagaggattatgatgacgcacagaactccgctcacagaaacctaagtgaaattaaaccaagttacttcaagaagaaaaatgaactgataagagataatattaactgccataagcctttaggtaaacttttcagagacttaagtaggcgctcgtggcagcactcgtccaagagagaaacaatgggtatatttattatacccgagccatgtgtctttattagagctaacaatctgaacgcatatatggaggctaacagatttatattgaagataaaggcccaagctacccaatccaatgtacaaaccaataatctatcaacttcagctatcggtgctgattccctcgttggtggaaatgttactatacttgaaaagagtaacataaaaatgtctgcaattgctggtggttgtaagatcggtaaccgttgtcgtgttgctgggtctattctgcttgccaacgttgaattagaagacgatgtaatcttagaaaatgttattattggtcctggcgctaaaattggcaagaagagtaagttaacaaactgttatgtagaaggttcatatgtcctaccagcaagaagtacacacaaaggtgaaaccttgagaaagatcattttgaatacagacacagaaatggatagcgaagttgcctacagcacttctgatgaagacagttccgatgttatgactgaggaattcacagacgaagatttcggtgacgacgatttctttgaaaggtaa

SEQ ID NO: 2458 - protein, 534 aa, Candida glabrata CBS 138
MQIQAFIFCGRGHNLSPFAKHPNSAAVTQEDTILSDDTVPKALMPLANKPMLEYTIDWCDQANFSEINIVAHHDQIDEIKQFLSTFLALRTQQFEIISKALSAANHNHHLQKPKPINFISSKMNSNGEALQKELLDKIKGDFVLLPCDFITDIPPQVLLDQFQNRDDDNLALTVYYKNNVESVDKKQFQRQQFFTIYSENEDTEKQPVLLDVYPKEDVMKNKYLQVRNQMLWKYPNATVSTSILNSSIYMCSYDLCQLLREQTHQEKNNDDSEGNNVNDSPRTKNSKGTEDYDDAQNSAHRNLSEIKPSYFKKKNELIRDNINCHKPLGKLFRDLSRRSWQHSSKRETMGIFIIPEPCVFIRANNLNAYMEANRFILKIKAQATQSNVQTNNLSTSAIGADSLVGGNVTILEKSNIKMSAIAGGCKIGNRCRVAGSILLANVELEDDVILENVIIGPGAKIGKKSKLTNCYVEGSYVLPARSTHKGETLRKIILNTDTEMDSEVAYSTSDEDSSDVMTEEFTDEDFGDDDFFER

SEQ ID NO: 2459 - DNA, 1485 bp, Kluyveromyces lactis NRRL Y-1140
  CDS (1)..(1485)
atggattttcaagcttttatattctgtggacgtggtgcgaagctaacaccgttttccaatgttcgtggagacactggtgttcccaaagctctattgccggttgcaaaccgctccatgattgagttcgtactagattggtgtgagcaagcccaatttaaagaggtcaatctagttattgacgcatccgatgctgacgaattagaggaaagtttgaaaaaataccgtgaagtgagagggcattattttggactgttatcccaaagcgttggatcgaaccatgctcactatttgaaaaaaccatctcctattaatattataccctcaaaatgtgagaatacaggagaatgtctgaagaatgaattgctagataagataactggagatttcgtgttgttaccttgtgatttcatcacagacattccaccacaggtgtttttagatcagtatttgaataaagatccggagaatctagctatggcagtatattatcacaatgggtttgagaatatcgataagaagcatttaaagcaattcctgactgtatactccgagaatttggagtctgttagtaagcccgttcttctagacgtttattccaaagacgatgtggacaaaacgaaatatttacaaatcagatcccaaatgctttggagatatccgaactcctctgtatccacaaaattactgaactccttcatttacttttgctctcatgagttagtaaacctattgaaggatgaaaccgagaaaggtgctggagaattagactctgattcggaagccgttgattctttggccacatcattccagaacacgtctttcttgaagggaaagaagaaattaatcaaagatccaataaactgtaataaatcgctaggcaagctattcagggatttgtctaggcgttcgtggcagcatgtgaaacccagagaaactataggtatcttcgtgttacctgaaatcggattatttatcagatcaaacagtttgagtgcatacatggaatccaataggtacgttttgaagattaaacaaacggcgattcaacaacgcactactgatggttcttctgctatcggtgcagattctatggttggtaacaattgtgcaattttggagaaaaccaatattaaacgttcggtcctcggtgacaattgtaaagtaggaaagcgatgccgtatcgttgggtgtgttgtgcttgataatgttgaaattgatgatgaaacccagctagaaaatgtcatcatcggtagaaatgcaaaaatcggcaagaaatcaaagcttacaaattgttatgttgagggctcttatattgtcaatgaaaaatccactctcaagggtgaaactttgacaagtatttacatagatgacgaagattacgcatcctctttactggattcagattcatctggatccgagtctgattacactgatgaatattatgacgatgaggattatgttgatgatggactcttcgaccgttga

SEQ ID NO: 2460 - protein, 494 aa, Kluyveromyces lactis NRRL Y-1140
MDFQAFIFCGRGAKLTPFSNVRGDTGVPKALLPVANRSMIEFVLDWCEQAQFKEVNLVIDASDADELEESLKKYREVRGHYFGLLSQSVGSNHAHYLKKPSPINIIPSKCENTGECLKNELLDKITGDFVLLPCDFITDIPPQVFLDQYLNKDPENLAMAVYYHNGFENIDKKHLKQFLTVYSENLESVSKPVLLDVYSKDDVDKTKYLQIRSQMLWRYPNSSVSTKLLNSFIYFCSHELVNLLKDETEKGAGELDSDSEAVDSLATSFQNTSFLKGKKKLIKDPINCNKSLGKLFRDLSRRSWQHVKPRETIGIFVLPEIGLFIRSNSLSAYMESNRYVLKIKQTAIQQRTTDGSSAIGADSMVGNNCAILEKTNIKRSVLGDNCKVGKRCRIVGCVVLDNVEIDDETQLENVIIGRNAKIGKKSKLTNCYVEGSYIVNEKSTLKGETLTSIYIDDEDYASSLLDSDSSGSESDYTDEYYDDEDYVDDGLFDR

SEQ ID NO: 2461 - DNA, 1434 bp, Debaryomyces hansenii CBS767
  CDS (1)..(1434): transl_table=12
atggaatttcatgcagttatcttgtgtggatcgggtaaagccttgtctccattttctcaggtgagatctacggggatgcccaaggcgcttttaccgattgcgaacagacctatgattgattatgtattggaatggtgtgaaaaggcattctttccgaaagtgacagtggtatgtgacactgattctagcgaacaagtgcaaaaggcgttagatcaatacaatagcgaaaagagtaaaaaggaaaaggctaaggaggatgcggacggcgatgatgacgacagctcgttctcacggtcggtggagatattggggcttgacagcagttctagtggtgaggtattgtaccatttgtataagacatcggcgttgaagacgaatccacattttgtgatcttgccgtgcgatttcataaccaacttgcctccacaagtattgatcgaggcgtacagaaatagaaacgaatcggaccttgggttgatggtttattatagaaatcagcttgatatagaagataagaaatcgaagatttttcctaaaaactatacgatctattctgacttgcccgacggccaatgtcaactcttggacatctattccaaggaggatattgatttccacaagacgttacaaataagaacccagatgtgttggaaatttcctaattcgacaattagtaccaagttattgaatggctcagttttctttggatcagtggaccgtatattcgccgtgtttgaccaggaagacaaatgcacagaatcgtattttcacgatagatcgatcaccaaggttatccgtgatttatccagaagatcttggaaacactcggatcccaaagatactgtgggattttgcattttacctgatcaggctacttttttcagggttaataatacaccagtattgatggaagccaacaggcattttatgaaattgcaagctatggctaagggtcagcaccagcaacagacatcgcatcctaaggataaagcatctgctaatattggaatagattgctcgattggagagaatacgtctgttggagaaaagacaaatgttaaaagaactattgttggttcttcttgtagtattggaaagagagttaaattaacaggctgtctcattttaaataatatcacgatcgaagatgacgttcagcttgaaaattgtatattaggaaatggtgttatcatacgttctaagctgagattaaccaattgtaacgttgaatcgagtctcgaggttgcaaagggtactcattcaaagggtgatactttgttatgtctctctttggaaggtattgttgaggatgatgaagaagagtttgcagttgattccggtgaatctgattctgacgatgaatctggaagtgactacagctatgatgattatgatgaatacgatgataattcagatggattattcgctcattga

SEQ ID NO: 2462 - protein, 477 aa, Debaryomyces hansenii CBS767
MEFHAVILCGSGKALSPFSQVRSTGMPKALLPIANRPMIDYVLEWCEKAFFPKVTVVCDTDSSEQVQKALDQYNSEKSKKEKAKEDADGDDDDSSFSRSVEILGLDSSSSGEVLYHLYKTSALKTNPHFVILPCDFITNLPPQVLIEAYRNRNESDLGLMVYYRNQLDIEDKKSKIFPKNYTIYSDLPDGQCQLLDIYSKEDIDFHKTLQIRTQMCWKFPNSTISTKLLNGSVFFGSVDRIFAVFDQEDKCTESYFHDRSITKVIRDLSRRSWKHSDPKDTVGFCILPDQATFFRVNNTPVLMEANRHFMKLQAMAKGQHQQQTSHPKDKASANIGIDCSIGENTSVGEKTNVKRTIVGSSCSIGKRVKLTGCLILNNITIEDDVQLENCILGNGVIIRSKLRLTNCNVESSLEVAKGTHSKGDTLLCLSLEGIVEDDEEEFAVDSGESDSDDESGSDYSYDDYDEYDDNSDGLFAH

SEQ ID NO: 2463 - DNA, 1452 bp, Yarrowia lipolytica CLIB122
  CDS (1)..(1452)
atgggagccgacttcaaagtgttcattctgtgcggccagggcaaaaacatggcacctctctcgtccgtgagagcgtctggagtgcccaaggcccttcttcccatggccaacgtgcctgtgatcgactacaccctcaaatggtgtgagaccatccccaaccccaaggtgtttgtgtgctgttctacagctgacgaggcggagatttccgcctacgtggactctttcaaggctgagcactccacctcagttgtggcttccaacgtgactatctgttccaagaccgatgcgaagtctggagacttcattctggagctgactcgaggggaaccctctgatttcattgtggttggctgcgattttatcacagacattcccgccagctcgctggtcgacacctaccgaagccgagactcggactcgcttctcacagccttctactaccccaataccctggagaacgtggacaagaagtcattgctcaaggacgtgacggtgcactcatcgctggactcgcgaaccccgcggctgctggactcgtattcgcgtgactacattgagaacaagaagaccatgcccatccgccgatccatgctgtggcacttccctaagtctttggtctccacacagctgctcaatgcgtccgtctacttctgcactgccgacgtgtgtagagtcatcaccgagactcaggctgcccctgaggaggattccacagacgaagatcccgacacccgatcttcgtcgcctgtcagacaagaacaggaggaggcacacaccattctggccaaaggccgacagtgggaccgagtggttcgagacattgcccgacggtcgtgggcacatgcgaagccgctcaagtctgtgtctctgtgcgttctggactccaatacctttgcacgagcaaacaacctgtctgcatacatggaaatgaaccgagtgattctgaaggcaagagccaaggccaacgccactgcccagaagcccgctccagctgttaagggagctgccactgttggtgtcgactctctggtcggcgaagagacccagctgggcgagcgaaccagtataaagcgatctgtggttggaaacaactgcaccatcggcaaacgatgtcgaatcaacggctgtgtcatctttgacggtgctttcattgccgatgacgttactctggagaactgtctggtcggaactaagaccacagtcggtaccaaggccaaactcacgggctgcaatgttgaaggaggatacaaggtggaggctggcaaggtggccaagaacgaaaccatgctacagctgtccctggagggtttgatggagtccgacgaatacactgacgaccatgacgaagatgacgatgatgacgatgacagcgaaatgggcgactcggacgattggtccgtcagcggaggagacgactacgatgatgatgatgggctcttcgatcggtcttag

SEQ ID NO: 2464 - protein, 483 aa, Yarrowia lipolytica CLIB122
MGADFKVFILCGQGKNMAPLSSVRASGVPKALLPMANVPVIDYTLKWCETIPNPKVFVCCSTADEAEISAYVDSFKAEHSTSVVASNVTICSKTDAKSGDFILELTRGEPSDFIVVGCDFITDIPASSLVDTYRSRDSDSLLTAFYYPNTLENVDKKSLLKDVTVHSSLDSRTPRLLDSYSRDYIENKKTMPIRRSMLWHFPKSLVSTQLLNASVYFCTADVCRVITETQAAPEEDSTDEDPDTRSSSPVRQEQEEAHTILAKGRQWDRVVRDIARRSWAHAKPLKSVSLCVLDSNTFARANNLSAYMEMNRVILKARAKANATAQKPAPAVKGAATVGVDSLVGEETQLGERTSIKRSVVGNNCTIGKRCRINGCVIFDGAFIADDVTLENCLVGTKTTVGTKAKLTGCNVEGGYKVEAGKVAKNETMLQLSLEGLMESDEYTDDHDEDDDDDDDSEMGDSDDWSVSGGDDYDDDDGLFDRS

SEQ ID NO: 2465 - DNA, 1443 bp, Candida albicans SC5314
  CDS (1)..(1443): transl_table=12
atggagttcacagcagttattgtctgtggtaaggggaaagctttgacacccttttcccaagctcgttctacaggaatcccgaaaccattattgccaattgcaaacaaacctatggttcaatatgtgttggattggtgtttacaagccaatttttcaagaataatcgttctttttgaaaaagaggacgaatcttctggtgttctagaacagactataaagagatatcaagaggaaaaagagaagaccaacaccaataaaaacgaatctcacgttagtattgatgttataccttacaattgtgaaaacaatggattaatattatacaaattgtatgaattatacagtgaaaacaaagtttcaaacaacaatttcataattttaccatgtgacttgataaccaatttaccacctcaagtgataattgaagcatatagaaataaaaatgattcagatttaggattggtaattgcatacaagaatcaattggatatagaagataaaaaggcgaaaattttccctcaaagttataccatctatagtgacactgatgagaatgggaatgaaagtccaatgtttttggacacatacagccaagcagatattgaatttcatcaagcattatctatcagaactcaaatgtgttggagataccctgcagcaaccgtcagcaataaattgttgaatagtggaatttttcttggatcgtgcctgcaaatattcagcgttttcgatgagcaaaaagataaatttactgaatcatattttgaaaaacgttctttgatgaaaattgtacgtgatttggctcgaagatcttggaagcatgcattgcatcaagcaagtgttggatttttcattgttcccaaacaagctacttttttcagatgtaacaatttgccggtgttgatggaggctaatagatactttatgaaaaaacaagctattgcaaaatcagcatctcaaaacacacaagcacctaataaacaagataaacaatcaggggcacatgtgggaaacgattccttagtgggagaaaatacagaactaggagaaaagactaatgtcaaaagaagtgttattgggtcgaattgtaagattggtaagaagaataagattacagggtgtttaattttggataatgttgaaatccacgatgacgtgacgttggaaaattgtattattggtcatgatgttattattcagggtaaatgtaaattgaccaattgtaacgtggaaagcaccaacgaggtagctcataacacacaagccaagaattcgaatctattgtgtttgaccttggaaggtctagtaaatgaagacgatcaatatggcgacgacagcgatgacgaagaggacagtgaggagtacgatagtactgatgacgaagatgagagcgagtttgaagatgagtacacaggaaacgaagatggtttatttgcctattaa

SEQ ID NO: 2466 - protein, 480 aa, Candida albicans SC5314
MEFTAVIVCGKGKALTPFSQARSTGIPKPLLPIANKPMVQYVLDWCLQANFSRIIVLFEKEDESSGVLEQTIKRYQEEKEKTNTNKNESHVSIDVIPYNCENNGLILYKLYELYSENKVSNNNFIILPCDLITNLPPQVIIEAYRNKNDSDLGLVIAYKNQLDIEDKKAKIFPQSYTIYSDTDENGNESPMFLDTYSQADIEFHQALSIRTQMCWRYPAATVSNKLLNSGIFLGSCSQIFSVFDEQKDKFTESYFEKRSLMKIVRDLARRSWKHALHQASVGFFIVPKQATFFRCNNLPVLMEANRYFMKKQAIAKSASQNTQAPNKQDKQSGAHVGNDSLVGENTELGEKTNVKRSVIGSNCKIGKKNKITGCLILDNVEIHDDVTLENCIIGHDVIIQGKCKLTNCNVESTNEVAHNTQAKNSNLLCLTLEGLVNEDDQYGDDSDDEEDSEEYDSTDDEDESEFEDEYTGNEDGLFAY

SEQ ID NO: 2467 - DNA, 26 bp, Artificial sequence
  primer
atgtcaattcaggcttttgtcttttg

SEQ ID NO: 2468 - DNA, 25 bp, Artificial sequence
  primer
ttaacgctcaaataatccgtcatct

SEQ ID NO: 2469 - protein, 595 aa, Artificial sequence
  consensus sequence
  Variant (2)..(4): Xaa in position 2 to 4 is any amino acid
  Variant (6)..(6): Xaa in position 6 is any amino acid
  Variant (8)..(8): Xaa in position 8 is any amino acid
  Variant (11)..(11): Xaa in position 11 is any amino acid
  Variant (13)..(14): Xaa in position 13 to 14 is any amino acid
  Variant (16)..(16): Xaa in position 16 is any amino acid
  Variant (19)..(26): Xaa in position 19 to 26 is any amino acid
  Variant (27)..(64): Xaa in position 27 to 64 is any or no amino acid
  Variant (71)..(71): Xaa in position 71 is any amino acid
  Variant (74)..(74): Xaa in position 74 is any amino acid
  Variant (77)..(78): Xaa in position 77 to 78 is any amino acid
  Variant (80)..(80): Xaa in position 80 is any amino acid
  Variant (82)..(82): Xaa in position 82 is any amino acid
  Variant (85)..(86): Xaa in position 85 to 86 is any amino acid
  Variant (88)..(88): Xaa in position 88 is any amino acid
  Variant (90)..(134): Xaa in position 90 to 134 is any amino acid
  Variant (135)..(151): Xaa in position 135 to 151 is any or no amino acid
  Variant (153)..(154): Xaa in position 153 to 154 is any amino acid
  Variant (156)..(165): Xaa in position 156 to 165 is any amino acid
  Variant (166)..(171): Xaa in position 166 to 171 is any or no amino acid
  Variant (173)..(174): Xaa in position 173 to 174 is any amino acid
  Variant (182)..(183): Xaa in position 182 to 183 is any amino acid
  Variant (188)..(193): Xaa in position 188 to 193 is any amino acid
  Variant (195)..(199): Xaa in position 195 to 199 is any amino acid
  Variant (201)..(204): Xaa in position 201 to 204 is any amino acid
  Variant (207)..(207): Xaa in position 207 is any amino acid
  Variant (209)..(213): Xaa in position 209 to 213 is any amino acid
  Variant (214)..(214): Xaa in position 214 is any or no amino acid
  Variant (218)..(223): Xaa in position 218 to 223 is any amino acid
  Variant (224)..(228): Xaa in position 224 to 228 is any or no amino acid
  Variant (230)..(230): Xaa in position 230 is any amino acid
  Variant (233)..(238): Xaa in position 233 to 238 is any amino acid
  Variant (239)..(241): Xaa in position 239 to 241 is any or no amino acid
  Variant (243)..(243): Xaa in position 243 is any amino acid
  Variant (247)..(247): Xaa in position 247 is any amino acid
  Variant (250)..(251): Xaa in position 250 to 251 is any amino acid
  Variant (253)..(256): Xaa in position 253 to 256 is any amino acid
  Variant (258)..(258): Xaa in position 258 is any amino acid
  Variant (260)..(260): Xaa in position 260 is any amino acid
  Variant (263)..(264): Xaa in position 263 to 264 is any amino acid
  Variant (266)..(266): Xaa in position 266 is any amino acid
  Variant (268)..(269): Xaa in position 268 to 269 is any amino acid
  Variant (271)..(273): Xaa in position 271 to 273 is any amino acid
  Variant (277)..(277): Xaa in position 277 is any amino acid
  Variant (281)..(286): Xaa in position 281 to 286 is any amino acid
  Variant (288)..(305): Xaa in position 288 to 305 is any amino acid
  Variant (306)..(348): Xaa in position 306 to 348 is any or no amino acid
  Variant (350)..(355): Xaa in position 350 to 355 is any amino acid
  Variant (356)..(368): Xaa in position 356 to 368 is any or no amino acid
  Variant (370)..(371): Xaa in position 370 to 371 is any amino acid
  Variant (375)..(375): Xaa in position 375 is any amino acid
  Variant (380)..(380): Xaa in position 380 is any amino acid
  Variant (382)..(388): Xaa in position 382 to 388 is any amino acid
  Variant (390)..(393): Xaa in position 390 to 393 is any amino acid
  Variant (395)..(397): Xaa in position 395 to 397 is any amino acid
  Variant (398)..(398): Xaa in position 398 is any or no amino acid
  Variant (400)..(400): Xaa in position 400 is any amino acid
  Variant (402)..(402): Xaa in position 402 is any amino acid
  Variant (406)..(408): Xaa in position 406 to 408 is any amino acid
  Variant (411)..(411): Xaa in position 411 is any amino acid
  Variant (414)..(416): Xaa in position 414 to 416 is any amino acid
  Variant (418)..(421): Xaa in position 418 to 421 is any amino acid
  Variant (423)..(434): Xaa in position 423 to 434 is any amino acid
  Variant (435)..(443): Xaa in position 435 to 443 is any or no amino acid
  Variant (445)..(445): Xaa in position 445 is any amino acid
  Variant (447)..(448): Xaa in position 447 to 448 is any amino acid
  Variant (451)..(456): Xaa in position 451 to 456 is any amino acid
  Variant (458)..(459): Xaa in position 458 to 459 is any amino acid
  Variant (461)..(461): Xaa in position 461 is any amino acid
  Variant (463)..(463): Xaa in position 463 is any amino acid
  Variant (465)..(466): Xaa in position 465 to 466 is any amino acid
  Variant (468)..(469): Xaa in position 468 to 469 is any amino acid
  Variant (471)..(471): Xaa in position 471 is any amino acid
  Variant (474)..(474): Xaa in position 474 is any amino acid
  Variant (476)..(479): Xaa in position 476 to 479 is any amino acid
  Variant (481)..(490): Xaa in position 481 to 490 is any amino acid
  Variant (492)..(492): Xaa in position 492 is any amino acid
  Variant (494)..(494): Xaa in position 494 is any amino acid
  Variant (498)..(498): Xaa in position 498 is any amino acid
  Variant (500)..(500): Xaa in position 500 is any amino acid
  Variant (502)..(505): Xaa in position 502 to 505 is any amino acid
  Variant (507)..(508): Xaa in position 507 to 508 is any amino acid
  Variant (510)..(510): Xaa in position 510 is any amino acid
  Variant (516)..(516): Xaa in position 516 is any amino acid
  Variant (519)..(522): Xaa in position 519 to 522 is any amino acid
  Variant (524)..(529): Xaa in position 524 to 529 is any amino acid
  Variant (531)..(532): Xaa in position 531 to 532 is any amino acid
  Variant (535)..(538): Xaa in position 535 to 538 is any amino acid
  Variant (540)..(541): Xaa in position 540 to 541 is any amino acid
  Variant (542)..(545): Xaa in position 542 to 545 is any or no amino acid
  Variant (547)..(561): Xaa in position 547 to 561 is any amino acid
  Variant (562)..(573): Xaa in position 562 to 573 is any or no amino acid
  Variant (575)..(581): Xaa in position 575 to 581 is any amino acid
  Variant (582)..(584): Xaa in position 582 to 584 is any or no amino acid
  Variant (586)..(590): Xaa in position 586 to 590 is any amino acid
  Variant (591)..(591): Xaa in position 591 is any or no amino acid
MXXXAXIXCGXGXXLXPFXXXXXXXXXXXXXXXXXXXXXXXXXXXXXXXXXXXXXXXXXXXXXXPKALLPXANXPMXXYXLXWCXXAXFXXXXXXXXXXXXXXXXXXXXXXXXXXXXXXXXXXXXXXXXXXXXXXXXXXXXXXXXXXXXXXGXXLXXXXXXXXXXXXXXXXFXXLPCDFITXXPPQVXXXXXXNXXXXXLXXXXYYXNXXXXXXDKKXXXXXXXXXXXTXYSXXXXXXXXXPXLLDXYSXXDXXXXKXLXIRXXMXWXXPXXXVSTXLLNXXXXXXSXXXXXXXXXXXXXXXXXXXXXXXXXXXXXXXXXXXXXXXXXXXXXXXXXXXXXXXXXXXXXFXXXXXXXXXXXXXXXXXXXKXXRDLXRRSWXHXXXXXXXGXXXXPXXXXFXRXNNLXXXMEXNRXXXKXXXXAXXXXXXXXXXXXXXXXXXXXXGXDXXVGXXXXXXEXXNXKXSXXGXXCXIGXRXXXXGXXXXXXXXXXDXVXLENXIXGXXXXIXXKXKLTNCXVEXXXXVXXXXXXKXXTLXXXXLXXXXXXDXXXXXXXXXXXXXXXXXXXXXXXXXXXSXXXXXXXXXXDXXXXXXDGLF

SEQ ID NO: 2470 - protein, 59 aa, Artificial sequence
  protein pattern
  Variant (2)..(2): Xaa in position 2 is any amino acid
  Variant (4)..(5): Xaa in position 4 to 5 is any amino acid
  Variant (6)..(6): Xaa in position 6 is any or no amino acid
  Variant (8)..(11): Xaa in position 8 to 11 is any amino acid
  Variant (12)..(12): Xaa in position 12 is any or no amino acid
  Variant (14)..(14): Xaa in position 14 is any amino acid
  Variant (15)..(15): Xaa in position 15 is Lys or Arg
  Variant (16)..(16): Xaa in position 16 is Cys or Asn
  Variant (17)..(17): Xaa in position 17 is Lys or Arg
  Variant (18)..(18): Xaa in position 18 is Ile or Val
  Variant (19)..(19): Xaa in position 19 is Ala, Asn, Thr or Val
  Variant (21)..(21): Xaa in position 21 is Cys or Ser
  Variant (22)..(23): Xaa in position 22 to 23 is Ile, Leu or Val
  Variant (24)..(24): Xaa in position 24 is Phe or Leu
  Variant (25)..(25): Xaa in position 25 is Ala, Asp or Pro
  Variant (26)..(26): Xaa in position 26 is Gly or Asn
  Variant (27)..(27): Xaa in position 27 is Ala or Val
  Variant (28)..(28): Xaa in position 28 is any amino acid
  Variant (29)..(29): Xaa in position 29 is Ile or Leu
  Variant (30)..(30): Xaa in position 30 is any amino acid
  Variant (32)..(32): Xaa in position 32 is Asp or Glu
  Variant (33)..(33): Xaa in position 33 is Thr or Val
  Variant (34)..(34): Xaa in position 34 is any amino acid
  Variant (38)..(38): Xaa in position 38 is Cys or Val
  Variant (39)..(39): Xaa in position 39 is Ile or Leu
  Variant (40)..(40): Xaa in position 40 is Ile or Val
  Variant (42)..(43): Xaa in position 42 to 43 is any amino acid
  Variant (44)..(44): Xaa in position 44 is Ala, Thr or Val
  Variant (45)..(45): Xaa in position 45 is any amino acid
  Variant (46)..(46): Xaa in position 46 is Ile or Val
  Variant (47)..(47): Xaa in position 47 is Gly or Gln
  Variant (48)..(48): Xaa in position 48 is any amino acid
  Variant (50)..(50): Xaa in position 50 is Ala, Cys or Ser
  Variant (53)..(53): Xaa in position 53 is Ser or Thr
  Variant (54)..(54): Xaa in position 54 is Gly or Asn
  Variant (56)..(56): Xaa in position 56 is any amino acid
  Variant (57)..(57): Xaa in position 57 is Ile or Val
  Variant (59)..(59): Xaa in position 59 is Gly or Ser
KXSXXXGXXXXXGXXXXXXGXXXXXXXXXXDXXXLENXXXGXXXXXXXKXKLXXCXXEX

SEQ ID NO: 2471 - protein, 37 aa, Artificial sequence
  protein pattern
  Variant (2)..(7): Xaa in position 2 to 7 is any or no amino acid
  Variant (9)..(9): Xaa in position 9 is any amino acid
  Variant (10)..(10): Xaa in position 10 is Leu or Met
  Variant (11)..(11): Xaa in position 11 is Pro or Gln
  Variant (12)..(12): Xaa in position 12 is Ile or Val
  Variant (14)..(15): Xaa in position 14 to 15 is any amino acid
  Variant (16)..(16): Xaa in position 16 is Leu or Met
  Variant (17)..(17): Xaa in position 17 is any amino acid
  Variant (19)..(19): Xaa in position 19 is any amino acid
  Variant (20)..(20): Xaa in position 20 is Phe or Tyr
  Variant (22)..(24): Xaa in position 22 to 24 is any amino acid
  Variant (25)..(25): Xaa in position 25 is Ile or Val
  Variant (28)..(28): Xaa in position 28 is any amino acid
  Variant (29)..(29): Xaa in position 29 is Ile or Leu
  Variant (32)..(32): Xaa in position 32 is Ala, Gly or Ser
  Variant (33)..(33): Xaa in position 33 is any amino acid
  Variant (34)..(34): Xaa in position 34 is Ile or Val
  Variant (35)..(35): Xaa in position 35 is Phe or Tyr
  Variant (36)..(36): Xaa in position 36 is Phe or Met
  Variant (37)..(37): Xaa in position 37 is Cys or Gly
KXXXXXXKXXXXRXXXXWXXPXXXXSTXXLNXXXXXX

SEQ ID NO: 2472 - protein, 23 aa, Artificial sequence
  protein pattern
  Variant (5)..(5): Xaa in position 5 is Leu or Met
  Variant (7)..(7): Xaa in position 7 is Ile, Leu, Met or Val
  Variant (8)..(8): Xaa in position 8 is Ala or Gly
  Variant (10)..(10): Xaa in position 10 is any amino acid
  Variant (11)..(11): Xaa in position 11 is Pro or Ser
  Variant (12)..(12): Xaa in position 12 is Met or Val
  Variant (13)..(13): Xaa in position 13 is Ile or Leu
  Variant (14)..(14): Xaa in position 14 is Asp or Glu
  Variant (15)..(15): Xaa in position 15 is Phe or Tyr
  Variant (16)..(16): Xaa in position 16 is Thr or Val
  Variant (17)..(17): Xaa in position 17 is Ile or Leu
  Variant (18)..(18): Xaa in position 18 is Asp, Glu or Lys
  Variant (21)..(21): Xaa in position 21 is Asp or Glu
  Variant (22)..(22): Xaa in position 22 is any amino acid
  Variant (23)..(23): Xaa in position 23 is Ala or Ile
PKALXPXXNXXXXXXXXXWCXXX

SEQ ID NO: 2473 - protein, 26 aa, Artificial sequence
  protein pattern
  Variant (2)..(2): Xaa in position 2 is any amino acid
  Variant (3)..(3): Xaa in position 3 is any or no amino acid
  Variant (7)..(7): Xaa in position 7 is Ala or Ser
  Variant (12)..(12): Xaa in position 12 is any amino acid
  Variant (14)..(14): Xaa in position 14 is Ala, Ser or Val
  Variant (15)..(17): Xaa in position 15 to 17 is any amino acid
  Variant (18)..(18): Xaa in position 18 is Ala, Asp or Glu
  Variant (19)..(19): Xaa in position 19 is Pro, Ser or Thr
  Variant (20)..(20): Xaa in position 20 is Ile, Met or Val
  Variant (22)..(22): Xaa in position 22 is Phe or Ile
  Variant (23)..(23): Xaa in position 23 is any amino acid
  Variant (24)..(24): Xaa in position 24 is Ile or Val
  Variant (25)..(25): Xaa in position 25 is Ile, Leu or Val
KXXRDLXRRSWXHXXXXXXXGXXXXP

SEQ ID NO: 2474 - protein, 41 aa, Artificial sequence
  protein pattern
  Variant (4)..(4): Xaa in position 4 is Phe or Leu
  Variant (5)..(5): Xaa in position 5 is Ile or Val
  Variant (7)..(7): Xaa in position 7 is Asp or Asn
  Variant (8)..(8): Xaa in position 8 is Ile or Leu
  Variant (13)..(13): Xaa in position 13 is Phe, Ile or Leu
  Variant (14)..(14): Xaa in position 14 is Ile, Leu or Val
  Variant (15)..(15): Xaa in position 15 is Asp or Glu
  Variant (16)..(16): Xaa in position 16 is Ala or Gln
  Variant (17)..(17): Xaa in position 17 is Phe or Tyr
  Variant (18)..(18): Xaa in position 18 is any amino acid
  Variant (20)..(20): Xaa in position 20 is Lys or Arg
  Variant (21)..(21): Xaa in position 21 is Asp or Asn
  Variant (22)..(22): Xaa in position 22 is Asp, Glu or Pro
  Variant (23)..(23): Xaa in position 23 is Asp, Glu, Asn or Ser
  Variant (24)..(24): Xaa in position 24 is Asp or Asn
  Variant (26)..(26): Xaa in position 26 is Ala or Gly
  Variant (27)..(27): Xaa in position 27 is Leu or Met
  Variant (28)..(28): Xaa in position 28 is any amino acid
  Variant (29)..(29): Xaa in position 29 is Ile or Val
  Variant (30)..(30): Xaa in position 30 is any amino acid
  Variant (32)..(32): Xaa in position 32 is His, Lys or Arg
  Variant (34)..(34): Xaa in position 34 is Gly, Asn, Gln or Ser
  Variant (35)..(35): Xaa in position 35 is Phe, Leu or Val
  Variant (36)..(36): Xaa in position 36 is Asp or Glu
  Variant (37)..(39): Xaa in position 37 to 39 is any amino acid
  Variant (40)..(40): Xaa in position 40 is Asp or Lys
PCDXXTXXPPQVXXXXXXNXXXXXLXXXXXYXNXXXXXXXK

SEQ ID NO: 2475 - protein, 24 aa, Artificial sequence
  protein pattern
  Variant (2)..(2): Xaa in position 2 is any amino acid
  Variant (4)..(4): Xaa in position 4 is Ala, Cys or Ser
  Variant (6)..(6): Xaa in position 6 is any or no amino acid
  Variant (8)..(8): Xaa in position 8 is Asn, Pro or Ser
  Variant (9)..(9): Xaa in position 9 is Ala or Val
  Variant (10)..(10): Xaa in position 10 is any amino acid
  Variant (12)..(12): Xaa in position 12 is Asp or Glu
  Variant (13)..(13): Xaa in position 13 is any amino acid
  Variant (16)..(16): Xaa in position 16 is any amino acid
  Variant (17)..(17): Xaa in position 17 is Phe, Ile or Val
  Variant (18)..(18): Xaa in position 18 is Leu or Met
  Variant (20)..(22): Xaa in position 20 to 22 is any or no amino acid
  Variant (24)..(24): Xaa in position 24 is Ala, Gln or Ser
FXRXNXLXXXMXXNRXXXKXXXKX

SEQ ID NO: 2476 - protein, 19 aa, Artificial sequence
  protein pattern
  Variant (2)..(2): Xaa in position 2 is Asp, Glu, Gln or Ser
  Variant (3)..(3): Xaa in position 3 is Phe or Ile
  Variant (4)..(4): Xaa in position 4 is any amino acid
  Variant (6)..(6): Xaa in position 6 is Phe or Val
  Variant (7)..(7): Xaa in position 7 is Ile or Val
  Variant (8)..(8): Xaa in position 8 is Phe, Leu or Val
  Variant (11)..(11): Xaa in position 11 is any amino acid
  Variant (13)..(14): Xaa in position 13 to 14 is any amino acid
  Variant (16)..(16): Xaa in position 16 is Ala, Ser or Thr
  Variant (19)..(19): Xaa in position 19 is Ala, Ser or Thr
MXXXAXXXCGXGXXLXPFX

SEQ ID NO: 2477 - DNA, 2241 bp, Saccharomyces cerevisiae
  CDS (1)..(2241)
atgattacgcagaattctataccagaggtaaaagaagattttattggttatgctttacatgagagaagaattcggttaccgcagtttcaagacttagggccggcagacttggtcacactaacaaagtatttgcccacttcaagtaacacaaatgccataaacagtacgagtagaaatggtgcggccattattcagtcccctgcagccgttgtagccgatgactctgccgcttccatggcaaccaatggcgatgctagtgacaccgccgttaccacaaattatacaaatgcatctatatacagtagcagcagaaatgccaatgatggagccccgatggtcgctgagctccatccacttgataaactgaaggacgaagtagggacatttttttactcaatgggtgtcgatacatccggtccaacttcaatcgcaatttttttgaaggagatttcagaggtcatcagcgagaaaccccaagtttggtttggcaggaagaaaaccttcaatgttgctcgaatttcattttccacttggaatgcgttcaggagatgcgacataaatgtcgtcgttcatattccaggatcgattcagaactttatagtggattgcaacggtgaaagtcaaaatatagagatgtgtgcggattatgacttaatttgggctgaaacgttcgtaagtggcgtagtacggtcaatcatgttaatgaaggaaaacgctgaagagggagaattacaaaatttagtggaaaccttgattttgaacccgtttactgcaggacaaatcgacgatgtaccagaaatgttcattgatctgttccctatagtttaccataagggcccattattgggagctccgtattatattaccaatgtgacgaacactaataactatttggtagaaacactcgttgagatagttaagctgactcgtaatgttagcagggcggaaataatgttgaagaatctggctaccgacaaccctgaggcgatcataatactaatcaagatctttttggtgtgtgatcaagaattagacgcaataaagctcacatacgatatgctttcgcaggataaaataataaacaacactaataaccgcatggattataaatctgaattactgtgcttacaagcgcaatttttgatagacaaaaggcaggattacagcttggcgcaaaacatagcgcaagaggcagtcaattgttctcccagtgaatttagaccttggtatcttttatccaaggtgtatgtaaagctaaatgatattgaaaatgccttactgatactgaattcatgccctatgtctccattaaaggaaaaatacgtactgaaaagagtagctccgttgccttcgaataatagtcttcatttgccattgccaattgacgttgtactggatgaagtgacgtcgttgaatccacaagacgttcagaatgaacaccgctctgcggatccaatgctggtcaatttagctgcgtcgaacttgaaatctactttccaattggcataccgattattgacagaaattgtgcagatcaccggctgggaaaatctgttaaagtacagatcaaacattttcgttatggaagaagagtaccaaaaatcatcatcttcgttaccaaaggacgttaacaaacaagaagaacagcctctgagggctaaacggctgtgtgaacgatggttagacaacctcttcatgcttttatatgaagacctgaagatgtatacattatggcaaaccgaacaactgtacatggatgcacagaataacaaccacaataagttgactttcgaatgggagttatttggcctttgtgcacgtcgactgggccatttccctgaggccgccaaggccttccagaacggtttatcgcagagattttcatcaaggtgcgcgaggaaactgctggaatattgtataaacgaacgccaacgggtcaaaaattttataaactcacctaattcgcatgacatggtccctgaaatagtaagctcacgcataagagagctagacaatagcattatcgacctttgcgtgaagatatgctgctggaaccaccgttggtatacggaattttccataagtttacttgattgtttaagtgtggttattcaagatatgagtctgaccaaagtttcgaatgaaatctcgtcaagatatccagaaactgttctcaacttggtgcaggagaatttgctcaatttcttcactacttgcaccattggatgctacgatgcataa

SEQ ID NO: 2478 - protein, 746 aa, Saccharomyces cerevisiae
MITQNSIPEVKEDFIGYALHERRIRLPQFQDLGPADLVTLTKYLPTSSNTNAINSTSRNGAAIIQSPAAVVADDSAASMATNGDASDTAVTTNYTNASIYSSSRNANDGAPMVAELHPLDKLKDEVGTFFYSMGVDTSGPTSIAIFLKEISEVISEKPQVWFGRKKTFNVARISFSTWNAFRRCDINVVVHIPGSIQNFIVDCNGESQNIEMCADYDLIWAETFVSGVVRSIMLMKENAEEGELQNLVETLILNPFTAGQIDDVPEMFIDLFPIVYHKGPLLGAPYYITNVTNTNNYLVETLVEIVKLTRNVSRAEIMLKNLATDNPEAIIILIKIFLVCDQELDAIKLTYDMLSQDKIINNTNNRMDYKSELLCLQAQFLIDKRQDYSLAQNIAQEAVNCSPSEFRPWYLLSKVYVKLNDIENALLILNSCPMSPLKEKYVLKRVAPLPSNNSLHLPLPIDVVLDEVTSLNPQDVQNEHRSADPMLVNLAASNLKSTFQLAYRLLTEIVQITGWENLLKYRSNIFVMEEEYQKSSSSLPKDVNKQEEQPLRAKRLCERWLDNLFMLLYEDLKMYTLWQTEQLYMDAQNNNHNKLTFEWELFGLCARRLGHFPEAAKAFQNGLSQRFSSRCARKLLEYCINERQRVKNFINSPNSHDMVPEIVSSRIRELDNSIIDLCVKICCWNHRWYTEFSISLLDCLSVVIQDMSLTKVSNEISSRYPETVLNLVQENLLNFFTTCTIGCYDA

SEQ ID NO: 2479 - DNA, 2229 bp, Candida glabrata CBS 138
  CDS (1)..(2229)
atgattacacaggcgtcgattcctgaagtgagggaggatgttattgggtttgcgctaggtgagagaaaggccattcttccacaatgtcaggatctgggacctccggacttgattaccatggttaaatacgtgccaacaccaaactcaaatgctactgcaggcaccacctcaggtaatggagctggtggtgcaaataatggcactgctggagcagctaatggaaataattccttgtctactgctgatccagccgccctgttggcagagattcactcccatgacaaactaaagggggcaattggcaccttcttttacacactaggtattgatacatctgatccaacttctatttctatctctttaaaacaaattgctgacgcgattgctgagaagcctcaaaaatggtttggcaagtttaagaatttcagtatcgccaggatttccctgtcgacatacaatatcttcagaagatgtgatgttaatgtgattgtacacataccaggtgcagtacaaacctatgtactagattcaaatggtgagcatttgcctgtctcaggtaatcaaactacaccaaccgtcgcttccacggctagcgccaatccaattgatcaggcaagtgagatggatgtcatttgggcggagactttcatcagtggagtaattcgttcaattatgtttatgaaggataacgccgatgatggtgaggcccaacccttggtcgaaactttaattttgaatccattgacagcaggtaaactagacgacgttgcaaatacatttataaagctcttcccaacggtctatgaaagaggtgtgttgactgaagcaccttgtcacgttttggtgccaactagaacaaacaactacctagttgatactttggtagaactggttaggctaacgaaatcggtcgacatctgtagacctatgcttgaagagctcattaaaagttatccagatgctagcatagtccttgcgcgtgtcttgatggcttgtgattatgagattgatgctattgatatcataaacagagaattactacctcatggagaagaagatgatactatatcacctatatttagagcagaattgttatgcctacaaacacagtttttaatgaatgttaaaaatgactataagctggcgctggaagtggctctatccgcagttaaattttctcccagtgagttcattccatggtttctgctaactaagatatacatcaagctaaatgatattgaaaatgcccttttggctttgaattcatgccctatggctcaatcacacgaaagatatgtcctaaagagagcggtacctattggatcagaggataatctccacctaccattgccagaaaacataggagttgatgaaattttacaattaaatcctagcgatgttaacaaggaacaattaaattctgatccatctttaactagatccgctgctttaaatttgaagtctacatatctattggcatataggttattgacagaaattgtacaaatcacaggctgggagaccctattgaagtgtagatctaagatatttgttatggaggatgaatatcaaatatccacggatgaggtatcattgacaaaccagagtaatagaaatgaggacacaccaagtgagttaaatatgagaactaagagactttgtgataggtggttagataaccttttcatgcttctatatgaagacttgaagatatacacattatggcagacagaacagttatatttcgaagcacaaaatagtaaatacaagaagctgacatatgaatgggaagcatttgggctttgtgcacagagactaggacatcttcctgaagctgctagcgcattccaaagaggtctttcccaaagatttgctccaatgagtgcgcggatgttattgaattattatattcaggaacatcaccgcgtgagaaaccaatccttatcaccaaactctgaactcacatcatcgcaaataatatcacgtatcaatgacttagattctcgaattatagatttatgtgtcaagctatgttgctggaaccaccgttggtacattgagttttcgatacaacttatcgacgcgctgagtgtcgcagttcaagatatgggtatcatgaaggtaatcaacgaaatagcgtctcgttatccggatgccgttgtatctataatgaaagaaaacttcttagacttcttggaaaactatactaacggattctttgatgcttga

SEQ ID NO: 2480 - protein, 742 aa, Candida glabrata CBS 138
MITQASIPEVREDVIGFALGERKAILPQCQDLGPPDLITMVKYVPTPNSNATAGTTSGNGAGGANNGTAGAANGNNSLSTADPAALLAEIHSHDKLKGAIGTFFYTLGIDTSDPTSISISLKQIADAIAEKPQKWFGKFKNFSIARISLSTYNIFRRCDVNVIVHIPGAVQTYVLDSNGEHLPVSGNQTTPTVASTASANPIDQASEMDVIWAETFISGVIRSIMFMKDNADDGEAQPLVETLILNPLTAGKLDDVANTFIKLFPTVYERGVLTEAPCHVLVPTRTNNYLVDTLVELVRLTKSVDICRPMLEELIKSYPDASIVLARVLMACDYEIDAIDIINRELLPHGEEDDTISPIFRAELLCLQTQFLMNVKNDYKLALEVALSAVKFSPSEFIPWFLLTKIYIKLNDIENALLALNSCPMAQSHERYVLKRAVPIGSEDNLHLPLPENIGVDEILQLNPSDVNKEQLNSDPSLTRSAALNLKSTYLLAYRLLTEIVQITGWETLLKCRSKIFVMEDEYQISTDEVSLTNQSNRNEDTPSELNMRTKRLCDRWLDNLFMLLYEDLKIYTLWQTEQLYFEAQNSKYKKLTYEWEAFGLCAQRLGHLPEAASAFQRGLSQRFAPMSARMLLNYYIQEHHRVRNQSLSPNSELTSSQIISRINDLDSRIIDLCVKLCCWNHRWYIEFSIQLIDALSVAVQDMGIMKVINEIASRYPDAVVSIMKENFLDFLENYTNGFFDA

SEQ ID NO: 2481 - DNA, 1944 bp, Kluyveromyces lactis NRRL Y-1140
  CDS (1)..(1944)
atgaatgaagtgcaagttgataattacagagttgttgaagagacacccggtcaagctttcaatggacgtattgcaaaattatctgatccggagtttgtagctagcttaggtccccaggatttggtcaccattgcgaagcacgactctcaaaagaaaaccgtcggctcctttttttatgtggctggactggacacttcagatccagctagtattgcagtgtggttgaaacaattgatggaatgcattcaggaaaaaccacagttatggtttggcaagaatgttaaattcactctcgaatggatctcgttcactacttggaatatcttcaaacaatgtgatatgactattaagatgtatctgccaggtacctttgaaatagattttgttgacaaaaatcgtaataagctacaattcgactcagatgaagatactgatatggcgtgggctgaagccttcatcagtgggaaaatgagagacataatgtgtatggtagagaatagagatgatggagaagttatcaatgttgtggagactagaatttacaaccccttgatgactggtcaattggattctgtagatgaaatgttcttcaaattattcccgctattcttccctcgtggcattgaggttggttgcccgtgtatatacggtaatatgccttccactttaaccaataactatctggtggaaactttatgtgaaattgttcgcttcacaaaatccattgatttatgcctaccaatgttgcatgaattgaaggaagcttttggtccactagttaacattataattgcaagaatttatttgactaatgataaagagttagatggaataaaattgatccatgatacattacaggaaattaaggatccaacctatcaatgtgaattgttgctcctacaagcaaaatacctactgaaacacgacgatccactattagcactagaagcaagtcaacgtggtgttgatttgaccccgaatgctttcatgccttggttttatttggttaagtcttacattgcgttaggtgataacaaaaacgccttgttatcgttaaattcattaccaatgaacctcgcatccttagcacaaaaatatcagtatcgaagaatcttgaatactgatggaaacaatgctactgttgaattacacctcccactccctttagatgtcgtattagacgaagtcactaatctcaattcacttctagtaatggaagaacataagattgttaaccccgtcttgtacaacttaaagtctgccaatttgaaaaacacatttcaatggatctatgaacttctatgtgaaatagtgaaaagtttaggatgggagaaactattacaattaagagctgaactatttttaatggaagaagaatatgatcatctggacgccacttccgaaaccgaatcagaaaaagaagtaactcgggacataagagggaagcgtttatgtgaaaggtggtttgataatctcttcatgttgttatatgatgatttaagggtccattctcaatggcaatccaatgaattgaagccagaaacaaccttagagtgggaattaattggattatgttgcttccgtttgagacaattccaaagcgcaaaggctgcgttccaaaatggcctacagaaaagatttagctctcagtcctcaagaaagttactacagattctactaatggaacgtgaatcaaacccttctgaggatactgatctagaaatcataactatttgcgtcaagctttgttgttggagccaccgttggtatgcagaattctcaatgttacttttagatgccatggcaaaagttgttgagaatttgggtatcaccagagtagagaatgaagtcaattccagattcccagaatccgtgtctggcctattccatgacaatattctacgatttttccaggaatacagcaacaattactacgatgaatga

SEQ ID NO: 2482 - protein, 647 aa, Kluyveromyces lactis NRRL Y-1140
MNEVQVDNYRVVEETPGQAFNGRIAKLSDPEFVASLGPQDLVTIAKHDSQKKTVGSFFYVAGLDTSDPASIAVWLKQLMECIQEKPQLWFGKNVKFTLEWISFTTWNIFKQCDMTIKMYLPGTFEIDFVDKNRNKLQFDSDEDTDMAWAEAFISGKMRDIMCMVENRDDGEVINVVETRIYNPLMTGQLDSVDEMFFKLFPLFFPRGIEVGCPCIYGNMPSTLTNNYLVETLCEIVRFTKSIDLCLPMLHELKEAFGPLVNIIIARIYLTNDKELDGIKLIHDTLQEIKDPTYQCELLLLQAKYLLKHDDPLLALEASQRGVDLTPNAFMPWFYLVKSYIALGDNKNALLSLNSLPMNLASLAQKYQYRRILNTDGNNATVELHLPLPLDVVLDEVTNLNSLLVMEEHKIVNPVLYNLKSANLKNTFQWIYELLCEIVKSLGWEKLLQLRAELFLMEEEYDHLDATSETESEKEVTRDIRGKRLCERWFDNLFMLLYDDLRVHSQWQSNELKPETTLEWELIGLCCFRLRQFQSAKAAFQNGLQKRFSSQSSRKLLQILLMERESNPSEDTDLEIITICVKLCCWSHRWYAEFSMLLLDAMAKVVENLGITRVENEVNSRFPESVSGLFHDNILRFFQEYSNNYYDE

SEQ ID NO: 2483 - DNA, 2199 bp, Debaryomyces hansenii CBS767
  CDS (1)..(2199): transl_table=12
atgcttctcactacattagcttcgattcctgaagctaaggaggaatatcttgattcttcattgattgaaaggacgggccgtttgcatacctttactgatttaggaccggcagacttgtgtaatatccataagcaatcagtgacatcgaaaaagaattctgaaattggaacgtttttatattataccggtgtcgatacgtcgaattctgcttcaattgcagcccatttgcaaggattagctaatttgataggctcaagatcacaatactggtttggggagaaaaagcattggaaggttccagaattgacgtattgtacttacaatgcattctcaaaagtggatatgagagtgactgtccatattccaggaaaatttgagagttcaataatcaatagtgatggaaaactaattcatgataaggttagtgacaacgaatcagagaaattatggcttgaaaccttcgtgacttcaattgttagatgcctaattgattcggaggatgacgatgccaataaggttggaggtctagttgaggttcgtaaattaaatccttttaataatggcaagtcctccaaagaattattggactacttcatgaaagggtttgagaaattattctgggacggtccaaaattaggatgtggcattgatataccccagccaactataatatctaattatttggttgatggttttattaagtgtgttgaattaactcaaaactacgaggaagcattggaaatattagacagactcaaagagaaagagccaggtgtagttacattgattgcgcgtgtcttattattgaaagatgaagagattagggcagtccaagtcatgaatgatggtgttatcagtgataaccgtgatgctgacttgttattgttacaagcacaattctgtgtggataaaaaaagatatgatttagcattgaatatttctaaacaagctgtgaaatcatcgccatctgacttcaagacctgggctatgttggtcaaggtttatactaaacttaatgatttcgagaatgccttacttactcttaactcgtgtccgatgaattcgcataaagaaaaatattacctaaaaagaattgttccgttaaaagggggtaatgacgacttacatttaccttcccccgttgatgttacattagatgaggtatccaatctacaaagtaatgaaataagttatgaacaaaggaatttagatccacagttaattaatttgccagccgctaatttgaaatcaacatttgccaaggcttatgatttattaacagaaattgtaaataaaactggctgggaagcgttattaaaataccgtgctaaggttttcgtaatggaggaagagtaccgtaaggatagaaatagtaatactaataactctagtaatggtcacacaagaaagaattctactaattctaatttgaatggcgaaactaccgtggagaatggtactgcaagcggtatggaaaatgatgcatcctccacacttgccattaaatccccaaagaaggatgatcaaacaaatattgaagatatggatgaatccttagaaaatgaattcaagaagaaaaggttatgtgaaagatggttggataacttattcatgttattatacgaagacttaagagcatacactatgtggcaggctgaatacgttcatttccaggcacaacaaatggaatacaagaaaactactttagagtgggaaatcttaggtttaattgcttatagattaaagcatttcaaagaaggttctgtagcatttgccaatgccttaagtggaagattttcagccaaatcaactagagaaatgcttagatattaccaaatggaaagagctaaaatattgtccaaaaattcaaacaatacaaataattcaaatagctcctacacacataactttacaaaggttgtgaatcaattaaatgaaaagatattggagtgttgtatcaagttattagtatggaatcacagatggtacagtgatttttcaccttcgttaataaatactcttagtgacttggttgcaaaagatggcttgatcaagattcaatcattagtgcaagcagtttattctaataatattaacgccactgcttctaatgataatggaaaccatggcatcacagatatgatggaagatgtttataatttcttcaaggaatataagatcaatggtgctgataattag

SEQ ID NO: 2484 - protein, 732 aa, Debaryomyces hansenii CBS767
MLLTTLASIPEAKEEYLDSSLIERTGRLHTFTDLGPADLCNIHKQSVTSKKNSEIGTFLYYTGVDTSNSASIAAHLQGLANLIGSRSQYWFGEKKHWKVPELTYCTYNAFSKVDMRVTVHIPGKFESSIINSDGKLIHDKVSDNESEKLWLETFVTSIVRCLIDSEDDDANKVGGLVEVRKLNPFNNGKSSKELLDYFMKGFEKLFWDGPKLGCGIDIPQPTIISNYLVDGFIKCVELTQNYEEALEILDRLKEKEPGVVTLIARVLLLKDEEIRAVQVMNDGVISDNRDADLLLLQAQFCVDKKRYDLALNISKQAVKSSPSDFKTWAMLVKVYTKLNDFENALLTLNSCPMNSHKEKYYLKRIVPLKGGNDDLHLPSPVDVTLDEVSNLQSNEISYEQRNLDPQLINLPAANLKSTFAKAYDLLTEIVNKTGWEALLKYRAKVFVMEEEYRKDRNSNTNNSSNGHTRKNSTNSNLNGETTVENGTASGMENDASSTLAIKSPKKDDQTNIEDMDESLENEFKKKRLCERWLDNLFMLLYEDLRAYTMWQAEYVHFQAQQMEYKKTTLEWEILGLIAYRLKHFKEGSVAFANALSGRFSAKSTREMLRYYQMERAKILSKNSNNTNNSNSSYTHNFTKVVNQLNEKILECCIKLLVWNHRWYSDFSPSLINTLSDLVAKDGLIKIQSLVQAVYSNNINATASNDNGNHGITDMMEDVYNFFKEYKINGADN

SEQ ID NO: 2485 - DNA, 2088 bp, Yarrowia lipolytica CLIB122
  CDS (1)..(2088)
atgccgttattcctagaaaccacggttggagagtcgctcacagctcgaaccaacgcgctggcaacgttcaaggagctgggtccccccgacctggtgcacttgaccaaggtggaccaccgaggcgagtccgggacctaccactacgttattggtgtcgacgtgtcgtctgcggcgtctgtggccgtccacctcaaccaactgacctactctcttggagaggagcagctgtggtttggcaagccccagacatggaagattacccaaggtctgctgtgttcgttcaatgccttcaccaagtgtgacgtacgaatcattgtaaagatccccggcggcgtggagtcgtactttgtggaccctcgaggcgagagacactccatgaccgaccaggtgtggctggaaacatacatgagtgccatgatccggtcgttactgtttgccgacgacgacactttcttgacgcatggctgtctcaagctgcgacctctgccgctgaagaagaagaatgtggtcaacggcgactctgacgagggcaactcgtccaagaaggacgccacttcactgcccagcttgatccccgattccgacaatgacgtctatcttggcggcgacttcttccttgacacctttgagcgtcttttcggcattgggcctctttcgggcgcctgttcagagatccaggtgcctactctcgtcagcaattatcttgttgacgcgttcatggccttcatgcgaatcacccggctgtacgacagaggtctggagattgtgcgacgtttgcagaccgagtaccccgaggtggtgtctctgattgcacgaatccagctgctgatggacgaggaggtggaagccgttaagaccatggtaaagggcttggaggagaatggccgggacgcagatctgctctccctgcaggccgagttcctgctgtccaagaaccgagaggatatggctcttggatgcgccacacgagccgtcaactctgctccctcagagtccaagctgtggacagagctggtgcaggtgtatattcgccagaaggattgggaaaacgcccttctaacgctcaactcttgtcccatgttcacataccacgagcacgaccagcatcgaatgcccgcccccgccaagagtcactaccccctgcctctggatggcattctcaaggacgtttacgaggcgtcgcaggtcgaccagaccgaggagcatgcgcagatcgaccccaagctcctgaagctacccgcccccaacctgcgggccacctttgccaaggtctacgaacatcttacggccattgttcacgagattggctgggaccagctgctggaggtgcgatcacgtgtgtttgtgatggatgaggagtacaaacgtggcggccgtagcgacaagtcgaacaaccagtctgggtctgcttctactgcggccatcccacctgcttccgccactgcctcggttgctggatctaccactgccgtcggatctgctggtctcacggcgcctgaaacctcacacgccaacgtctcgtcgacaagcgtgtctgcaccgcagttccgacacaagcgactgtgcgagcggtggctggacaatctgtttatggtgctgtacgaggatctcaaggtgtacactgtgtggcgggccgagatgctgtactcgcagagcgaaaaccggccgtttgagaaacatgcgctggagtgggagattttgggtctggttgcattccgtctgcggcattataacgaggctgttgacgcatttatgcactcgctttcggctcggttctctgcacgtgtgtgctggaagctcttgcagtactactcggacgtgtatcccgagcaggagaagcagcttgctcctcaggtgagcaagactgttgcccgggtggccgaggagcgggagattgatgtgcttgtgcggctcgtgtccttcaaccaccggtgctactcggttttctccgtcaagcttattgaggcgtaccgaaagctggtggatcgggacggcctggtcaagatccagaaccggatccgagccattttctatgatgacaagggcgtgttggagctggtcaacgaggtgttccagggaattcactag

SEQ ID NO: 2486 - protein, 695 aa, Yarrowia lipolytica CLIB122
MPLFLETTVGESLTARTNALATFKELGPPDLVHLTKVDHRGESGTYHYVIGVDVSSAASVAVHLNQLTYSLGEEQLWFGKPQTWKITQGLLCSFNAFTKCDVRIIVKIPGGVESYFVDPRGERHSMTDQVWLETYMSAMIRSLLFADDDTFLTHGCLKLRPLPLKKKNVVNGDSDEGNSSKKDATSLPSLIPDSDNDVYLGGDFFLDTFERLFGIGPLSGACSEIQVPTLVSNYLVDAFMAFMRITRLYDRGLEIVRRLQTEYPEVVSLIARIQLLMDEEVEAVKTMVKGLEENGRDADLLSLQAEFLLSKNREDMALGCATRAVNSAPSESKLWTELVQVYIRQKDWENALLTLNSCPMFTYHEHDQHRMPAPAKSHYPLPLDGILKDVYEASQVDQTEEHAQIDPKLLKLPAPNLRATFAKVYEHLTAIVHEIGWDQLLEVRSRVFVMDEEYKRGGRSDKSNNQSGSASTAAIPPASATASVAGSTTAVGSAGLTAPETSHANVSSTSVSAPQFRHKRLCERWLDNLFMVLYEDLKVYTVWRAEMLYSQSENRPFEKHALEWEILGLVAFRLRHYNEAVDAFMHSLSARFSARVCWKLLQYYSDVYPEQEKQLAPQVSKTVARVAEEREIDVLVRLVSFNHRCYSVFSVKLIEAYRKLVDRDGLVKIQNRIRAIFYDDKGVLELVNEVFQGIH

SEQ ID NO: 2487 - DNA, 2295 bp, Candida albicans SC5314
  CDS (1)..(2295): transl_table=12
atgctacctccaacattatcatcgattcctgaagttaaagaagaatatccaggtgcttgtttaattgaaagaaccgcaagattacctcaatttatagaattgggtccaccagatttatgtaacattcataaatattccgtcaatgctaaacgtgaaaatgaaattggtacatttttatatttcactggtgttgatacttcaaatacagcatcaattgctgctcatttacaaaatattgctaatttaatgactagtaaactgcaatattggtttggtgaaaaaaagcattggaaagtacctcaattgacttattgtacttttaatgccttttccaaaattgatttaagagtcactgttcatattcctggtaaatttgaaatgcaaattattggtcaagatgggaaattaataaatgataattttaatgatgaacaattggataaattatggtcagaaacttttcttacgtcgattgttagagctgttttagaaagtgaagatggtgatgacgtgaataaaattggtggattagttgaagttagaaagattaatccatttaataatggtattacatcaaaagaattattgaataatttcttactggcgtttgaactattattttttgaaggggttaaattgggttgtaatgtggaaatccctcaacctactttaattaataattatttagttgatgggtttattaaagttattcaattgactcaaagttatgatcgtggtattgaaatcttgcaaaaattacatgaaattgaaccaaatgtgatttctttaattgccaaattacaacttttaaaacaagatgaaattgaagctgttaaaaccatgaatcatggaattcaagaaaatagaagagattctgatttgttagttttacaagctgaattttgtttagaaaagaaaaaacccgaattggcattagaattggctaaacaagcagtgaaatcatcaccatcagattttaaaacttgggccatattagtacaaatttatactaaattaggagattttgaaaatgctttgttaactttaaattcatgtccaatgaattctcacaaggaaaaatattttttgaaaagagtagtaccaattaaatccaatgatgatttacatttaccttcgccaacagatgtaactttggatcaagtatctaatttacaaagtaatgaaatcagttatgaacaaagaaatttggatccttctttagttaatttaccagcagggaatttgaaatctacttttgctaaagcttatgatttattaactgaaattgttgtgaaaactggatgggaatcattattaaaatatcgtgctaaagtttttgtgatggaagaagagtatcgtaaagatcgtcaaggttctgcaactggggttaatggctcccagactcgcaagaattccacaacttcaacttcaacttcaaatgccaatggcaatggcaatggcaacggtactgaagcacaaacaccaactaataacccttcaactgcttcagcaactactgctagtactacaactccatcagattctgatgctgcctctactgtcgctatcaaatcaccaggtccatctaatgacactgaagatactacttcttctaccaatgtttcatatgatgacgagtttagaaagaaaagattatgtgaaagatggttagataatctttttatgttattatatgaagatttacgtgcttataccatgtggcaagcagaatccttacatttccaagcccaacaaatggaatataaaaagactacattggaatgggaaattttgggaagtattgcattcagattaaaacatttcaaagaaggttcaattgcatttgctaatgccttgagtgggagattttctgctaaatcacaacgtgaattattaaaatattatgtaatggaacgatctaaattattatcaaaaaattcttctaatcaaagcacaacatttattcatagttatacaaaaatgatgaatcaattgaatgaaaaaatattggaaagtattattaaattacttgtttggaatcatagatggtattctgatttttcatcatttttattgttgacattaagtgatttggttgcttgggaaggatcagtgaaaattaattcttcggtgactgcactctataatgaaaccaaaacaacaacaacttcttcatcatcatcaaccaacaataattctactgatcacattagtaatcatggtattattgaaatgatgacagatttggacaatgattatatcaaattgtataatcttcataatgctgatgaataa

SEQ ID NO: 2488 - protein, 764 aa, Candida albicans SC5314
MLPPTLSSIPEVKEEYPGACLIERTARLPQFIELGPPDLCNIHKYSVNAKRENEIGTFLYFTGVDTSNTASIAAHLQNIANLMTSKSQYWFGEKKHWKVPQLTYCTFNAFSKIDLRVTVHIPGKFEMQIIGQDGKLINDNFNDEQLDKLWSETFLTSIVRAVLESEDGDDVNKIGGLVEVRKINPFNNGITSKELLNNFLSAFELLFFEGVKLGCNVEIPQPTLINNYLVDGFIKVIQLTQSYDRGIEILQKLHEIEPNVISLIAKLQLLKQDEIEAVKTMNHGIQENRRDSDLLVLQAEFCLEKKKPELALELAKQAVKSSPSDFKTWAILVQIYTKLGDFENALLTLNSCPMNSHKEKYFLKRVVPIKSNDDLHLPSPTDVTLDQVSNLQSNEISYEQRNLDPSLVNLPAGNLKSTFAKAYDLLTEIVVKTGWESLLKYRAKVFVMEEEYRKDRQGSATGVNGSQTRKNSTTSTSTSNANGNGNGNGTEAQTPTNNPSTASATTASTTTPSDSDAASTVAIKSPGPSNDTEDTTSSTNVSYDDEFRKKRLCERWLDNLFMLLYEDLRAYTMWQAESLHFQAQQMEYKKTTLEWEILGSIAFRLKHFKEGSIAFANALSGRFSAKSQRELLKYYVMERSKLLSKNSSNQSTTFIHSYTKMMNQLNEKILESIIKLLVWNHRWYSDFSSFLLLTLSDLVAWEGSVKINSSVTALYNETKTTTTSSSSSTNNNSTDHISNHGIIEMMTDLDNDYIKLYNLHNADE

SEQ ID NO: 2489 - DNA, 2175 bp, Saccharomyces cerevisiae
  CDS (1)..(2175)
atgttgtctcaaacctccataccggaagtgaaagaagacgtgataggctatgcgctacaccagaggagagccagagtgggacaattccaagacttgggtccgcctgatttaattactttgatcaaatcgttaccttcatcctcgagcacaacaactgctactgcctccgccaacgataacggagcaacttcaaacatcaatggacaagatcctacgaccatagttacggagttacattcccatgacaaattaaaggggcagatcggcactttcttttactgtatgggtatcgatacttcggatccaacttctattacaatctttgccaaaaagataaccgatcttttcttagacacgccccaaatttggtttggtaagaagaagcactttcacgtatcgaagatttctatcagttcttggaatgcgtttaggaaatatgatgttaacattatagttcacattccaggaactgtgcaaacctacattataaatagcgacggtgaacaatcgcaacttccctccgtggcagaagcgtcatctggccgcaactcacaggatttaaacgtcaacatgatttgggcggaaacgtttatgagtggtattgtacgtgacattatgattatgaaagataatcgtgcggatggagaatcccagaatttggtagaaacactaattttcaatccatttacctcgggtgagttggaagatgttgccaataactttattaaactgttccccttggtctatgaaaaaggtgtttatttagatgcacctactcacgttttaaatccctcgttaaccaataattatttagtggaaactttagtggaaatagttaggttaactaagagtttggaagcatgtcgtaaaatgctcaagaagttaatagaaattcatccagaagcagtaataatattaattcgtgtttattttgcgtgcgatttagagatagatgcagttgacctgatcaacgagcaactaaattccccctcttcgttcttagccgacgattcaaagactagccatatccagctaatcttcaaatccgaattattaagtattcaaagtgaattcttactggatgtcaagagagattacaagcttgctaaggaagtagccatggaggctgttaactgtgcaccaaacgaatttaaaacttggtatttattgactagaatatacattaaactaaacgatatgtcaaatgccttgctatcgttaaacgcctgccccatgtcacaggttaaggaaaaatacgttcttagaagaattgcgcctattacttcagatgaaaatcttcatctgccattaccattggatgcctcaattgaggagatttcgtcattgaaccccatggatgtccagttggagcaaaagtccgcagatccaaacctagtcaatctctctgcgtcaagtttaaagtctactttccaactagcctataaattattgacagaaattgtccaaataacaggatgggagcagctgttgaaatatagatcaaaaattttcgttatggaagacgagtaccaaggctccacttcttccattgatgaagcagaagttcgcggtaatgatatatccaaaatgagatcaaagaggctatgcgaaagatggttggataatctcttcatgttactatacgaagatttgaaaacttacaccgattggcaatcagagcaattgtattttgatgctcaaaacagtaaatatcacaaattaactgttgaatgggaattattcggcctttgtgcgaaaagactgggacatcttccagaagctgcgaaggctttccaaattgggctttcccaaagattttctccagtatgcgcaaagaatctattacagttttacattgacgagcataagcgtattaggagggattcagtctcagcaaactccgagttaacctcttctcaaatattgtcaagtatcaatgacatcgacagctcaatcatcgatctagtagtcaagatttgttgctggaatcatcgttggtacatcgagttctcaataatattaatagatgctctgagtgttgcagtacaagatatgggcattactaaagtacataatgaaattgcctctagattttctgacccagtagcccaattgattgacgataacattctaaattttctgaagaatttcacgaatgacactttcgataattag

SEQ ID NO: 2490 - protein, 724 aa, Saccharomyces cerevisiae
MLSQTSIPEVKEDVIGYALHQRRARVGQFQDLGPPDLITLIKSLPSSSSTTTATASANDNGATSNINGQDPTTIVTELHSHDKLKGQIGTFFYCMGIDTSDPTSITIFAKKITDLFLDTPQIWFGKKKHFHVSKISISSWNAFRKYDVNIIVHIPGTVQTYIINSDGEQSQLPSVAEASSGRNSQDLNVNMIWAETFMSGIVRDIMIMKDNRADGESQNLVETLIFNPFTSGELEDVANNFIKLFPLVYEKGVYLDAPTHVLNPSLTNNYLVETLVEIVRLTKSLEACRKMLKKLIEIHPEAVIILIRVYFACDLEIDAVDLINEQLNSPSSFLADDSKTSHIQLIFKSELLSIQSEFLLDVKRDYKLAKEVAMEAVNCAPNEFKTWYLLTRIYIKLNDMSNALLSLNACPMSQVKEKYVLRRIAPITSDENLHLPLPLDASIEEISSLNPMDVQLEQKSADPNLVNLSASSLKSTFQLAYKLLTEIVQITGWEQLLKYRSKIFVMEDEYQGSTSSIDEAEVRGNDISKMRSKRLCERWLDNLFMLLYEDLKTYTDWQSEQLYFDAQNSKYHKLTVEWELFGLCAKRLGHLPEAAKAFQIGLSQRFSPVCAKNLLQFYIDEHKRIRRDSVSANSELTSSQILSSINDIDSSIIDLVVKICCWNHRWYIEFSIILIDALSVAVQDMGITKVHNEIASRFSDPVAQLIDDNILNFLKNFTNDTFDN

SEQ ID NO: 2491 - DNA, 2040 bp, Schizosaccharomyces pombe
  CDS (1)..(2040)
atgagtgattcattctttaaggatataccagagtttttagaaactcgtgtaaacgagtcattagatgcgcgttctaaatccatcgcacaatttaaagaactcgggcctcctgatcaggtcaatactataaaagttaatgcaaaaaatccatcaaaagagtggggaaaggatcaagacaagtctctctttaccaaacttttcactcctattgaaacgttaacgttttacgtattattaacctcgtcaaaggttggaacttatcactttgtatctggagttgatgcttcttcctcagcttcactagcggcatatttaaatacgctttcctattctcttgataaaagtcaacaatggtttgggaagggaaacgcttggcgtgttagtcacggagtttactgttgctacaatgtcttctctcaagttgatgttcgtgtggaagctaaaattcctggaggtgttgacacatatgctattgatgagaatgggcaaaagcatattgtcgatgctcgtatgtggacagaagcatatatgtctgaagtccttcgttcgttactttattctgatgatacaaattctcgctttgcaggacatcgtcgttttaaccccattccaaatcctgatgcagaattaagattttttgaggctgccgaacagctttttacgttaggttatactctagggtcttcttctgaagttcgggtacctacgcatgtaaataatcatttggttcgtggaattttcgcttacttgaagcaaacctgccgctacagtgctgctctaaatctttttgaaaagctccgggtgtcaattccagaggtatcggttttgcttgctgaactatacttactaatggaccatgaagtgcatgctgttcgtatcttgcatgattcattgctaaaacaaagaatgtccgctagtttgcttattgttcaagttaagtttctgatttcaaaagagcgctatgaccttgcacttatctgtgctaagcgcgccgttcatgcttctccatcagaatttgcaacttgggcatgtttggctgatgtatacttgcatttggaggattttaaatcagcgttgttagctctaaactcctgtcccatgtatacttactatgaaagagatgcttatcctttgcctcctagtgctcgtgctcatttaccatttcctgtcaattttcctaaagaagaactggaagttgaaaataatgcgcagaacggttatacagtttctaccgaaattaccgatccttacttagctcgcctaccatctcccagtcttcgtggtacatttgcgaaggcatatgaaatgctcacccttatatgtgccaaaataggttgggatgaactattgcgggttcgttcagctgtctttgtgatggaagaagaatatagatccttaaatgatattacagaaggaaacgcttctcccgatcaaaacgaagttgcagaagaaagcgttgcagaagaagttgttggtttagacaaaccagaaacatctgttggttctcttccaaaaaatgccactgttcagagtaaacgtctctgtgagcgctggctagataatctttttatggttttatatgaggatttacgtgtatttacgatttggcgcgctgaatatactcactttaaatctcaaggtctagcttacagaaaagctcctgcagaatgggaaatactaggtgaggttgcttttcggttgcatcatcgtgttgaggctgttgaagcattctgcgcttgcttggaaagtatgttttcttttaaggcctggaaaactcttttgataatttattcagaagacaataatattgagctcgttttgaccgctatcgctaaattaacactttataactaccgatggtatcaagagtattccccctttcttctggagcaaatgaaaaatcgcattatgcaagatggcgctttgaagatgaagagtatccttgcttctactagacttgatccgtatatccttaatcttatacataagctgtattttgaatgggctatcgcctttcaaattcctggccatgaattgtaa

SEQ ID NO: 2492 - protein, 679 aa, Schizosaccharomyces pombe
MSDSFFKDIPEFLETRVNESLDARSKSIAQFKELGPPDQVNTIKVNAKNPSKEWGKDQDKSLFTKLFTPIETLTFYVLLTSSKVGTYHFVSGVDASSSASLAAYLNTLSYSLDKSQQWFGKGNAWRVSHGVYCCYNVFSQVDVRVEAKIPGGVDTYAIDENGQKHIVDARMWTEAYMSEVLRSLLYSDDTNSRFAGHRRFNPIPNPDAELRFFEAAEQLFTLGYTLGSSSEVRVPTHVNNHLVRGIFAYLKQTCRYSAALNLFEKLRVSIPEVSVLLAELYLLMDHEVHAVRILHDSLLKQRMSASLLIVQVKFLISKERYDLALICAKRAVHASPSEFATWACLADVYLHLEDFKSALLALNSCPMYTYYERDAYPLPPSARAHLPFPVNFPKEELEVENNAQNGYTVSTEITDPYLARLPSPSLRGTFAKAYEMLTLICAKIGWDELLRVRSAVFVMEEEYRSLNDITEGNASPDQNEVAEESVAEEVVGLDKPETSVGSLPKNATVQSKRLCERWLDNLFMVLYEDLRVFTIWRAEYTHFKSQGLAYRKAPAEWEILGEVAFRLHHRVEAVEAFCACLESMFSFKAWKTLLIIYSEDNNIELVLTAIAKLTLYNYRWYQEYSPFLLEQMKNRIMQDGALKMKSILASTRLDPYILNLIHKLYFEWAIAFQIPGHEL

SEQ ID NO: 2493 - DNA, 25 bp, Artificial sequence
  primer
atgattacgcagaattctataccag

SEQ ID NO: 2494 - DNA, 24 bp, Artificial sequence
  primer
ttatgcatcgtagcatccaatggt

SEQ ID NO: 2495 - protein, 844 aa, Artificial sequence
  consensus sequence
  Variant (2)..(4): Xaa in position 2 to 4 is any amino acid
  Variant (6)..(11): Xaa in position 6 to 11 is any amino acid
  Variant (13)..(14): Xaa in position 13 to 14 is any amino acid
  Variant (16)..(24): Xaa in position 16 to 24 is any amino acid
  Variant (25)..(27): Xaa in position 25 to 27 is any or no amino acid
  Variant (31)..(31): Xaa in position 31 is any amino acid
  Variant (34)..(37): Xaa in position 34 to 37 is any amino acid
  Variant (39)..(45): Xaa in position 39 to 45 is any amino acid
  Variant (46)..(122): Xaa in position 46 to 122 is any or no amino acid
  Variant (125)..(126): Xaa in position 125 to 126 is any amino acid
  Variant (128)..(129): Xaa in position 128 to 129 is any amino acid
  Variant (131)..(131): Xaa in position 131 is any amino acid
  Variant (133)..(133): Xaa in position 133 is any amino acid
  Variant (135)..(137): Xaa in position 135 to 137 is any amino acid
  Variant (139)..(142): Xaa in position 139 to 142 is any amino acid
  Variant (144)..(153): Xaa in position 144 to 153 is any amino acid
  Variant (154)..(154): Xaa in position 154 is any or no amino acid
  Variant (156)..(156): Xaa in position 156 is any amino acid
  Variant (160)..(174): Xaa in position 160 to 174 is any amino acid
  Variant (176)..(176): Xaa in position 176 is any amino acid
  Variant (178)..(180): Xaa in position 178 to 180 is any amino acid
  Variant (182)..(187): Xaa in position 182 to 187 is any amino acid
  Variant (191)..(200): Xaa in position 191 to 200 is any amino acid
  Variant (202)..(210): Xaa in position 202 to 210 is any amino acid
  Variant (211)..(233): Xaa in position 211 to 233 is any or no amino acid
  Variant (235)..(235): Xaa in position 235 is any amino acid
  Variant (237)..(243): Xaa in position 237 to 243 is any amino acid
  Variant (245)..(273): Xaa in position 245 to 273 is any amino acid
  Variant (274)..(307): Xaa in position 274 to 307 is any or no amino acid
  Variant (309)..(311): Xaa in position 309 to 311 is any amino acid
  Variant (313)..(318): Xaa in position 313 to 318 is any amino acid
  Variant (320)..(331): Xaa in position 320 to 331 is any amino acid
  Variant (332)..(333): Xaa in position 332 to 333 is any or no amino acid
  Variant (335)..(337): Xaa in position 335 to 337 is any amino acid
  Variant (342)..(350): Xaa in position 342 to 350 is any amino acid
  Variant (352)..(363): Xaa in position 352 to 363 is any amino acid
  Variant (365)..(368): Xaa in position 365 to 368 is any amino acid
  Variant (369)..(369): Xaa in position 369 is any or no amino acid
  Variant (371)..(383): Xaa in position 371 to 383 is any amino acid
  Variant (385)..(385): Xaa in position 385 is any amino acid
  Variant (387)..(388): Xaa in position 387 to 388 is any amino acid
  Variant (390)..(405): Xaa in position 390 to 405 is any amino acid
  Variant (406)..(420): Xaa in position 406 to 420 is any or no amino acid
  Variant (423)..(424): Xaa in position 423 to 424 is any amino acid
  Variant (426)..(427): Xaa in position 426 to 427 is any amino acid
  Variant (429)..(436): Xaa in position 429 to 436 is any amino acid
  Variant (437)..(437): Xaa in position 437 is any or no amino acid
  Variant (440)..(445): Xaa in position 440 to 445 is any amino acid
  Variant (448)..(450): Xaa in position 448 to 450 is any amino acid
  Variant (452)..(453): Xaa in position 452 to 453 is any amino acid
  Variant (455)..(456): Xaa in position 455 to 456 is any amino acid
  Variant (458)..(459): Xaa in position 458 to 459 is any amino acid
  Variant (461)..(463): Xaa in position 461 to 463 is any amino acid
  Variant (465)..(466): Xaa in position 465 to 466 is any amino acid
  Variant (468)..(468): Xaa in position 468 is any amino acid
  Variant (470)..(471): Xaa in position 470 to 471 is any amino acid
  Variant (476)..(476): Xaa in position 476 is any amino acid
  Variant (483)..(484): Xaa in position 483 to 484 is any amino acid
  Variant (485)..(490): Xaa in position 485 to 490 is any or no amino acid
  Variant (492)..(505): Xaa in position 492 to 505 is any amino acid
  Variant (506)..(508): Xaa in position 506 to 508 is any or no amino acid
  Variant (512)..(512): Xaa in position 512 is any amino acid
  Variant (514)..(531): Xaa in position 514 to 531 is any amino acid
  Variant (532)..(533): Xaa in position 532 to 533 is any or no amino acid
  Variant (535)..(538): Xaa in position 535 to 538 is any amino acid
  Variant (541)..(541): Xaa in position 541 is any amino acid
  Variant (543)..(544): Xaa in position 543 to 544 is any amino acid
  Variant (546)..(549): Xaa in position 546 to 549 is any amino acid
  Variant (551)..(552): Xaa in position 551 to 552 is any amino acid
  Variant (555)..(557): Xaa in position 555 to 557 is any amino acid
  Variant (559)..(560): Xaa in position 559 to 560 is any amino acid
  Variant (563)..(563): Xaa in position 563 is any amino acid
  Variant (566)..(568): Xaa in position 566 to 568 is any amino acid
  Variant (571)..(572): Xaa in position 571 to 572 is any amino acid
  Variant (575)..(576): Xaa in position 575 to 576 is any amino acid
  Variant (578)..(580): Xaa in position 578 to 580 is any amino acid
  Variant (585)..(585): Xaa in position 585 is any amino acid
  Variant (588)..(608): Xaa in position 588 to 608 is any amino acid
  Variant (609)..(684): Xaa in position 609 to 684 is any or no amino acid
  Variant (698)..(698): Xaa in position 698 is any amino acid
  Variant (704)..(706): Xaa in position 704 to 706 is any amino acid
  Variant (708)..(708): Xaa in position 708 is any amino acid
  Variant (710)..(711): Xaa in position 710 to 711 is any amino acid
  Variant (713)..(718): Xaa in position 713 to 718 is any amino acid
  Variant (719)..(724): Xaa in position 719 to 724 is any or no amino acid
  Variant (726)..(727): Xaa in position 726 to 727 is any amino acid
  Variant (728)..(728): Xaa in position 728 is any or no amino acid
  Variant (732)..(733): Xaa in position 732 to 733 is any amino acid
  Variant (735)..(736): Xaa in position 735 to 736 is any amino acid
  Variant (738)..(738): Xaa in position 738 is any amino acid
  Variant (741)..(741): Xaa in position 741 is any amino acid
  Variant (743)..(744): Xaa in position 743 to 744 is any amino acid
  Variant (746)..(748): Xaa in position 746 to 748 is any amino acid
  Variant (751)..(753): Xaa in position 751 to 753 is any amino acid
  Variant (755)..(756): Xaa in position 755 to 756 is any amino acid
  Variant (760)..(765): Xaa in position 760 to 765 is any amino acid
  Variant (768)..(784): Xaa in position 768 to 784 is any amino acid
  Variant (785)..(812): Xaa in position 785 to 812 is any or no amino acid
  Variant (814)..(817): Xaa in position 814 to 817 is any amino acid
  Variant (823)..(824): Xaa in position 823 to 824 is any amino acid
  Variant (827)..(828): Xaa in position 827 to 828 is any amino acid
  Variant (830)..(840): Xaa in position 830 to 840 is any amino acid
  Variant (842)..(843): Xaa in position 842 to 843 is any amino acid
PXXXEXXXXXXLXXRXXXXXXXXXXXXLGPXDLXXXXKXXXXXXXXXXXXXXXXXXXXXXXXXXXXXXXXXXXXXXXXXXXXXXXXXXXXXXXXXXXXXXXXXXXXXXXXXXXXXXXXXXXXGTXXYXXGXDXSXXXSXXXXLXXXXXXXXXXXQXWFGXXXXXXXXXXXXXXXNXFXXXDXXXXXXIPGXXXXXXXXXXGXXXXXXXXXXXXXXXXXXXXXXXXXXXXXXXXWXEXXXXXXXRXXXXXXXXXXXXXXXXXXXXXXXXXXXXXXXXXXXXXXXXXXXXXXXXXXXXXXXXXXXXXXXFXXXFXXXXXXGXXXXXXXXXXXXXXTXXXNYLVXXXXXXXXXTXXXXXXXXXXXXLXXXXXPXXXXXXXXXXXXXDXEXXAXXXXXXXXXXXXXXXXXXXXXXXXXXXXXXXLLXXQXXFXXXXXXXXXLAXXXXXXAVXXXPXXFXXWXXLXXXYXXLXDXXNALLXLNSCPMXXXXXXXXYXXXXXXXXXXXXXXXXXHLPXPXXXXXXXXXXXXXXXXXXXXEXXXXDPXLXXLXXXXLXXTFXXXYXXLTXIVXXXGWXXLLXXRXXXFVMEXEYXXXXXXXXXXXXXXXXXXXXXXXXXXXXXXXXXXXXXXXXXXXXXXXXXXXXXXXXXXXXXXXXXXXXXXXXXXXXXXXXXXXXXXXXXXXXXXXXXKRLCERWLDNLFMXLYEDLXXXTXWXXEXXXXXXXXXXXXKXXXEWEXXGXXAXRLXHXXEXXXAFXXXLXXRFSXXXXXXLLXXXXXXXXXXXXXXXXXXXXXXXXXXXXXXXXXXXXXXXXXXXXXKXXXXNHRWYXXFSXXLXXXXXXXXXXXGXXK

SEQ ID NO: 2496 - protein, 26 aa, Artificial sequence
  protein pattern
  Variant (6)..(6): Xaa in position 6 is Phe or Leu
  Variant (12)..(12): Xaa in position 12 is Leu or Val
  Variant (15)..(15): Xaa in position 15 is Asp or Glu
  Variant (18)..(18): Xaa in position 18 is Lys or Arg
  Variant (19)..(19): Xaa in position 19 is any amino acid
  Variant (20)..(20): Xaa in position 20 is Phe, His or Tyr
  Variant (21)..(21): Xaa in position 21 is Ser or Thr
  Variant (22)..(22): Xaa in position 22 is any amino acid
  Variant (24)..(24): Xaa in position 24 is Gln or Arg
  Variant (25)..(25): Xaa in position 25 is Ala, Ser or Thr
  Variant (26)..(26): Xaa in position 26 is Glu or Asn
LCERWXDNLFMXLYXDLXXXXXWXXX

SEQ ID NO: 2497 - protein, 55 aa, Artificial sequence
  protein pattern
  Variant (2)..(3): Xaa in position 2 to 3 is any amino acid
  Variant (4)..(6): Xaa in position 4 to 6 is any or no amino acid
  Variant (9)..(9): Xaa in position 9 is any amino acid
  Variant (11)..(13): Xaa in position 11 to 13 is any amino acid
  Variant (14)..(14): Xaa in position 14 is Ala, Pro or Ser
  Variant (15)..(15): Xaa in position 15 is Ala or Ser
  Variant (16)..(16): Xaa in position 16 is any amino acid
  Variant (17)..(17): Xaa in position 17 is Asn or Ser
  Variant (19)..(19): Xaa in position 19 is Lys or Arg
  Variant (20)..(20): Xaa in position 20 is Ala, Gly or Ser
  Variant (22)..(22): Xaa in position 22 is Phe or Tyr
  Variant (23)..(24): Xaa in position 23 to 24 is any amino acid
  Variant (25)..(25): Xaa in position 25 is Ala or Val
  Variant (27)..(27): Xaa in position 27 is Asp, Glu, Lys or Arg
  Variant (28)..(28): Xaa in position 28 is any amino acid
  Variant (31)..(31): Xaa in position 31 is any amino acid
  Variant (33)..(33): Xaa in position 33 is Cys or Val
  Variant (34)..(36): Xaa in position 34 to 36 is any amino acid
  Variant (39)..(39): Xaa in position 39 is Asp or Glu
  Variant (40)..(40): Xaa in position 40 is Ala, Glu, Asn, Gln, Ser or Thr
  Variant (43)..(43): Xaa in position 43 is Glu, Lys or Arg
  Variant (44)..(44): Xaa in position 44 is any amino acid
  Variant (46)..(46): Xaa in position 46 is Ala or Ser
  Variant (47)..(47): Xaa in position 47 is any amino acid
  Variant (48)..(48): Xaa in position 48 is Ile or Val
  Variant (52)..(53): Xaa in position 52 to 53 is Asp or Glu
EXXXXXDPXLXXXXXXXLXXTXXXXYXXLTXIXXXXGWXXLLXXRXXXFVMXXEY

SEQ ID NO: 2498 - protein, 51 aa, Artificial sequence
  protein pattern
  Variant (2)..(6): Xaa in position 2 to 6 is any amino acid
  Variant (7)..(8): Xaa in position 7 to 8 is any or no amino acid
  Variant (11)..(12): Xaa in position 11 to 12 is any amino acid
  Variant (13)..(13): Xaa in position 13 is Ala or Ser
  Variant (15)..(15): Xaa in position 15 is Asn or Ser
  Variant (16)..(16): Xaa in position 16 is Asp or Glu
  Variant (17)..(19): Xaa in position 17 to 19 is any amino acid
  Variant (21)..(22): Xaa in position 21 to 22 is any amino acid
  Variant (24)..(24): Xaa in position 24 is Ala, Ser, Thr or Val
  Variant (25)..(25): Xaa in position 25 is any amino acid
  Variant (26)..(26): Xaa in position 26 is Ile or Val
  Variant (28)..(28): Xaa in position 28 is any amino acid
  Variant (29)..(29): Xaa in position 29 is His, Lys or Arg
  Variant (30)..(31): Xaa in position 30 to 31 is any amino acid
  Variant (33)..(34): Xaa in position 33 to 34 is any amino acid
  Variant (35)..(35): Xaa in position 35 is Asn or Ser
  Variant (39)..(39): Xaa in position 39 is any amino acid
  Variant (42)..(42): Xaa in position 42 is Ala or Ser
  Variant (46)..(46): Xaa in position 46 is any amino acid
  Variant (47)..(47): Xaa in position 47 is Pro, Gln, Ser or Thr
  Variant (48)..(49): Xaa in position 48 to 49 is any amino acid
  Variant (51)..(51): Xaa in position 51 is His, Lys or Arg
LXXXXXXXAVXXXPXXXXXWXXLXXXYXXXXDXXXALLXLNXCPMXXXXEX

SEQ ID NO: 2499 - protein, 41 aa, Artificial sequence
  protein pattern
  Variant (2)..(2): Xaa in position 2 is any amino acid
  Variant (6)..(6): Xaa in position 6 is Glu, Lys or Arg
  Variant (7)..(9): Xaa in position 7 to 9 is any amino acid
  Variant (10)..(10): Xaa in position 10 is Phe or Trp
  Variant (11)..(11): Xaa in position 11 is any amino acid
  Variant (12)..(12): Xaa in position 12 is Ile or Val
  Variant (13)..(13): Xaa in position 13 is Ala, Pro, Ser or Thr
  Variant (14)..(14): Xaa in position 14 is any amino acid
  Variant (15)..(15): Xaa in position 15 is Gly, Ile or Leu
  Variant (16)..(17): Xaa in position 16 to 17 is any amino acid
  Variant (18)..(18): Xaa in position 18 is Cys or Ser
  Variant (19)..(19): Xaa in position 19 is Cys, Ser or Thr
  Variant (20)..(20): Xaa in position 20 is Phe, Trp or Tyr
  Variant (22)..(22): Xaa in position 22 is Ala, Ile or Val
  Variant (24)..(26): Xaa in position 24 to 26 is any amino acid
  Variant (28)..(29): Xaa in position 28 to 29 is any amino acid
  Variant (30)..(31): Xaa in position 30 to 31 is any or no amino acid
  Variant (33)..(33): Xaa in position 33 is any amino acid
  Variant (34)..(35): Xaa in position 34 to 35 is any or no amino acid
  Variant (39)..(39): Xaa in position 39 is any amino acid
  Variant (40)..(40): Xaa in position 40 is Phe, Ile or Val
  Variant (41)..(41): Xaa in position 41 is Asp, Glu or Gln
QXWFGXXXXXXXXXXXXXXXNXFXXXDXXXXVXXXIPGXXX

SEQ ID NO: 2500 - protein, 37 aa, Artificial sequence
  protein pattern
  Variant (2)..(2): Xaa in position 2 is any amino acid
  Variant (3)..(4): Xaa in position 3 to 4 is any or no amino acid
  Variant (7)..(7): Xaa in position 7 is Ala, Ile or Leu
  Variant (8)..(8): Xaa in position 8 is Phe, Ile or Leu
  Variant (10)..(11): Xaa in position 10 to 11 is any amino acid
  Variant (12)..(12): Xaa in position 12 is Ala or Cys
  Variant (13)..(13): Xaa in position 13 is any amino acid
  Variant (16)..(19): Xaa in position 16 to 19 is any amino acid
  Variant (20)..(20): Xaa in position 20 is Glu or Ser
  Variant (21)..(21): Xaa in position 21 is Ala or Gly
  Variant (22)..(23): Xaa in position 22 to 23 is any amino acid
  Variant (26)..(27): Xaa in position 26 to 27 is any amino acid
  Variant (28)..(28): Xaa in position 28 is Ala, Gly or Ser
  Variant (30)..(30): Xaa in position 30 is Gln or Ser
  Variant (31)..(31): Xaa in position 31 is any amino acid
  Variant (34)..(34): Xaa in position 34 is Ala or Ser
  Variant (35)..(35): Xaa in position 35 is Ala, Pro or Ser
  Variant (36)..(36): Xaa in position 36 is any amino acid
  Variant (37)..(37): Xaa in position 37 is Cys, Ser or Val
LXXXWEXXGXXXXRLXXXXXXXXAFXXXLXXRFXXXX

SEQ ID NO: 2501 - protein, 29 aa, Artificial sequence
  protein pattern
  Variant (2)..(2): Xaa in position 2 is Ile or Leu
  Variant (3)..(4): Xaa in position 3 to 4 is any amino acid
  Variant (5)..(5): Xaa in position 5 is Trp or Tyr
  Variant (6)..(6): Xaa in position 6 is Asn or Ser
  Variant (7)..(7): Xaa in position 7 is His or Tyr
  Variant (11)..(12): Xaa in position 11 to 12 is any amino acid
  Variant (13)..(15): Xaa in position 13 to 15 is any or no amino acid
  Variant (17)..(20): Xaa in position 17 to 20 is any amino acid
  Variant (21)..(21): Xaa in position 21 is Ile, Leu or Met
  Variant (22)..(22): Xaa in position 22 is any amino acid
  Variant (23)..(23): Xaa in position 23 is Ala, Cys, Asp, Asn or Thr
  Variant (24)..(28): Xaa in position 24 to 28 is any amino acid
  Variant (29)..(29): Xaa in position 29 is Ala, Glu, Gly or Gln
KXXXXXXRWYXXXXXFXXXXXXXXXXXXX

SEQ ID NO: 2502 - protein, 25 aa, Artificial sequence
  protein pattern
  Variant (3)..(3): Xaa in position 3 is Phe or Tyr
  Variant (4)..(4): Xaa in position 4 is any amino acid
  Variant (5)..(5): Xaa in position 5 is Phe or Tyr
  Variant (6)..(7): Xaa in position 6 to 7 is any amino acid
  Variant (9)..(9): Xaa in position 9 is Ile or Val
  Variant (11)..(11): Xaa in position 11 is Ala, Thr or Val
  Variant (13)..(13): Xaa in position 13 is Asp, Gly, Asn or Ser
  Variant (14)..(14): Xaa in position 14 is Ala, Pro, Ser or Thr
  Variant (15)..(15): Xaa in position 15 is Ala or Thr
  Variant (17)..(17): Xaa in position 17 is Ile, Leu or Val
  Variant (18)..(18): Xaa in position 18 is Ala, Ser or Thr
  Variant (19)..(19): Xaa in position 19 is Ala, Ile or Val
  Variant (20)..(20): Xaa in position 20 is any amino acid
  Variant (21)..(21): Xaa in position 21 is Ala or Leu
  Variant (22)..(23): Xaa in position 22 to 23 is any amino acid
  Variant (24)..(24): Xaa in position 24 is Ile or Leu
  Variant (25)..(25): Xaa in position 25 is Ala, Ser or Thr
GTXXXXXGXDXSXXXSXXXXXXXXX

SEQ ID NO: 2503 - protein, 31 aa, Artificial sequence
  protein pattern
  Variant (2)..(9): Xaa in position 2 to 9 is any amino acid
  Variant (10)..(10): Xaa in position 10 is Ile, Pro or Val
  Variant (11)..(12): Xaa in position 11 to 12 is any amino acid
  Variant (13)..(13): Xaa in position 13 is Leu, Pro or Val
  Variant (15)..(17): Xaa in position 15 to 17 is any or no amino acid
  Variant (19)..(19): Xaa in position 19 is His or Tyr
  Variant (22)..(22): Xaa in position 22 is Asp, Glu or Arg
  Variant (23)..(23): Xaa in position 23 is Ala, Gly or Thr
  Variant (24)..(24): Xaa in position 24 is Phe, Ile or Leu
  Variant (25)..(27): Xaa in position 25 to 27 is any amino acid
  Variant (28)..(28): Xaa in position 28 is Ile, Leu, Met or Val
  Variant (29)..(30): Xaa in position 29 to 30 is any amino acid
GXXXXXXXXXXXXTXXXNXLVXXXXXXXXXT

SEQ ID NO: 2504 - protein, 29 aa, Artificial sequence
  protein pattern
  Variant (2)..(4): Xaa in position 2 to 4 is any amino acid
  Variant (6)..(6): Xaa in position 6 is Asp, Glu or Thr
  Variant (7)..(7): Xaa in position 7 is any amino acid
  Variant (8)..(8): Xaa in position 8 is Ile, Leu, Pro or Val
  Variant (9)..(9): Xaa in position 9 is Asp, Gly or Asn
  Variant (10)..(10): Xaa in position 10 is any amino acid
  Variant (11)..(11): Xaa in position 11 is Ala, Cys or Ser
  Variant (13)..(13): Xaa in position 13 is any amino acid
  Variant (14)..(14): Xaa in position 14 is Ala, Glu or Gln
  Variant (16)..(18): Xaa in position 16 to 18 is any amino acid
  Variant (19)..(24): Xaa in position 19 to 24 is any or no amino acid
  Variant (28)..(28): Xaa in position 28 is Ala or Pro
PXXXEXXXXXXLXXRXXXXXXXXXLGPXD

SEQ ID NO: 2505 - protein, 20 aa, Artificial sequence
  protein pattern
  Variant (2)..(2): Xaa in position 2 is any amino acid
  Variant (4)..(6): Xaa in position 4 to 6 is any amino acid
  Variant (7)..(7): Xaa in position 7 is any or no amino acid
  Variant (9)..(10): Xaa in position 9 to 10 is any amino acid
  Variant (11)..(11): Xaa in position 11 is any or no amino acid
  Variant (13)..(13): Xaa in position 13 is Cys, Asp or Ser
  Variant (14)..(14): Xaa in position 14 is Ile or Leu
  Variant (15)..(15): Xaa in position 15 is Ile, Leu or Met
  Variant (16)..(18): Xaa in position 16 to 18 is any amino acid
  Variant (19)..(19): Xaa in position 19 is Asp or Glu
  Variant (20)..(20): Xaa in position 20 is Asp, Asn or Thr
WXEXXXXSXXXRXXXXXXXX

SEQ ID NO: 2506 - protein, 28 aa, Artificial sequence
  protein pattern
  Variant (2)..(2): Xaa in position 2 is any amino acid
  Variant (3)..(3): Xaa in position 3 is Ala or Val
  Variant (4)..(5): Xaa in position 4 to 5 is any amino acid
  Variant (6)..(6): Xaa in position 6 is Ile, Leu or Val
  Variant (7)..(7): Xaa in position 7 is Ile or Leu
  Variant (8)..(8): Xaa in position 8 is Ala or Ile
  Variant (9)..(9): Xaa in position 9 is Glu, Lys or Arg
  Variant (10)..(10): Xaa in position 10 is Ile, Leu or Val
  Variant (11)..(11): Xaa in position 11 is any amino acid
  Variant (12)..(12): Xaa in position 12 is Phe, Leu or Met
  Variant (13)..(14): Xaa in position 13 to 14 is any amino acid
  Variant (16)..(16): Xaa in position 16 is any amino acid
  Variant (18)..(18): Xaa in position 18 is Ile, Leu or Val
  Variant (19)..(19): Xaa in position 19 is Asp, Glu, His or Arg
  Variant (20)..(20): Xaa in position 20 is Ala or Gly
  Variant (21)..(21): Xaa in position 21 is Ile or Val
  Variant (22)..(25): Xaa in position 22 to 25 is any amino acid
  Variant (26)..(26): Xaa in position 26 is Asp, Glu, Lys or Arg
  Variant (27)..(27): Xaa in position 27 is any amino acid
  Variant (28)..(28): Xaa in position 28 is Leu or Val
PXXXXXXXXXXXXXDXEXXXXXXXXXXX

SEQ ID NO: 2507 - DNA, 483 bp, Saccharomyces cerevisiae
  CDS (1)..(483)
atgggtaaatcacatggttacagatctcgtacacgttacatgttccaacgtgacttcagaaagcatggtgccgttcacatgtccacctacttgaagatctacaaggttggtgacattgtcgacatcaaagccaatggttctatccaaaagggtatgccacacaagttctaccaaggtaagaccggtgtcgtctacaacgttaccaagtcttctgttggtgttatcatcaacaagatggtcggtaacagatacttggaaaagagattgaacttgagagttgaacacatcaagcactctaaatgtagacaagaatttttggaaagagttaaggccaatgctgctaagcgtgctgaagccaaggcccaaggtgttgctgtccaattgaagagacaaccagctcaaccaagagaatcccgtattgtctctactgaaggtaacgttcctcaaactttagctccagttccatacgaaaccttcatttaa

SEQ ID NO: 2508 - protein, 160 aa, Saccharomyces cerevisiae
MGKSHGYRSRTRYMFQRDFRKHGAVHMSTYLKIYKVGDIVDIKANGSIQKGMPHKFYQGKTGVVYNVTKSSVGVIINKMVGNRYLEKRLNLRVEHIKHSKCRQEFLERVKANAAKRAEAKAQGVAVQLKRQPAQPRESRIVSTEGNVPQTLAPVPYETFI

SEQ ID NO: 2509 - DNA, 566 bp, Triticum aestivum
  CDS (7)..(489)
  misc_feature (3)..(3): n is a, g, c or t
gtnaggatgcctcactccttcggttaccgagcgcgcacgcgtcacatgttctctagggacttcaggaacaagggtgtgatccccatgtccacctacctgactacctacaaggtcggagacattgtcgacatcaaggccaacgccgctgagcagaagggtatgccccacaagttctaccacggtaagaccggtgtcgtctacaacgtctctccccgaggtgttggagtcatcgtcttcaaggtcgttggcaaccgatacatggagaagcgagtcaacctccgaatcgagcacgtcaagcactccaagtgccgacaggagttcgtcgctcgagtcaagaggaacgccgccctcaagaaggaggccaaggagaagggagagaaggtccagctcaagcgaatccccgctcagccccgagaggcccaccacctctccctcaagggcaacgccccccagaccgttgctcccctcgcttacgagacttacatctaaacgaaacccccatttaccacccttcttgttggcaatggatttcggctcgatatggcatgatgcaaccaaaaaaaaaa

SEQ ID NO: 2510 - protein, 160 aa, Triticum aestivum
MPHSFGYRARTRHMFSRDFRNKGVIPMSTYLTTYKVGDIVDIKANAAEQKGMPHKFYHGKTGVVYNVSPRGVGVIVFKVVGNRYMEKRVNLRIEHVKHSKCRQEFVARVKRNAALKKEAKEKGEKVQLKRIPAQPREAHHLSLKGNAPQTVAPLAYETYI

SEQ ID NO: 2511 - DNA, 769 bp, Sorghum bicolor
  CDS (58)..(540)
  misc_feature (1)..(1): n is a, g, c or t
nctgcgatcaacttcagatttccgccctacgaacactccagcccacactcacacacaatgggtcacgcagccggtctccgcgcgggtacgcgctatgctttctcgagagacttcaagaagaagggtatgatccctctctcgacctacctcaagcagtacaaggtcggtgatatcgtcgatgtcgtagccaacggtgcggtccagaagggtatgccctacaaggtctaccacggcaagaccggtatcgtctacaacgtcaccaagtccgctgtcggtgtcatcctccagaagcaggtcggcaaccgatacatggagaagcgcatcaacgtccgcatcgagcacgtccgccactcccgctcacgagaggacttcctcaagcgcgtcaagctcaacttcgccaagcaacaaaaggccaaggagactggcgagccccagcagatgaagcgccagcccgcccagccccgcaccgagcacattgtcagcctcaaggagcaaaagccggagaacatcacacccatcccttacgagacctacatttagacgtggacagttggctcgggtgtattggctggcaaaatgggatacggatggtcaacggcgtggtttctcggacttctcgattattctctctttctgcactttcttacgcatggaaagcggcgataccatggtgcagatatagtggtgtgccaacatgggttttgagtgaccccctccgcccataaacatcatcttcccatcctaaaaaaaaaaaaaaattgcctctagg

SEQ ID NO: 2512 - protein, 160 aa, Sorghum bicolor
MGHAAGLRAGTRYAFSRDFKKKGMIPLSTYLKQYKVGDIVDVVANGAVQKGMPYKVYHGKTGIVYNVTKSAVGVILQKQVGNRYMEKRINVRIEHVRHSRSREDFLKRVKLNFAKQQKAKETGEPQQMKRQPAQPRTEHIVSLKEQKPENITPIPYETYI

SEQ ID NO: 2513 - DNA, 495 bp, Glycine max
  CDS (1)..(495)
atgccggctggtcatggtttgagatcccgcaccagagattccttctctcgtcctttcaggaagaagggaaccatcgccctcaccacatacctgagaacctaccacgtcggcgactatgttgacgtcaaggttaacggtgccgttcacaagggaatgccccacaaattctaccatggccgcaccggacgcgtctggaatgtcaccaaacgtgctgttggcgtcgaagtcaacaagcaggttggcaacagaattataaggaagaggattcatgtgcgggtagagcatgttatgccttcaaggtgcactgaggagttccgcctcaggaagattaagaatgatcagctaaaggccgaagccaaggtcaagggtgagaagatcagcaccaagagacagcctcagggtcccaaacccggtttcatggtggagggtgcgacccttgagacagttacccccatcccatatgatgttgtcaatgacctcaagggaggttattag

SEQ ID NO: 2514 - protein, 164 aa, Glycine max
MPAGHGLRSRTRDSFSRPFRKKGTIALTTYLRTYHVGDYVDVKVNGAVHKGMPHKFYHGRTGRVWNVTKRAVGVEVNKQVGNRIIRKRIHVRVEHVMPSRCTEEFRLRKIKNDQLKAEAKVKGEKISTKRQPQGPKPGFMVEGATLETVTPIPYDVVNDLKGGY

SEQ ID NO: 2515 - DNA, 745 bp, Glycine max
  CDS (67)..(561)
aaaaaaaagagtgatccttctacactaactaaagccgagcagcgagagagagaaaccctagcaaaaatgccggctggtcacggtttgagatcccgcaccagagattccttctctcgtcccttcaggaagaagggtaccatcgccctcaccacatacctcagaacctaccacgtcggcgattatgtcgacgtcaaggttaacggcgccgtccacaagggaatgcctcacaagttctaccatggccgcaccggtcgcgtctggaatgtcaccaaacgtgctgttggggtcgaagtcaacaagcaggtcggcaacagaatcataaggaagaggattcacgtgcgtgtggagcatgttatgccatcaaggtgcactgaggagttccgccttaggaagatcaagaatgatcagctcaaggctgaggccaaggccaagggtgagaagatcagcaccaagagacagcctcagggtcccaaacctggtttcatggtcgagggggcaacgttggagacagttacccctattccctatgatgtcgtcaatgacctcaagggaggttattagtttcattctcgttgttggtctgcgtagttttttgtttggggattattagtccttttttgtgttggaagagaaacaattcagactattaaaatatttttgttgttttatttgatgttctaaatacatggatatgtttttgtttcgctcgtcataaatgtgctttttctcaaaaaaaaaaaaaaaa

SEQ ID NO: 2516 - protein, 164 aa, Glycine max
MPAGHGLRSRTRDSFSRPFRKKGTIALTTYLRTYHVGDYVDVKVNGAVHKGMPHKFYHGRTGRVWNVTKRAVGVEVNKQVGNRIIRKRIHVRVEHVMPSRCTEEFRLRKIKNDQLKAEAKAKGEKISTKRQPQGPKPGFMVEGATLETVTPIPYDVVNDLKGGY

SEQ ID NO: 2517 - DNA, 480 bp, Bombyx mori
  CDS (1)..(480)
atgacgaactccaagggttaccgccgcggcaccagggacttgttcgctcgcaggttccgcacacatggaactattccgctctccacgtacatgaaagtgtacaaagttggagacattgtagacatcagaggcaatggtgcagttcaaaagggtatgccacacaaagtataccatggaaagacaggtcgcgtgtacaacgtgactgctcatgctctcggtgtgattgtcaacaagcgtgttcgcggaaggattataccgaagcgcatcaatatccgtgttgagcatgtcaagcactccaagtgcagacaagacttccttaagagagtcaaagagaatgagaggctactgaaggaagccaaggctgccggcaagaccgtcaacctgaagagacagccagctccccctaaagctgcccacatcgtcagtggaactgagaaacccgtcttacttgcgcctatcccatacgaattcgtagcgtaa

SEQ ID NO: 2518 - protein, 159 aa, Bombyx mori
MTNSKGYRRGTRDLFARRFRTHGTIPLSTYMKVYKVGDIVDIRGNGAVQKGMPHKVYHGKTGRVYNVTAHALGVIVNKRVRGRIIPKRINIRVEHVKHSKCRQDFLKRVKENERLLKEAKAAGKTVNLKRQPAPPKAAHIVSGTEKPVLLAPIPYEFVA

SEQ ID NO: 2519 - DNA, 480 bp, Drosophila melanogaster
  CDS (1)..(480)
atgaccaactcaaagggctatcgtcgcggcacacgggacatgttttcccgtcccttccgaaagcatggagttattccgttgtccacatacatgcgggttttcaagatcggcgacatcgttgacattaagggacatggtgctgtacagaagggtttgccctataaggcatatcatggcaaaaccgggcgcatattcaatgtgactcagcacgccgttggtgtaatagtaaacaaacgcgtaagaggcaaaatccttgctaagcgggtcaatgtgcgcattgagcacatccaccactccaagtgccgcgaagattttttgcgccgcgtaaaggaaaatgagcgattgctgaaggaggcgaaggaaaagggacaatgggtcagtctgaagcgccagccggaacagccgaagaaggcgcactttgttaagaaacttgaagaaccgattgctctggccccgattccatacgaattcattgcctaa

SEQ ID NO: 2520 - protein, 159 aa, Drosophila melanogaster
MTNSKGYRRGTRDMFSRPFRKHGVIPLSTYMRVFKIGDIVDIKGHGAVQKGLPYKAYHGKTGRIFNVTQHAVGVIVNKRVRGKILAKRVNVRIEHIHHSKCREDFLRRVKENERLLKEAKEKGQWVSLKRQPEQPKKAHFVKKLEEPIALAPIPYEFIA

SEQ ID NO: 2521 - DNA, 480 bp, Apis mellifera
  CDS (1)..(480)
atgacgaattcaaagggatatcgtcgaggaacaagggatttattttcccgaaaattccgtaaacatggaacaattccattatccacgtatatgaaagtatataaagtaggcgatatagttgatattaaaggtaacggagcagtgcaaaagggaatgccttataaagtttatcatggcaaaactggacgtgtatttaatgtaactccccatgctcttggtgtcattgttaataaaagagtacgtggacgaattattgcaaaaagaataaatgttcgtattgaacatttaactcattctaaatgtagagaagattttttgaaacgagtaaaagaaaatgaaagactcagaaaagaagcaaaggaaaaaaacattaaagtacaattgaaaagacaacctgctgaaccaatgcctgcacatattgtatcaggacgtgaaaatcctatttcacttgcacctataccctatgaatttattgcttaa

SEQ ID NO: 2522 - protein, 159 aa, Apis mellifera
MTNSKGYRRGTRDLFSRKFRKHGTIPLSTYMKVYKVGDIVDIKGNGAVQKGMPYKVYHGKTGRVFNVTPHALGVIVNKRVRGRIIAKRINVRIEHLTHSKCREDFLKRVKENERLRKEAKEKNIKVQLKRQPAEPMPAHIVSGRENPISLAPIPYEFIA

SEQ ID NO: 2523 - DNA, 489 bp, Strongylocentrotus purpuratus
  CDS (1)..(489)
atggtgaagacaaacaccacaggttaccgccgcggtacgcggtacatgttctctagggccttcaagaccaatggagtagaaaagctgtcaaccttcctgagggtgtacaagcgtggcgactatgtcgacatcaagggttgtggagccttccagaagggtatgccgtacaaggtataccatggacgtactggtcgtgtcttcaacgtcaccccccatgccgttggtgtggttgtgaacaagcaagtcagggatcgcgtcctgcccaagcgtatcaatgttcgcattgagcacatcaaggcatccaagagtcgagagggattcttggagaggaggagaaccaacgacatcctcaagaagcaagccaaggagaagggtgaattctaccagctcaagagacagcccacccagccaaggaaggctcactttgttagtgccaagaacaatgctccccaactgattgagcccatcccatacgagttcattgcatag

SEQ ID NO: 2524 - protein, 162 aa, Strongylocentrotus purpuratus
MVKTNTTGYRRGTRYMFSRAFKTNGVEKLSTFLRVYKRGDYVDIKGCGAFQKGMPYKVYHGRTGRVFNVTPHAVGVVVNKQVRDRVLPKRINVRIEHIKASKSREGFLERRRTNDILKKQAKEKGEFYQLKRQPTQPRKAHFVSAKNNAPQLIEPIPYEFIA

SEQ ID NO: 2525 - DNA, 480 bp, Nasonia vitripennis
  CDS (1)..(480)
atgacgaactccaagggttaccgcagaggtacgcgagacctgttctcgcgcaaattccgcaagagcggaactttgcccctgtctacgtacatgaaagtgtacaaggtcggcgacatcgttgacattaaaggtaatggagctgtccagaagggtatgccttacaaagtctaccatggaaagactggacgtgtcttcaatgtgacacagcatgctcttggagtcatcgtcaacaagagagtgcgtggacgcatcattgccaagcgcatcaatgtacgtatcgagcacttgaaccactccaagtgccgtgaggatttcatccagagagtcaagaagaacgaggctctgaggaaggaagccaaagagaagaaggtgaagatcagtctgaagagacagcctgcgcagcccagaccagcgcacattgtcaaaggaaaggaagcacctcaacttcttgcgccaattccttatgaatttatcgcttaa

SEQ ID NO: 2526 - protein, 159 aa, Nasonia vitripennis
MTNSKGYRRGTRDLFSRKFRKSGTLPLSTYMKVYKVGDIVDIKGNGAVQKGMPYKVYHGKTGRVFNVTQHALGVIVNKRVRGRIIAKRINVRIEHLNHSKCREDFIQRVKKNEALRKEAKEKKVKISLKRQPAQPRPAHIVKGKEAPQLLAPIPYEFIA

SEQ ID NO: 2527 - DNA, 486 bp, Aedes aegypti
  CDS (1)..(486)
atgaccaactcgaagggttatcgtcgtggtaccagggacatgttctcccgccccttcaggaagcacggaaccatccccctgtctacctacctgaaggtctacaaagccggagactacgtggacattaagggacacggtgccgtccacaagggtatgccctacaaggcatatcacggcaagactggccgcgtatacaacgtcaccaagcacgctctcggtgtcatcgtgaacaagcgtgtccgcggaaagatcctagccaagcgcatcaacgtccgcatcgagcatgtgaagccatcgcgctgccgtgaggatttcctgcgccgcgtcaaggaaaacgacgccgcccgccacgagctgaagacgaagaacccgaaggccaagatctgcttgaagcgcaagccacaagcacctcgcggcgagcaggtcatcgtgaacccaccggagcctgtcttcctggctccgatcccgtatgagttcgtagcataa

SEQ ID NO: 2528 - protein, 161 aa, Aedes aegypti
MTNSKGYRRGTRDMFSRPFRKHGTIPLSTYLKVYKAGDYVDIKGHGAVHKGMPYKAYHGKTGRVYNVTKHALGVIVNKRVRGKILAKRINVRIEHVKPSRCREDFLRRVKENDAARHELKTKNPKAKICLKRKPQAPRGEQVIVNPPEPVFLAPIPYEFVA

SEQ ID NO: 2529 - DNA, 492 bp, Chlamydomonas reinhardtii
  CDS (1)..(492)
atgcccggtggccaaggtctgcgcgcccgcacgcggcacatgtttgcccgcggcttccgccagaagggcttcatcccgctgacgacttacctgcgcacctacaagctcggggacatggtggacatcaaggtcaacggtgccatccacaagggcatgccccacaagtggtaccagggcaagaccggtaccgtctggaacgtcaccaagcgcgccatcggtgtggaggtcaacaagcgggttggccaccgcatcatgaagaagcgcatccacgtgcgtgtcgagcacatcgtgccctctcgctgccgtgaggagttcctgacccgccgcgcgtccaacgacgcggccaaggcggccgccaaggccaagggcgagcccgtccccaagaccaagcgtgtgcccgctggcccccgcgacggcttcgagctgatccccgccaaggtggagaccatcgccgccatcccctacgacatcatcaaggagggcctggtataa

SEQ ID NO: 2530 - protein, 163 aa, Chlamydomonas reinhardtii
MPGGQGLRARTRHMFARGFRQKGFIPLTTYLRTYKLGDMVDIKVNGAIHKGMPHKWYQGKTGTVWNVTKRAIGVEVNKRVGHRIMKKRIHVRVEHIVPSRCREEFLTRRASNDAAKAAAKAKGEPVPKTKRVPAGPRDGFELIPAKVETIAAIPYDIIKEGLV

SEQ ID NO: 2531 - DNA, 495 bp, Physcomitrella patens subsp. patens
  CDS (1)..(495)
atgccggctggtcatgggcttcgatctcgcactagagacttgttctctcgacctttcaggcacaaaggttacatccccttgacgacctacctgcgtaccttcaaggttggccagtatgtggacatcaaggtgaacggagccgtccacaagggtatgcctcacaagttctaccacgggcgcaccggcatcgtctggaacgtcaccaagcgtgccgtcggtgtcgtgatgaacaagcaggtcggaaacaggatcatccagaagcgtcttcatgtgcgtattgagcacgtgcagccttcacgctgccgggaagaatttcttgagcgtcgcaagagcaatgacgtcaagaaggctgaggccaaggctaggggcgaaacggtgaaccttaagcgtcagcctgctggtcctagggctggattcgttctcgattcctcaaccctagagactgtgactcccattccgtacgatgtcgtcaacgatctcaagggaggttattaa

SEQ ID NO: 2532 - protein, 164 aa, Physcomitrella patens subsp. patens
MPAGHGLRSRTRDLFSRPFRHKGYIPLTTYLRTFKVGQYVDIKVNGAVHKGMPHKFYHGRTGIVWNVTKRAVGVVMNKQVGNRIIQKRLHVRIEHVQPSRCREEFLERRKSNDVKKAEAKARGETVNLKRQPAGPRAGFVLDSSTLETVTPIPYDVVNDLKGGY

SEQ ID NO: 2533 - DNA, 495 bp, Physcomitrella patens subsp. patens
  CDS (1)..(495)
atgccggccggacacgggctgcgatcccgcaccagggacttgttctccaggcccttccgccacaaaggttacatccccttgactacctacttgcggaccttcaaggtcggccagtatgtggacatcaaggtgaacggagccgttcacaagggtatgccccacaagttctaccacggccgcactggaattgtctggaacgtcaccaagcgcgccgtcggcgttgtgatgaacaagcaggtcgggaacaggatcatccagaagcgtcttcatgtgcgcatcgagcacgttcagccttcacgctgccgggaagagttcctcgagcgccgtaagagcaatgacatcaagaaggctgaggccaaggctaagggtgaaactgtgaacctcaagcgtcagcctgctggtccaagggatggattcgttctggactcctctactctagagactgttactcccattccatacgatgtcgttaacgacctcaagggtggatactaa

SEQ ID NO: 2534 - protein, 164 aa, Physcomitrella patens subsp. patens
MPAGHGLRSRTRDLFSRPFRHKGYIPLTTYLRTFKVGQYVDIKVNGAVHKGMPHKFYHGRTGIVWNVTKRAVGVVMNKQVGNRIIQKRLHVRIEHVQPSRCREEFLERRKSNDIKKAEAKAKGETVNLKRQPAGPRDGFVLDSSTLETVTPIPYDVVNDLKGGY

SEQ ID NO: 2535 - DNA, 790 bp, Physcomitrella patens subsp. patens
  CDS (84)..(578)
ctttccccgcctcgttttctcttcttcctctcgctcgtcccagttgtgtgcagcagggtccgtcacactctgcagcggcaacaatgccggctggtcatgggttgcgatctcgcacgagggacctgttctccagacccttcaggcacaagggttacatccccttgaccacctacctgcgtaccttcaaggttggccagtatgtggatattaaggtgaacggtgctgtccacaagggtatgcctcacaagttctaccacggacgcaccggcatcgtctggaacgtcaccaagcgcgccgttggtgtcgtgatgaacaagcaggttggaaacaggatcatccagaagcgtctgcacgttcgaattgagcacgtgcagccctctcgttgcagggaagagtttctcgagcgccgcaagagcaatgacatcaagaaagctgaggctaaggctagaggcgagacagttgacctcaagcggcagcctgctggtcccagggctggattcgtccttgactcctccaccctagagaccgtgactcccattccttacgatgtcgtcaacgacctcaagggaggatactaagtcttgtctcttagctttactgtggtcgaacgtggttgtatctcaaccttttgaatacatggtttcgaccaagtttcactcctcaagcacgtctaaaagacaatgttatctggtttcaggatttcctggattttgtgcgtgcactgaaacgccaagtgattgttgcagtagctttgctttcacagatctaaatgtaataccgctgcattcat

SEQ ID NO: 2536 - protein, 164 aa, Physcomitrella patens subsp. patens
MPAGHGLRSRTRDLFSRPFRHKGYIPLTTYLRTFKVGQYVDIKVNGAVHKGMPHKFYHGRTGIVWNVTKRAVGVVMNKQVGNRIIQKRLHVRIEHVQPSRCREEFLERRKSNDIKKAEAKARGETVDLKRQPAGPRAGFVLDSSTLETVTPIPYDVVNDLKGGY

SEQ ID NO: 2537 - DNA, 495 bp, Physcomitrella patens subsp. patens
  CDS (1)..(495)
atgccggccggtcatggtctgcgatcccgcaccagagacctgttctccaggcccttcaggcacaaagggtacatccccttgaccacctacttgcgcaccttcaaggttggccaatatgtagacatcaaggtgaacggagccgtccacaagggaatgccccacaagttctaccacgggcgcaccggtatcgtctggaatgtcaccaagcgcgcagttggtgtcgtgatgaacaagcaggtcgggaacaggatcatccagaagcgtcttcatgtgcgcattgagcacgtgcagccttcacgctgccgggaagagttcctcgagcggcgcaagagcaatgaccttaagaaggccgaggcgaaggccaagggtgaaaccgtgaacctcaagcgtcagcctgctgggcctagggccggatttgttctcgactcgtcaactctagagactgtcactcccattccttacgatgttgttaacgacctcaagggaggatactaa

SEQ ID NO: 2538 - protein, 164 aa, Physcomitrella patens subsp. patens
MPAGHGLRSRTRDLFSRPFRHKGYIPLTTYLRTFKVGQYVDIKVNGAVHKGMPHKFYHGRTGIVWNVTKRAVGVVMNKQVGNRIIQKRLHVRIEHVQPSRCREEFLERRKSNDLKKAEAKAKGETVNLKRQPAGPRAGFVLDSSTLETVTPIPYDVVNDLKGGY

SEQ ID NO: 2539 - DNA, 483 bp, Coprinopsis cinerea okayama7#130
  CDS (1)..(483)
atgcctcactcattcggttacagagcgcgtacgcgccacatgttcaagcggggcttcagagagaatggccctgccaaactcaccaccttcttgaccacctaccgagttggtgacattgtcgatatcaaggccaactctgcccagcaaaagggcatgccccacaaattctaccacggacgcactggtatcgtctacaacgtcaccccctcggctgtcggcatcatcgtttacaaggtcgtcggcaaccgctacgttgaaaagcgggtaaacatccgtatcgagcacgtcaagcactcgaaatgccgacaggagttcttggagcgagtgaaggccaaccacgatgctcacgttgctgcacgggagaagggcgagcgcatcaacctcaagcgatcccctgccctcccccgggaagcccatgtcatctccctcaaggacaacgctcctcaaacaatgacccccgtcccttacgagaccaccatctag

SEQ ID NO: 2540 - protein, 160 aa, Coprinopsis cinerea okayama7#130
MPHSFGYRARTRHMFKRGFRENGPAKLTTFLTTYRVGDIVDIKANSAQQKGMPHKFYHGRTGIVYNVTPSAVGIIVYKVVGNRYVEKRVNIRIEHVKHSKCRQEFLERVKANHDAHVAAREKGERINLKRSPALPREAHVISLKDNAPQTMTPVPYETTI

SEQ ID NO: 2541 - DNA, 486 bp, Culex quinquefasciatus
  CDS (1)..(486)
atgaccaactcgaagggttatcgccgcggaactcgggacatgttctcccgtcccttccgcaagcacggaaccatcccgctgtccacctacatgaaggtgtacaaggccggcgactatgtcgacattaagggtcacggtgccgtccacaagggcatgccctacaaggcgtaccacggcaagaccggccgcgtgtacaacgtcaccaagcacgccctcggcgtgatcgtgaacaagcgcgtccgcggcacgatcctggccaagcgcatcaacgtgcgcatcgagcacgtgaagccgtcccgctgccgtgaggacttcctgcgtcgcgtcaaggagaacgacaaggcgcgccacgagctgcgcaccaagaaccgcaaggccaagatctgcctgaagcgcaagccggcgcccccacgtggcgagcaggtcatcgtgaacccgcccacgccggtcttcctggccccgatcccgtacgagtttatcgcgtaa

SEQ ID NO: 2542 - protein, 161 aa, Culex quinquefasciatus
MTNSKGYRRGTRDMFSRPFRKHGTIPLSTYMKVYKAGDYVDIKGHGAVHKGMPYKAYHGKTGRVYNVTKHALGVIVNKRVRGTILAKRINVRIEHVKPSRCREDFLRRVKENDKARHELRTKNRKAKICLKRKPAPPRGEQVIVNPPTPVFLAPIPYEFIA

SEQ ID NO: 2543 - DNA, 477 bp, Acyrthosiphon pisum
  CDS (1)..(477)
atgaccaactcaaaaggttataggcatggaactagggacttgttttccagaagattccgtagacatggagtcattcctttgtcaacatacatgaaagtgtataaggtcggcgatcgagttgatatcaagggaaatggagcagtacaaaagggtatgccttacaaagtctatcacggtaaaacaggacgagtattcaatgtatctaaacacgctcttggagtaattgttaataaaagagtccgcaaccgtattattgctaagagaattaacattcgtattgaacacgtcaatccatcaaaatgtcgagatgatttcttgagacgtgtaaaagaaaatgaagaaaaggtggccgatgctaaaaagaagggaatccgagtgtgccttaaacgcaaacctcaaggaccccgaccaggtcacatagtaagaggaacggatccaatcagtttagctcctctaccttatgaattcattgcttaa

SEQ ID NO: 2544 - protein, 158 aa, Acyrthosiphon pisum
MTNSKGYRHGTRDLFSRRFRRHGVIPLSTYMKVYKVGDRVDIKGNGAVQKGMPYKVYHGKTGRVFNVSKHALGVIVNKRVRNRIIAKRINIRIEHVNPSKCRDDFLRRVKENEEKVADAKKKGIRVCLKRKPQGPRPGHIVRGTDPISLAPLPYEFIA

SEQ ID NO: 2545 - DNA, 489 bp, Anopheles gambiae str. PEST
  CDS (1)..(489)
atgacgaactcgaagggttatcgccgtggtactcgggacatgttctcccgtggcttccgcaagcatggaaccatcccgctgtccacctacatgaagatctacaagtccggcgactatgttgacatcaagggacacggtgccgtgcacaagggtatgccctacaaggcgtaccacggcaagactggccgtgtgtacaacgtctcgaagcacgcgctcggcgtgatcgtgaacaagcgcgtccgcggcaagatcctacccaagcgcatcaacgtccgcgtcgagcatgtgcagccgtcccgctgccgcgaggacttcctgcgccgcgtcaaggagaacgtggagaagcgcatggcgctgcggggcaagaagctgcccggcttcaaggtgtcgctgaagcgcaagccgaaacagccgcgccaggctcaggtcatcaagaacccgccgaagcccatcttcctcgccccgatcccgtacgaattcgtggcctaa

SEQ ID NO: 2546 - protein, 162 aa, Anopheles gambiae str. PEST
MTNSKGYRRGTRDMFSRGFRKHGTIPLSTYMKIYKSGDYVDIKGHGAVHKGMPYKAYHGKTGRVYNVSKHALGVIVNKRVRGKILPKRINVRVEHVQPSRCREDFLRRVKENVEKRMALRGKKLPGFKVSLKRKPKQPRQAQVIKNPPKPIFLAPIPYEFVA

SEQ ID NO: 2547 - DNA, 483 bp, Gibberella zeae PH-1
  CDS (1)..(483)
atgggtcactcatacggaaagagagcgggcacccgctatgccttcagccgggacttccgcaagaagggtatgattgccctgaacacctacctccgacagtaccgcgttggagatatcgtcgacattaaggcgaacggtgccgtccagaagggtatgcccttcaaggtctaccacggaaagactggtgtcatctacaacgtcaccaagtccgctgtcggtgtcatcatctacaagcaggtcaagcaccgatacatcgagaagcgaatcaacgtccgaatcgagcacatctcgcagtcccgatctcgtgaggacttcctcaagcgagtcaaggctaacgccgaggccaagcgtgaggccaaggccaccggaaccgttgtccaggtcaagcgtcagccccttggacctcgtggcgcccacacactgtcgctctccgagaacccccccatgaccgttacccctcttgcctacgagaccacgatctaa

SEQ ID NO: 2548 - protein, 160 aa, Gibberella zeae PH-1
MGHSYGKRAGTRYAFSRDFRKKGMIALNTYLRQYRVGDIVDIKANGAVQKGMPFKVYHGKTGVIYNVTKSAVGVIIYKQVKHRYIEKRINVRIEHISQSRSREDFLKRVKANAEAKREAKATGTVVQVKRQPLGPRGAHTLSLSENPPMTVTPLAYETTI

SEQ ID NO: 2549 - DNA, 483 bp, Candida glabrata CBS 138
  CDS (1)..(483)
atgggtaaatctcacggttacagatctcgtactcgttacatgttccaacgtgacttccgtaagcacggtgctattgcattgtccacttacttgaaggtctacaaggttggtgacattgtcgatatcaaggctaacggttccatccaaaagggtatgccacacaagttctaccaaggtaagaccggtgttgtctacaacgtcaccaagtcttccgttggtgtcatcgttaacaagatggttggtaacagatacttggaaaagagattgaacttgagagtcgaacacgtcaagcactccaagtgtagacaagaatttttggacagagttaagtctaacgctgccaagagagctgaagccaaggcccaaggtaaggctgtccaattgaagagacaaccagctcaaccaagagaagcccgtgtcgtctccactgaaggtaacgttcctcaaactttggccccagtcgcttacgaaaccttcatctaa

SEQ ID NO: 2550 - protein, 160 aa, Candida glabrata CBS 138
MGKSHGYRSRTRYMFQRDFRKHGAIALSTYLKVYKVGDIVDIKANGSIQKGMPHKFYQGKTGVVYNVTKSSVGVIVNKMVGNRYLEKRLNLRVEHVKHSKCRQEFLDRVKSNAAKRAEAKAQGKAVQLKRQPAQPREARVVSTEGNVPQTLAPVAYETFI

SEQ ID NO: 2551 - DNA, 483 bp, Kluyveromyces lactis NRRL Y-1140
  CDS (1)..(483)
atgggtaaatcacacggttacagatctcgtactcgttacatgttccaacgtgactttagaaagcacggtgccatcgccttgtctacctacatgaaggtttacaaggttggtgacattgttgacatcaaggctaacggttctatccacaagggtatgccacacaagttctaccaaggtaagaccggtgttgtctacaacgtcaccaagtcttccgttggtatcatcatcaacaagatggttggtaacagatacttggaaaagagattgaacttgagagttgaacacatcaagcactccaagtgtagacaagaatttttggaaagagttaagtctaacgctgccaagaaggccgaagctaaggctcaaggtgttgccgtccaattaaagagacaaccagctcaaccaaaggaatcccgtgtcgtttctaccgaaggtaacgtccctcaaactttggctccagttccatacgaaactttcatctaa

SEQ ID NO: 2552 - protein, 160 aa, Kluyveromyces lactis NRRL Y-1140
MGKSHGYRSRTRYMFQRDFRKHGAIALSTYMKVYKVGDIVDIKANGSIHKGMPHKFYQGKTGVVYNVTKSSVGIIINKMVGNRYLEKRLNLRVEHIKHSKCRQEFLERVKSNAAKKAEAKAQGVAVQLKRQPAQPKESRVVSTEGNVPQTLAPVPYETFI

SEQ ID NO: 2553 - DNA, 483 bp, Debaryomyces hansenii CBS767
  CDS (1)..(483): transl_table=12
atgggtaaatctcgtggttatagatccggtactcgttacctttttcaacgtgactttaagaagcatggtgctattccattatctacttacttgaagacttacagagttggtgatatcgttgatatcaaggccaatggttctatccaaaagggtatgccacataagtactaccaaggtaagactggtatcgtttacaacgtcaccaagtctgctgttggtgttattatctacaaagttgttggtaacagatacctcgaaaagagaattaacttgagagtcgaacacattaagcactccgcttgtcgtcaagaattcatcaacagagttaaatctaacgctgctttaaagagagaagccaaggccaacggtgaacacgttcacttgaagagacaacctgttaagccaagagacgctagagttgttactaccaaggaaaacgttccacaaaccttagctccagttccttatgaaaccttcatttaa

SEQ ID NO: 2554 - protein, 160 aa, Debaryomyces hansenii CBS767
MGKSRGYRSGTRYLFQRDFKKHGAIPLSTYLKTYRVGDIVDIKANGSIQKGMPHKYYQGKTGIVYNVTKSAVGVIIYKVVGNRYLEKRINLRVEHIKHSACRQEFINRVKSNAALKREAKANGEHVHLKRQPVKPRDARVVTTKENVPQTLAPVPYETFI

SEQ ID NO: 2555 - DNA, 486 bp, Yarrowia lipolytica CLIB122
  CDS (1)..(486)
atgggtaagagtcacggatacagaagcagaacccgatacatgttctctcgggacttcaagaagaacggaactatccccatgtccgtctacttgaagacctacaaggttggagacattgttgacatccgagccaacggttccatccagaagggtatgccccacaagttctaccacggccgaactggaatcgtctacaacgtgaccaagtccgctgttggcgtcatcatcaacaaggttgttggcaaccgattcatggagaagcgaatcaacctccgaatcgagcacatcaagcactccaagtgccgacaggagttccttgaccgagtcaaggccaacgatctcaagcgaaaggaggccaaggccaagaacgagattgtccagctccgacgacagcccggcgccacccgagaggccaagacccttgccatcgacgagaccaactaccctctcaccgttgctcctcttgcttacgagactttcatctaa

SEQ ID NO: 2556 - protein, 161 aa, Yarrowia lipolytica CLIB122
MGKSHGYRSRTRYMFSRDFKKNGTIPMSVYLKTYKVGDIVDIRANGSIQKGMPHKFYHGRTGIVYNVTKSAVGVIINKVVGNRFMEKRINLRIEHIKHSKCRQEFLDRVKANDLKRKEAKAKNEIVQLRRQPGATREAKTLAIDETNYPLTVAPLAYETFI

SEQ ID NO: 2557 - DNA, 477 bp, Aspergillus nidulans FGSC A4
  CDS (1)..(477)
atgggtcactcccacggtctccgttccggcacccggtatgccttctcccgcaacttccgtgagaagggtcagatccgcctctcgacctacctgaagacctaccgggttggtgacattgtggacatcaaggtcaacggtgccgttcagaagggtatgccctacaaggtctacaacggtaagaccggtgtcgtttacaacgtcaccaagtcctccgtcggtgtcctcctctacaaggtcgtcggcaaccgctacctcgagaagcgtatcaacgtccgcatcgagcacgtcaagcactctcgctcccgtgaggatttcatcaagcgtgtcaaggagaacgccgagaagaagaagcaggccaaggagcagggcatccaccttcacctcaagcgccagcccgcccagcctcgtgaggctcacaccgtcgagggctccactcccgaaaccatcactcctctgccttacgacacccacatctaa

SEQ ID NO: 2558 - protein, 158 aa, Aspergillus nidulans FGSC A4
MGHSHGLRSGTRYAFSRNFREKGQIRLSTYLKTYRVGDIVDIKVNGAVQKGMPYKVYNGKTGVVYNVTKSSVGVLLYKVVGNRYLEKRINVRIEHVKHSRSREDFIKRVKENAEKKKQAKEQGIHLHLKRQPAQPREAHTVEGSTPETITPLPYDTHI

SEQ ID NO: 2559 - DNA, 483 bp, Cryptococcus neoformans var. neoformans B-3501A
  CDS (1)..(483)
atgcctcactctttcggtatgcgagcgcgaacgcgccacatgttcaggaggggtttcaaggagcacggtgcccccagcgtctccaccttcctcatcacctaccgagttggtgacatcgttgacatcaaagccaactcttctcagcagaagggtatgccccacaagttctaccacggcaagaccggtatcgtctacaacgttaccccccgagctgtcggtgtgatcatctacaaggtcgtcaacggccgatacatggagaagcgtgtcaacatccgagttgagcacatccgtcactccaagtgccgacaggaattccttgaccgtgtcaagtccaacgccgccaagaagaaggaggccaaggaaaagggcgagcaagtcctccttaagcgactccctgctcagccccgagaggccagggttgtttccatccacaacaacgtcccccagacccttaccgccaggccttacgagaccttcatctaa

SEQ ID NO: 2560 - protein, 160 aa, Cryptococcus neoformans var. neoformans B-3501A
MPHSFGMRARTRHMFRRGFKEHGAPSVSTFLITYRVGDIVDIKANSSQQKGMPHKFYHGKTGIVYNVTPRAVGVIIYKVVNGRYMEKRVNIRVEHIRHSKCRQEFLDRVKSNAAKKKEAKEKGEQVLLKRLPAQPREARVVSIHNNVPQTLTARPYETFI

SEQ ID NO: 2561 - DNA, 480 bp, Tribolium castaneum
  CDS (1)..(480)
atgacgaactcgaaaggttatcgtaggggaacccgggacctgttctctcggaagttccgcaagcatggggttatccccctgtcgacgtacatgaaagtgtacaaagtcggcgatatcgtggatattaagggcaatggagccgttcagaagggcatgccctacaaggtgtaccatgggaaaactggccgtgtgttcaatgtgacggctcacgctttgggtgtgattgttaacaagcgtgttgggggccgtattatccccaaacgtatcaatatccgtattgagcacgtgaatcactccaagtgcaggcaagacttcttgaccagagtgaaacaaaacgaaaaattgcgaaaagaagctaaggagaagaacattcgagtgaatttgaagagacagccagcacagccaaggcctgcacacatcgtcagtgggaaagtaccagccgttcaattggctcctatcccatatgaatttattgcttaa

SEQ ID NO: 2562 - protein, 159 aa, Tribolium castaneum
MTNSKGYRRGTRDLFSRKFRKHGVIPLSTYMKVYKVGDIVDIKGNGAVQKGMPYKVYHGKTGRVFNVTAHALGVIVNKRVGGRIIPKRINIRIEHVNHSKCRQDFLTRVKQNEKLRKEAKEKNIRVNLKRQPAQPRPAHIVSGKVPAVQLAPIPYEFIA

SEQ ID NO: 2563 - DNA, 477 bp, Maconellicoccus hirsutus
  CDS (1)..(477)
atgacgaactctaaaggataccgacgcggaaccagggacttgttcgcccgcaaattcaggcaacatggtactatcccgttatcgaagtacctcgaagtatacaaagtcggagattacgttgacatcaaaggtaatggtgccgttcagaaaggtatgccatacaaagcttaccacggtagaaccggcagagtgttcaacgttacgaaacacgctttgggtgttattgtaaataaacgtgtaagaaatcgtatcatccctaaaagaattaatgtaagaattgaacacgtatcgcattcgaaatgcagagatgattttcttaagcgcgtaagaaataatggtaaaagattgaaagtcgctaagaaagccggaattaccattagtttgaaaagaaaacctgaagaacctaaaccaggtcatgttgtaaaaggacaagaacccattgtgttggctcctctgccatacgaatttattgcataa

SEQ ID NO: 2564 - protein, 158 aa, Maconellicoccus hirsutus
MTNSKGYRRGTRDLFARKFRQHGTIPLSKYLEVYKVGDYVDIKGNGAVQKGMPYKAYHGRTGRVFNVTKHALGVIVNKRVRNRIIPKRINVRIEHVSHSKCRDDFLKRVRNNGKRLKVAKKAGITISLKRKPEEPKPGHVVKGQEPIVLAPLPYEFIA

SEQ ID NO: 2565 - DNA, 495 bp, Vitis vinifera
  CDS (1)..(495)
atgccggcaggtcacgggcttagaagtaggacgagggatctgtttgctcgtccattcaggaagaagggttacatccctctcacagtttatctcagaacctacaagattggggattacgtggatatcaaggtgaacggcgccattcacaagggcatgccccacaagttctatcatggccgcaccggcaaggtctggaacgtcaccaagcgtgccataggcgttgaagtcaacaaacaggttgggaataggattattaggaaaaggatccatgtgcgggtggaacatgttcaaccatcaaggtgcagggaagaatttaaactgaggaaaattcggaacgatgagtcgaaagccgaggcaaaaaagcgtggggagaagatcagcacaaaaagacagccagaaggacccaagcctggtttcatggtggagggtgccaccctagaaacagttacaccaatcccatatgatgtggtgaatgacctcaagggcggatactga

SEQ ID NO: 2566 - protein, 164 aa, Vitis vinifera
MPAGHGLRSRTRDLFARPFRKKGYIPLTVYLRTYKIGDYVDIKVNGAIHKGMPHKFYHGRTGKVWNVTKRAIGVEVNKQVGNRIIRKRIHVRVEHVQPSRCREEFKLRKIRNDESKAEAKKRGEKISTKRQPEGPKPGFMVEGATLETVTPIPYDVVNDLKGGY

SEQ ID NO: 2567 - DNA, 495 bp, Vitis vinifera
  CDS (1)..(495)
  misc_feature (204)..(204): y is t or c
  misc_feature (411)..(411): r is g or a
atgccggccggacatggacttcgatcgaggactcgagatctcttcgccaggcccttcaggaagaagggttacattcctttgaccacatatctgagaaccttccgcatcggagagtacgtggacatcaaggtaaacggcgccatccacaagggcatgccccacaagttctaccatggccgcactggtaaggtctggaacgttacyaagcgcgccatcggcgtcgaagtaaacaagcaggtgggtaacaggattatcaagaagcggatccatgtgcgtgtggagcatgtgcaaccttcaaggtgcactgaggaattccgtctgaggaagttgaagaatgatgaattgaagacagctgcaaagaagaacggtgaaatcatcagcacaaagaggcagccagagggccctaagccrggtttcatggtggaaggtgcaactttggaaactgttactccgatcccctacgatgttgtcaacgatctcaagggtggttattag

SEQ ID NO: 2568 - protein, 164 aa, Vitis vinifera
MPAGHGLRSRTRDLFARPFRKKGYIPLTTYLRTFRIGEYVDIKVNGAIHKGMPHKFYHGRTGKVWNVTKRAIGVEVNKQVGNRIIKKRIHVRVEHVQPSRCTEEFRLRKLKNDELKTAAKKNGEIISTKRQPEGPKPGFMVEGATLETVTPIPYDVVNDLKGGY

SEQ ID NO: 2569 - DNA, 498 bp, Vitis vinifera
  CDS (1)..(498)
atgccggcgggacacggactccgatcgaggactcgagacttgttcgccaggcccttcaggaagaagggttacattcccttgacaacgtacctgagaacctttcgcatcggagactacgtggacatcaaagtaaacggcgccgtccacaagggcatgccccacaagttctaccatggccgcactggtaaggtctggaacgtcaccaagcgcgccatcggtgttgaagtaaacaagcaggtgggtaacaggataatcaagaagcggatccatgtgcgagtggagcatgtgcaaccttcaaggtgtactgaggaattccggctgaggaagttgaagaatgatgaattgaaggcagaggcaaaaaagaacggaggtcagatcatcagcacgaaaaggcagccagaggggcctaaaccaggtttcatggtggaaggtgcaaccttggaaactgttactccaattccttatgatgttgtcaatgatctcaagggtggctactag

SEQ ID NO: 2570 - protein, 165 aa, Vitis vinifera
MPAGHGLRSRTRDLFARPFRKKGYIPLTTYLRTFRIGDYVDIKVNGAVHKGMPHKFYHGRTGKVWNVTKRAIGVEVNKQVGNRIIKKRIHVRVEHVQPSRCTEEFRLRKLKNDELKAEAKKNGGQIISTKRQPEGPKPGFMVEGATLETVTPIPYDVVNDLKGGY

SEQ ID NO: 2571 - DNA, 465 bp, Vitis vinifera
  CDS (1)..(465)
atgccggcaggtcacgggcttagaagtaggacgagggatctgtttgctcgtccattcaggaagaagggttacatccctctcacagtttatctcagaacctacaagattggggattacgtggatatcaaggtgaacggcgccattcacaagggcatgccccacaagttctatcatggccgcaccggcaaggtctggaacgtcaccaagcgtgccataggctttttattgaaaaggatccatgtgcgggtggaacatgttcaaccatcaaggtgcagggaagaatttaaactgaggaaaattcggaacgatgagtcgaaagccgaggcaaaaaagcgtggggagaagatcagcacaaaaagacagccagaaggacccaagcctggtttcatggtggagggtgccaccctagaaacagttacaccaatcccatatgatgtggtgaatgacctcaagggcggatactga

SEQ ID NO: 2572 - protein, 154 aa, Vitis vinifera
MPAGHGLRSRTRDLFARPFRKKGYIPLTVYLRTYKIGDYVDIKVNGAIHKGMPHKFYHGRTGKVWNVTKRAIGFLLKRIHVRVEHVQPSRCREEFKLRKIRNDESKAEAKKRGEKISTKRQPEGPKPGFMVEGATLETVTPIPYDVVNDLKGGY

SEQ ID NO: 2573 - DNA, 751 bp, Spadella cephaloptera
  CDS (82)..(567)
ggaagcttataattgagtagtttcaatttgtttaaagattttcattttaagttattaaaaaaaaactgattaaaggggaagatgacgaattccaaaggataccgaagaggcacgcgttacatgttcaggcgcccattccgcaagaatggtgtgccctccgtcgccaccttgttgaaggtctacaagatcggcgacatcgtcgacatcaagggcgacggatccgtgcatagtgggatgccccataagtactaccacggccgtacgggtcgcgtcttcaacgtgacgacgaggtcattgggtgtggtcgtgacgaagccagtccgaaatcgcatcgaaaagaagaagatttgcatccgcgcggaacacgtgcgccattcgagctgtcgccaggatttcttagaccgcgtgaaacgtaacgacacgattcgtcgtgagtgcaagaaaaacgggacggaagttccagacctgaaacggaagcccgtcgggccacgacccgcccacattgttcgcacaaagaacaacaagccctccttgttccagcccatcccttacgaatttatcgtttaagagatgaaatattgatttcactggatacgagacattttggaggatgaaaatatttaaggactggccctctttcgagcttttattttgtcatcgtttgtttttatttgctactctcttttcgggttctcgctgcttccagcgaatcaagatgaatttattatttatccttttaccaaaaaaaaaa

SEQ ID NO: 2574 - protein, 161 aa, Spadella cephaloptera
MTNSKGYRRGTRYMFRRPFRKNGVPSVATLLKVYKIGDIVDIKGDGSVHSGMPHKYYHGRTGRVFNVTTRSLGVVVTKPVRNRIEKKKICIRAEHVRHSSCRQDFLDRVKRNDTIRRECKKNGTEVPDLKRKPVGPRPAHIVRTKNNKPSLFQPIPYEFIV

SEQ ID NO: 2575 - DNA, 474 bp, Sipunculus nudus
  CDS (1)..(474)
atgacgagcaccaagggatacaggcggggtacccgctacatgttcgccagacaattcacaaaacgtggcatcatcccattgtccacttacatgatcacataccgccgtggtgacatcgtggatatcaagggatgcggagcaattcacaaaggtatgccccacaaggcttaccatggcgagacaggacgggtgtacaatgtcacacagcatgctgttggtgtcattgtaaacaaacgtgtcaaaggcaaaatccttgccaagagacttaacatcagagttgaacacatcaagcactccaactgtcgtctggacttcttgcgtcgtgtcaaagctaacgaggagaagaggaaggatacaacagacaaggtttccctccagcgtattcctcgtcaaccccgcggaggacactttgtgaggaccaagaacaacaagccagagttcctagagcccatcccatacgtcttcacagcttaa

SEQ ID NO: 2576 - protein, 157 aa, Sipunculus nudus
MTSTKGYRRGTRYMFARQFTKRGIIPLSTYMITYRRGDIVDIKGCGAIHKGMPHKAYHGETGRVYNVTQHAVGVIVNKRVKGKILAKRLNIRVEHIKHSNCRLDFLRRVKANEEKRKDTTDKVSLQRIPRQPRGGHFVRTKNNKPEFLEPIPYVFTA

SEQ ID NO: 2577 - DNA, 483 bp, Arenicola marina
  CDS (1)..(483)
atgacgaacactaagggtttgcgccgggggacccgggatatgttttcccggtccttcaggaaacatggcaccatgtgcctgtccacatacatgaagctgtacaagaggggtgatattgttgatatcaagggtgatggtgctatccagaaaggtatgccacacaagatctaccatggcaagactggacgcatttataatatcacaccacatgctgtaggtgttgttgtcaacaagcgagtcagggggcgcatcattgccaagcgcatcaacgtgcgcattgagcacatcaagcactccaagtgccgacaggaattcttgatccgtgttgaggagaaccagaggaagaagaaggaggccactgcgaagggagagcaggtcctctgcaagagggagcccaagcagccccgtcaacgccacttcgtcagcaccaagttcatgaaaccggaaattctgcagcccatcccctacgagtttatcgcctaa

SEQ ID NO: 2578 - protein, 160 aa, Arenicola marina
MTNTKGLRRGTRDMFSRSFRKHGTMCLSTYMKLYKRGDIVDIKGDGAIQKGMPHKIYHGKTGRIYNITPHAVGVVVNKRVRGRIIAKRINVRIEHIKHSKCRQEFLIRVEENQRKKKEATAKGEQVLCKREPKQPRQRHFVSTKFMKPEILQPIPYEFIA

SEQ ID NO: 2579 - DNA, 498 bp, Picea sitchensis
  CDS (1)..(498)
atgccggcaggccatggagtgcgcgctcggacgagggatctgttcgccaggcccttcaggaagaagggatacgctccaatcagcacatatctgaggacctttaaaataggtcagtacgtggacattaaggtcaatggttcgattcacaaagggatgcctcacaagttctaccatggccgcacaggcgttgtctggaacgtcaccaagcgagccatcggcgtcgaaatgaacaaacaggttcgtaacaagattatcaagaagagaattcatgtacgaattgagcatgtgcaaccgtctaggtgtgcacaggatgccttgttaagaaggaaaaacaacgaccagttgaaggcagaggctaaagcacgtggcgagcctcctatcagcaccaagaggcagcctgagggccctaagccaggatttatggtcgagggtgctgttttggagacagtcacacctattccatatgatgttgttaatgatttgaagggtggatattaa

SEQ ID NO: 2580 - protein, 165 aa, Picea sitchensis
MPAGHGVRARTRDLFARPFRKKGYAPISTYLRTFKIGQYVDIKVNGSIHKGMPHKFYHGRTGVVWNVTKRAIGVEMNKQVRNKIIKKRIHVRIEHVQPSRCAQDALLRRKNNDQLKAEAKARGEPPISTKRQPEGPKPGFMVEGAVLETVTPIPYDVVNDLKGGY

SEQ ID NO: 2581 - DNA, 498 bp, Picea sitchensis
  CDS (1)..(498)
atgccggcaggccatggagtgcgcgcacggacgagggacttgttcgccaggcccttcaggaagaagggatacgcccctctcagcacatatctgaggagctacaagatagggcagtacgttgatattaaggtcaatggttcgattcacaagggtatgcctcacaagttctaccatggtcgcaccggtgttgtctggaatgtcaccaagcgagcaatcggcgtcgaaatgaacaaacaggttcgtaacaagattatcaagaagagaattcatgtacgaattgagcatgtgcaaccgtctaggtgtgcagaggatgccatattaagaagaaaaaataacgatcaattaaaggcagaagctaaagcacgtggtgagccacgtatcagcaccaaaaggcagcccgagggccctaagccaggatttatggttgagggtgctgttttggagacagtcacacctattccatatgatgttgttaatgatttgaagggtggatattaa

SEQ ID NO: 2582 - protein, 165 aa, Picea sitchensis
MPAGHGVRARTRDLFARPFRKKGYAPLSTYLRSYKIGQYVDIKVNGSIHKGMPHKFYHGRTGVVWNVTKRAIGVEMNKQVRNKIIKKRIHVRIEHVQPSRCAEDAILRRKNNDQLKAEAKARGEPRISTKRQPEGPKPGFMVEGAVLETVTPIPYDVVNDLKGGY

SEQ ID NO: 2583 - DNA, 495 bp, Populus trichocarpa
  CDS (1)..(495)
atgccagctggacatggtttgcgatcaaggaccagagatctcttcgctcgtcccttcaggaagaagggttacatccctctcaccacatacctcagaacgtacaaggtaggcgactatgtcgacattaaggtaaatggcgctgtccacaaaggcatgccccacaagttctaccatggccgcaccggtcgcgtctggaatgtaaccaagcgcgctattggtgtcgtcatcaacaagcaggttgggaataggattattgggaagagaattcatgttagggtggagcatgtgcagccgtcgaggtgcagggaggagttcaagttgaggaagaagaagaatgatgagttgaaggcggaggccaaagctcgtggtgaaaagattagtactaagagacagcctcaaggaccgaagcccggatttatggtggagggtgctactcttgagactttcactcccattccttatgatgtggtcaatgatctcaagggtggttattga

SEQ ID NO: 2584 - protein, 164 aa, Populus trichocarpa
MPAGHGLRSRTRDLFARPFRKKGYIPLTTYLRTYKVGDYVDIKVNGAVHKGMPHKFYHGRTGRVWNVTKRAIGVVINKQVGNRIIGKRIHVRVEHVQPSRCREEFKLRKKKNDELKAEAKARGEKISTKRQPQGPKPGFMVEGATLETFTPIPYDVVNDLKGGY

SEQ ID NO: 2585 - DNA, 495 bp, Populus trichocarpa
  CDS (1)..(495)
atgccggctggacacggtgtgcgatcaaggaccagagatctcttcgctcgtcccttcaggaagaagggttacatccccctctccacttatctcagaacatacaaggtaggcgactatgtcgacgtcaaggtaaacggcgccgttcacaaaggcatgccccacaagttctaccatggccgcaccggtcgcgtctggaatgtcaccaagcgcgctattggtgtcgtcatcaacaagcaggttgggaataggattattgggaagaaaattcatgttagggtggagcatgtgcagccgtcgaggtgcagggaggagtttaagttgaggaagaagaagaatgatgagttgaaggctgaggccaaagcttgtggtgaaaagattagcactaagaggcagcctcaaggacctaagcctggatttatgttggagggtgctactcttgaaactgtcactcccattccttatgatgtggtcaatgatctcaagggtggttattga

SEQ ID NO: 2586 - protein, 164 aa, Populus trichocarpa
MPAGHGVRSRTRDLFARPFRKKGYIPLSTYLRTYKVGDYVDVKVNGAVHKGMPHKFYHGRTGRVWNVTKRAIGVVINKQVGNRIIGKKIHVRVEHVQPSRCREEFKLRKKKNDELKAEAKACGEKISTKRQPQGPKPGFMLEGATLETVTPIPYDVVNDLKGGY

SEQ ID NO: 2587 - DNA, 495 bp, Populus jackii
  CDS (1)..(495)
atgccggctggtcacggtctccggtctcgcacaagagatctctttgctcgtcccttcagaaagaagggttacattccattgacaacctacctcagaacctacaagattggagacaatgtagacatcaaggttaacggcgctgtccacaagggtatgcctcacaagttctaccatggacgtactggacgtgtctggaatgtcaccaaacgcgccatcggcgtcgagatcaacaagcaggtgggtaacagaatcattaggaagaggatccatgtaagagtggagcatttgctgccttcaaggtgcactgaggaatttcgtctcaggaagaagaagaatgatcaactgaaggcagaggctaaggccagaggtgaggttatcagcacaaagaggcagccacagggtcccaaacctggtttcatggtggaaggtgcgacattggaaactgttacacccattccatatgatgttgttaatgatctcaagggcggttactag

SEQ ID NO: 2588 - protein, 164 aa, Populus jackii
MPAGHGLRSRTRDLFARPFRKKGYIPLTTYLRTYKIGDNVDIKVNGAVHKGMPHKFYHGRTGRVWNVTKRAIGVEINKQVGNRIIRKRIHVRVEHLLPSRCTEEFRLRKKKNDQLKAEAKARGEVISTKRQPQGPKPGFMVEGATLETVTPIPYDVVNDLKGGY

SEQ ID NO: 2589 - DNA, 483 bp, Lineus viridis
  CDS (1)..(483)
atgactaaccccaaaggatatcgccgtggtactcggtacatgttctcccgtcaattcaaaaagaagggagtaactcatctatccaaatacttgaagtgctacagacggggagacatcgtcgacatcaagggtgatggtgctatccaaaagggtatgccacacaaatcctaccacggcagaacaggccgcgtttacaatgtcacacaacacgctgttggtgtcattgtgaataagagagtaaggggcaagatcctagctaagcgtatcaacctgcgcattgagcatgttaagcactccaactgtaggctggacttccttaaccgtgtgaagaggaatgaggttatcaagagggaggcacgagtgaagggcgtcaagccagagtgcaagagattgcctcaaggacctaagaaagcccactttgtgcggacgaaaggtaatctgccacaggtgtttgagccaattccatacgaatttgtggcgtaa

SEQ ID NO: 2590 - protein, 160 aa, Lineus viridis
MTNPKGYRRGTRYMFSRQFKKKGVTHLSKYLKCYRRGDIVDIKGDGAIQKGMPHKSYHGRTGRVYNVTQHAVGVIVNKRVRGKILAKRINLRIEHVKHSNCRLDFLNRVKRNEVIKREARVKGVKPECKRLPQGPKKAHFVRTKGNLPQVFEPIPYEFVA

SEQ ID NO: 2591 - DNA, 486 bp, Ornithodoros coriaceus
  CDS (1)..(486)
atggtgagcacgaaaggttaccggagaggtactaggtacctctttgcaaggaaattcagacgtcatggtgtagagcacctttctacatacctgcaggtctataagcgaggagattatgtcgatatcaagggcaacggagccttccaaaagggcatgccattcaaattctaccacggcaagacgggaagggttttcaacgtgacacggcacgccgtcggcgtaatcgtcaacaagcgagtgcggcaccgcatcatcccaaagcgcattaacgtgcgcattgaacacatcaagcactccaactgtcgcaaagagtacttggagcggattaagaagaaccgtgtcctccgggaggaggccaagaaagctggcatcaagatctccctcaggagacagcctgaaggtccaaggccaggacactttgtcaagttgaatggaaagcaggagcctgaattggtgcagcctctgccctacgagttcattgcctga

SEQ ID NO: 2592 - protein, 161 aa, Ornithodoros coriaceus
MVSTKGYRRGTRYLFARKFRRHGVEHLSTYLQVYKRGDYVDIKGNGAFQKGMPFKFYHGKTGRVFNVTRHAVGVIVNKRVRHRIIPKRINVRIEHIKHSNCRKEYLERIKKNRVLREEAKKAGIKISLRRQPEGPRPGHFVKLNGKQEPELVQPLPYEFIA

SEQ ID NO: 2593 - DNA, 507 bp, Ostreococcus tauri
  CDS (1)..(507)
atgggtaaccaacgcgctcggtcccgcggtctccgccacggtacccgtaacctcttctcccgcggtcaccgtgagcacggtacgttgaacaccacgacgtacctgcgcacgttccgtgtcggtgactatgtcgacatcaaggtgaactcggcgcaacaaaagggtatgccgtacttgcagtaccaaggcagaacgggtcaagtgtggaacgtgacgccgcgcgcggtgggtgtggagatcaacaagcagatcggcggtcgcattgctcgtaagcgcatccacgtgcgcatcgagcacgtgcaacactctcgatgccgtgaggatttcatcgctcgtcgcgaagcgaacgacaaggcgcaccacgaggctcacttggctggcaagaagatcacgacgaagcgtgaggtcacgggccaaccgcgtacgggtttcaccctcgagaacgtcaagtcggagctcttgacgccgatcccgtacgacatcttgcgtgaaggcatgaagtactaa

SEQ ID NO: 2594 - protein, 168 aa, Ostreococcus tauri
MGNQRARSRGLRHGTRNLFSRGHREHGTLNTTTYLRTFRVGDYVDIKVNSAQQKGMPYLQYQGRTGQVWNVTPRAVGVEINKQIGGRIARKRIHVRIEHVQHSRCREDFIARREANDKAHHEAHLAGKKITTKREVTGQPRTGFTLENVKSELLTPIPYDILREGMKY

SEQ ID NO: 2595 - DNA, 480 bp, Solanum tuberosum
  CDS (1)..(480)
atgccggccggtcatggtttgaggtctcgaacgagagattcattctctcgtgctttcaggaagaagggtaccatcgcactttcaacctacttgaggattttcaaaatcggagattatgttgatatcaaggtgaatggtgctattcacaagggaatgcctcacaagttctaccatggacgtactggtcgtgtttggaatgttaccaaacgtgccgttggtgttgaagtcaacaagcaggttcgtaacaagatcttaagaaagaggatccatgtgaggattgagcatgtccagcaatctcgatgcactgaagaagtcagggaaaggattaagaagaatgatcaactaaaggctgatgccaaggctagaggagaaatcatcagcacaaaaagacaaccactcggacccaaaccagggtttatggttggaggtgctactttggagacagttacccccataccatatgatgtggttatgatttga

SEQ ID NO: 2596 - protein, 159 aa, Solanum tuberosum
MPAGHGLRSRTRDSFSRAFRKKGTIALSTYLRIFKIGDYVDIKVNGAIHKGMPHKFYHGRTGRVWNVTKRAVGVEVNKQVRNKILRKRIHVRIEHVQQSRCTEEVRERIKKNDQLKADAKARGEIISTKRQPLGPKPGFMVGGATLETVTPIPYDVVMI

SEQ ID NO: 2597 - DNA, 495 bp, Solanum tuberosum
  CDS (1)..(495)
atgccggccggtcatggtttgaggtctcgaacgagagattcattctctcgcgccttcaggaagaagggtaccatcgcactttcaacctacttgaggattttcaaaatcggagattatgttgatatcaaggtgaatggtgctattcacaagggaatgcctcacaagttctaccatggacgtactggtcgtgtttggaatgttaccaaacgcgccgttggtgttgaagtcaacaagcaggttcgtaacaagatcttaagaaagaggatccatgtgaggattgagcacgtccagcaatctcgatgcactgaagaagtcagggaaaggattaagaagaatgatcaactaaaggctgatgccaaggctagaggagaagtcatcagcacaaaaagacaaccactcggacccaaaccagggttcatggttggaggtgctactttggagacagttacccccataccatatgatgtggttaatgatttgaagggaggttattga

SEQ ID NO: 2598 - protein, 164 aa, Solanum tuberosum
MPAGHGLRSRTRDSFSRAFRKKGTIALSTYLRIFKIGDYVDIKVNGAIHKGMPHKFYHGRTGRVWNVTKRAVGVEVNKQVRNKILRKRIHVRIEHVQQSRCTEEVRERIKKNDQLKADAKARGEVISTKRQPLGPKPGFMVGGATLETVTPIPYDVVNDLKGGY

SEQ ID NO: 2599 - DNA, 486 bp, Ixodes scapularis
  CDS (1)..(486)
atggtgaacaccaagggttaccggagaggaacgcgctacctcttcgccaggggcttcaggaagcatggcgtcgagcacctctctaccttccttcaggtctacaagcggggagactacgttgacgttaagggcaacggagccttccaaaagggtatgccgcacaaattctaccacggcaagacgggccgagtgttcaacgtgacgccacacggtgtcggcgtcatcgtcaacaagcgcgtccggcaccgcatcattcccaagcgcatcaacctgcgcattgaacatgtgaagcactccaagtgccgccaggacttcctggaaagggccaagaagaaccgtgagctgcgcaaggaagccaaaaaggccggcatcaaggtctgctgcaagcgacagcccgagggtccccggccagcgcacttcgtgaagctgaacggaagacaggagccagagttgctgcagcccctgccatacgagttcatcgcctag

SEQ ID NO: 2600 - protein, 161 aa, Ixodes scapularis
MVNTKGYRRGTRYLFARGFRKHGVEHLSTFLQVYKRGDYVDVKGNGAFQKGMPHKFYHGKTGRVFNVTPHGVGVIVNKRVRHRIIPKRINLRIEHVKHSKCRQDFLERAKKNRELRKEAKKAGIKVCCKRQPEGPRPAHFVKLNGRQEPELLQPLPYEFIA

SEQ ID NO: 2601 - DNA, 480 bp, Lysiphlebus testaceipes
  CDS (1)..(480)
atgacaaattccaaaggttatcgtcgtggtacgagagatttgttttctcgtaaattccgtaatcatggaacaattccattgtctacgtatatgaaagtatacaaagtcggagatattgtagacatcaagggaaatggtgctgttcagaagggtatgccctacaaggtataccatggtaaaactggtagagtttttaacgttgcacctcatgcagtaggtgtcatcgtcaacaaacgtgttcgtggcaatattcttgctaaacgtattaatgtacgtattgagcatgttacacactcaaaatgtcgtgaagactttttgaaacgtgtaaaacaaaatgaaaaattaagaaaagaagccaaggaaaagaaggttgctgttcaactcaaaagacaaccaaaacaaccatcaaaagcacatattgtatcaggaagagaagcaccaattgttcttgctccaatcccatatgaatttattgcttaa

SEQ ID NO: 2602 - protein, 159 aa, Lysiphlebus testaceipes
MTNSKGYRRGTRDLFSRKFRNHGTIPLSTYMKVYKVGDIVDIKGNGAVQKGMPYKVYHGKTGRVFNVAPHAVGVIVNKRVRGNILAKRINVRIEHVTHSKCREDFLKRVKQNEKLRKEAKEKKVAVQLKRQPKQPSKAHIVSGREAPIVLAPIPYEFIA

SEQ ID NO: 2603 - DNA, 480 bp, Culicoides sonorensis
  CDS (1)..(480)
atgactaggactcatggttatcgtcgtggaacgagagacatgttctctcgccccttccgcaagcacggagttatcccattgtccacatatatgaaagtatacaaatgtggagactatgttgatatcaagggtcatggtgcagttcataaaggaatgccttttaaagcttaccatggtaaaactggtcgtgtttacaatgtgaccaaacacagtttaggtgtcatagtaaacaaaagacaccgtggaaagattctccccaagcgaatcaatgttcgtgttgaacatgtggaacaatcaaggtgtcgtcaagactttttgcgtcgcgtaaaggaaaacgatcaaaagaaacgtgaagctcgcgccaagaaacaaaaagtcatctgtaaacgtaagcctgtggaaccttcagaagctaaagtaattgaaaatccaccagaaccaattaaactggctccaattccatatgaattcattgcttaa

SEQ ID NO: 2604 - protein, 159 aa, Culicoides sonorensis
MTRTHGYRRGTRDMFSRPFRKHGVIPLSTYMKVYKCGDYVDIKGHGAVHKGMPFKAYHGKTGRVYNVTKHSLGVIVNKRHRGKILPKRINVRVEHVEQSRCRQDFLRRVKENDQKKREARAKKQKVICKRKPVEPSEAKVIENPPEPIKLAPIPYEFIA

SEQ ID NO: 2605 - DNA, 480 bp, Heliothis zea
  CDS (1)..(480)
atgacgaactccaagggttatcgtcgcggaaccagggatttgttcgcccgcagattccgcactcatggaaccatcccgctgtccacgtacatgaaagtgtacaaagtcggcgacatcgttgacatcaggggtaatggtgcagtccagaagggtatgccccacaaagcttaccacggaaagactggccgtgtatacaatgtcacacagcacgctcttggagtgattgtgaacaagcgtgtccgcggaaggatcctacccaagcgcatcaacgtccgcattgaacacatcaagcactccaagtgcagacaggatttcctcaagagggtgaaggagaacgagaggctcctggctgaggccaaggccgctggcaagatcgctaacctcaagagacaacctgccggacctaagcccgctcacattgtcagtggtactgagaaaccagtgctattggctcccatcccctatgagtttgtagcttaa

SEQ ID NO: 2606 - protein, 159 aa, Heliothis zea
MTNSKGYRRGTRDLFARRFRTHGTIPLSTYMKVYKVGDIVDIRGNGAVQKGMPHKAYHGKTGRVYNVTQHALGVIVNKRVRGRILPKRINVRIEHIKHSKCRQDFLKRVKENERLLAEAKAAGKIANLKRQPAGPKPAHIVSGTEKPVLLAPIPYEFVA

SEQ ID NO: 2607 - DNA, 480 bp, Plutella xylostella
  CDS (1)..(480)
atgacgaactccaagggttaccgccgcggtactagggacctgttcgcccgcaggttccgcacacatggaaccatctccctgtccacgtacatgaaagtgtacaaagttggagatatcgtcgacatcaggggcaacggtgcagtccagaagggtatgccacacaaagtgtaccacggaaagactggtcgcgtttacaacgtcacagcccacgctcttggcgtcatcgtcaacaagcgagtacgtggcaggattctacccaagaggatcaacatccgcattgagcacgtcaagcactccaagtgccgtcaggacttcctcacccgtgtcaaggagaacgagaggctgctgaaggaagccaaggctgccggcaaggtcgccaagctaaagagacagcccgcacagcccaagcccgcgcacatagtgagcggagacgagaagcctgtgctcctcgcccccatcccctatgagtttgtagcttaa

SEQ ID NO: 2608 - protein, 159 aa, Plutella xylostella
MTNSKGYRRGTRDLFARRFRTHGTISLSTYMKVYKVGDIVDIRGNGAVQKGMPHKVYHGKTGRVYNVTAHALGVIVNKRVRGRILPKRINIRIEHVKHSKCRQDFLTRVKENERLLKEAKAAGKVAKLKRQPAQPKPAHIVSGDEKPVLLAPIPYEFVA

SEQ ID NO: 2609 - DNA, 483 bp, Oikopleura dioica
  CDS (1)..(483)
atgaccaaccctaaaggtactcgtcggggtacccgatacatgttctccaaggacttccgaaagaagggaaccattggcttgaagacctacttcgccaactaccacaagggagacatcgtcgacatcaagggtgatggtgccttccagaagggtatgccgcacaaggtctaccacggaaccaccggtcgagtgttcaacgtttctcgaaaggccgtcggtgttatcgtcaacaagaagcacaacggacgaatcatcgccaagcgaatcaacctccgaatcgagcacgtccgacactccaagtcgcgacagggtttccttgaccgagtcgtcgccaacaacgcccgcatcgctgaggccaagaaggctggcaccttcgttgatgtcaagcgaatcaacgtccagccccgacccgctcacaccgtcaaacttttcggcaaagaacccgagatggtcgctcctattccatacgaattccttatctaa

SEQ ID NO: 2610 - protein, 160 aa, Oikopleura dioica
MTNPKGTRRGTRYMFSKDFRKKGTIGLKTYFANYHKGDIVDIKGDGAFQKGMPHKVYHGTTGRVFNVSRKAVGVIVNKKHNGRIIAKRINLRIEHVRHSKSRQGFLDRVVANNARIAEAKKAGTFVDVKRINVQPRPAHTVKLFGKEPEMVAPIPYEFLI

SEQ ID NO: 2611 - DNA, 486 bp, Ornithodoros moubata
  CDS (1)..(486)
atggtgaacacgaagggttaccggagaggcactaggtacctcttcgcccggaaattcaggcgacacggcgtagagcatctgtctacctatctgcaggtctacaagcgaggtgactatgttgatattaagggtaacggagccttccagaaaggcatgccattcaagttctatcatgggaagaccggtaaggttttcaacgtgactccccacgccgtcggagtcattgtcaacaagcgggtcaggcaccgcatcatcccaaagcgtatcaacgtccgcattgaacacattaagcactccaactgccgtaaagaatacctggaacgtatcaagaagaatcgcgttctcagggaagaagccaagaaggctggcatcaagatatgtttaaaaagacagccggagggcccaaggcctgggcactttgtgaagttgaatggaaaacaggagccagaattggtgcagcccctgccttatgagttcattgcctga

SEQ ID NO: 2612 - protein, 161 aa, Ornithodoros moubata
MVNTKGYRRGTRYLFARKFRRHGVEHLSTYLQVYKRGDYVDIKGNGAFQKGMPFKFYHGKTGKVFNVTPHAVGVIVNKRVRHRIIPKRINVRIEHIKHSNCRKEYLERIKKNRVLREEAKKAGIKICLKRQPEGPRPGHFVKLNGKQEPELVQPLPYEFIA

SEQ ID NO: 2613 - DNA, 483 bp, Branchiostoma belcheri tsingtauense
  CDS (1)..(483)
atgacgaacggccatggttatcgccgcggtacgcggtatatgttcagccgcaaattcagggcacgtggtcccatccatctgtccacctacctccatgtctacaagcgcggtgacatcgtggacgtcaagggcacgggtactgtgcagaagggcatgccttacaaggcctaccacggccgcactgggcggatcttcaacgtcacaaatcacgcagttggtgtcatcgtcaacaagagagtagggaaccgcgtcatcccgaagcgcatcaacctccgcgtggagcacgtgaagcactcccgctccagggaggacttcctcaagcgcgtcaagaagaacgatgagctgaagaagaagcacaaggaaactggcgtctcccaggtcttgaaaagagagcccggtggaccccgtgccggccacatggtaagcaccaacaacaacgtgccccagctggtggagcccatcccatacgagttcatcgcatag

SEQ ID NO: 2614 - protein, 160 aa, Branchiostoma belcheri tsingtauense
MTNGHGYRRGTRYMFSRKFRARGPIHLSTYLHVYKRGDIVDVKGTGTVQKGMPYKAYHGRTGRIFNVTNHAVGVIVNKRVGNRVIPKRINLRVEHVKHSRSREDFLKRVKKNDELKKKHKETGVSQVLKREPGGPRAGHMVSTNNNVPQLVEPIPYEFIA

SEQ ID NO: 2615 - DNA, 483 bp, Aequipecten irradians
  CDS (1)..(483)
atgaccaacacaaagggatataggcgcggtacgcgctacatgttctctcgtcaattcaagacaaagggagtcattccattgtctacgtatatgaaaatatacagaagaggagacatcgtcgatgttaagggccacggagctgtacagaagggtatgccccacaaggtctaccacggaaagactggccgagtattcaatgtcactcctcacgctgttggtgttgttgtaaacaagcgtgtcggacaccgagttctgcccaagagaatcaacttgaggattgaacacgtgaaacactcaaactgtcgtctggacttcgtgaagcgtgtgaaggaaaacgccgaaaagaagaaggaggctaaggagaagggaatcatgcttagcttgaaacgccagcctaaacagcccaacacatcccactttgtgaggacgaaatacaacaagcctcagctgattgaaccaattccatacgagttcattgcctag

SEQ ID NO: 2616 - protein, 160 aa, Aequipecten irradians
MTNTKGYRRGTRYMFSRQFKTKGVIPLSTYMKIYRRGDIVDVKGHGAVQKGMPHKVYHGKTGRVFNVTPHAVGVVVNKRVGHRVLPKRINLRIEHVKHSNCRLDFVKRVKENAEKKKEAKEKGIMLSLKRQPKQPNTSHFVRTKYNKPQLIEPIPYEFIA

SEQ ID NO: 2617 - DNA, 480 bp, Spodoptera frugiperda
  CDS (1)..(480)
atgacgaactccaagggttatcgccgcggaactagggatttgttcgcccgcagattccgcacccatggaaccatccccctttcgacgtacatgaaagtgtacaaagtcggagacatcgttgacatcaggggtaatggtgcagtccagaagggtatgccccacaaagtctaccacggaaagactggccgtgtctacaatgtcacacaacacgctctgggcatcatcgtgaacaagcgtgtccgcggaaggatcctacctaagcgcatcaacgtccgcattgagcacatcaagcactccaagtgcagacaggacttcctcaagagggtgaaggagaatgagaggctcctgaaggaagctaaggctgccggcaagatcgtcaacctcaagagacaaccagctggacccaagcctgctcatattgtcagtggcactgagaaaccagtgttattggctcccatcccctatgagtttgtagcttaa

SEQ ID NO: 2618 - protein, 159 aa, Spodoptera frugiperda
MTNSKGYRRGTRDLFARRFRTHGTIPLSTYMKVYKVGDIVDIRGNGAVQKGMPHKVYHGKTGRVYNVTQHALGIIVNKRVRGRILPKRINVRIEHIKHSKCRQDFLKRVKENERLLKEAKAAGKIVNLKRQPAGPKPAHIVSGTEKPVLLAPIPYEFVA

SEQ ID NO: 2619 - DNA, 495 bp, Oryza sativa
  CDS (1)..(495)
atgccggcggaccacgggctgcgtgcgcggacgcgcgacctgttcgcgcggccgttcaggaagaaggggtacatcccgctcaccacctacctccgcacctacaagatcggcgagcacgtcgacgtcaaggtgaacggcgccgtgcacaaggggatgccgcacaagttctaccacggccgcaccggccgcgtctggaacgtcaccaagcgcgccatcggcgtcgagatcaacaagcaggttgggaaccgcattatcaggaagaggatccatgtccgtgtggagcatgtgcagccatccaggtgcactgaggagttccgcctgaggaagatcaagaacgaccagctcaaggcagatgccaaggctcgtggtgaggtcatcagcacgaagaggcagccgcagggtcctaagcctggcttcatggttgagggtgcaacactggagactgtcacccccatcccgtacgatgtggtcaatgatctcaagggtggttactag

SEQ ID NO: 2620 - protein, 164 aa, Oryza sativa
MPADHGLRARTRDLFARPFRKKGYIPLTTYLRTYKIGEHVDVKVNGAVHKGMPHKFYHGRTGRVWNVTKRAIGVEINKQVGNRIIRKRIHVRVEHVQPSRCTEEFRLRKIKNDQLKADAKARGEVISTKRQPQGPKPGFMVEGATLETVTPIPYDVVNDLKGGY

SEQ ID NO: 2621 - DNA, 495 bp, Arabidopsis thaliana
  CDS (1)..(495)
atgccggctggacatggagttcgagcgagaacgagggatctgttcgcgaggcctttcaggaagaagggttacattcctctatcgacttacctgaggaccttcaaggtcggcgattacgtcgatgtgaaggtgaatggtgcgatccacaagggtatgcctcacaagttctaccatggtcgtactggtcgtatctggaacgtcaccaagcgcgccgtcggtgttgaagtcaacaaacagattgggaacaggatcataaggaagaggattcatgttcgtgtggagcatgtgcagcagtcaagatgtgccgaggagttcaagctgaggaagaagaaaaacgatgagctcaaggctgcagccaaagccaatggtgagaccatcagcaccaagagacagcctaaaggacccaaaccaggattcatggtcgaaggaatgaccttggagactgtcactccaatcccctacgatgtcgtcaacgatctcaaaggaggctattag

SEQ ID NO: 2622 - protein, 164 aa, Arabidopsis thaliana
MPAGHGVRARTRDLFARPFRKKGYIPLSTYLRTFKVGDYVDVKVNGAIHKGMPHKFYHGRTGRIWNVTKRAVGVEVNKQIGNRIIRKRIHVRVEHVQQSRCAEEFKLRKKKNDELKAAAKANGETISTKRQPKGPKPGFMVEGMTLETVTPIPYDVVNDLKGGY

SEQ ID NO: 2623 - DNA, 495 bp, Arabidopsis thaliana
  CDS (1)..(495)
atgccggcgggacacggagtgagggcgagaacaagagatctgttcgcgagaccattcaggaagaagggttatattccactctccacttacctcagaaccttcaaggtcggcgattacgtcgatgtcaaggttaatggagctatccacaagggtatgcctcataagttctaccatggtcgtactggtcgcatctggaatgtcactaagcgtgccgttggtgttgaagtcaacaaacagattgggaacagaatcataaggaagaggatacatgtgcgtgtggagcatgtgcaacagtcaaggtgtgctgaggagtttaaactcagaaagaagcagaacgatgtgcttaaggctgatgctaaagccagaggagagactatcagcaccaagagacagcctaaaggtcctaaaccgggtttcatggtcgaaggtatgacattggagactgtcactcccattccttacgatgttgtcaacgatctcaagggtggttattga

SEQ ID NO: 2624 - protein, 164 aa, Arabidopsis thaliana
MPAGHGVRARTRDLFARPFRKKGYIPLSTYLRTFKVGDYVDVKVNGAIHKGMPHKFYHGRTGRIWNVTKRAVGVEVNKQIGNRIIRKRIHVRVEHVQQSRCAEEFKLRKKQNDVLKADAKARGETISTKRQPKGPKPGFMVEGMTLETVTPIPYDVVNDLKGGY

SEQ ID NO: 2625 - DNA, 483 bp, Schizosaccharomyces pombe
  CDS (1)..(483)
atgcctcattcctatggtattagagctcgtacccgctacacttttcagcgtggtttcagggagcatggtcagatccgtttgtccacttacttgaaaacttacaaagttggtgatattgtcgacattaaggtcaatggtgctgtccagaagggtatgcctcacaagtattaccatggtaagactggtgtcgtttacaacgttactcaatcatccgttggtgtcttgatctacaaggttgttggtaaccgttacatggaaaagcgtgtcaatgttcgtattgagcacgttaagcattccaagtgccgtcaagacttcttggaccgtgtcaaggccaacgaggctaagcgtaaggaggccaaggctcagggtaagactgttcaacttcgtcgtcaacccgctcctcccgccaaggctcattttgtttccactgagaacaacgagcctgtcactcttcaccccgttgcctatgatactaccatttaa

SEQ ID NO: 2626 - protein, 160 aa, Schizosaccharomyces pombe
MPHSYGIRARTRYTFQRGFREHGQIRLSTYLKTYKVGDIVDIKVNGAVQKGMPHKYYHGKTGVVYNVTQSSVGVLIYKVVGNRYMEKRVNVRIEHVKHSKCRQDFLDRVKANEAKRKEAKAQGKTVQLRRQPAPPAKAHFVSTENNEPVTLHPVAYDTTI

SEQ ID NO: 2627 - DNA, 483 bp, Saccharomyces cerevisiae
  CDS (1)..(483)
atgggtaaatcacacggttacagatctcgtactcgttacatgttccaacgtgacttcagaaagcatggtgccgtccatctttctacttacttgaaggtctacaaggttggtgacattgtcgacatcaaagccaatggttctatccaaaagggtatgccacacaagttttaccaaggtaagaccggtgttgtctacaacgttactaagtcttctgttggtgttatcatcaacaagatggtcggtaacagatatctagaaaaaagattaaacttaagagttgaacacatcaagcactccaagtgtagacaagaatttttggaaagagttaaggccaatgctgctaagcgtgctgaagctaaggctcaaggtgttgctgttcaattgaagagacaaccagctcaaccaagagaatcccgtatcgtttctactgaaggtaacgttcctcaaactttggccccagttccatacgaaactttcatctaa

SEQ ID NO: 2628 - protein, 160 aa, Saccharomyces cerevisiae
MGKSHGYRSRTRYMFQRDFRKHGAVHLSTYLKVYKVGDIVDIKANGSIQKGMPHKFYQGKTGVVYNVTKSSVGVIINKMVGNRYLEKRLNLRVEHIKHSKCRQEFLERVKANAAKRAEAKAQGVAVQLKRQPAQPRESRIVSTEGNVPQTLAPVPYETFI

SEQ ID NO: 2629 - DNA, 483 bp, Schizosaccharomyces pombe
  CDS (1)..(483)
atgcctcattcttacggtatcagagctcgcacccgttacacctttcaacgtggtttcagagagcatggtcaaattcgtttgtccacttatttgaagacctataaggttggtgacattgtcgacattaaggttaatggtgctgtccaaaagggtatgcctcacaagtactaccatggcaagactggtgttgtttacaacgttactcaatcttctgttggtgtcttgatctacaaggttgttggtaaccgctacatggagaagcgtgtcaatgttcgtattgagcacgttaagcactctaagtgccgtcaagacttcttggaccgtgttaaggccaatgaggctaagcgtaaggaggccaaggctcagggtaagactgttcaacttcgtcgtcaacctgctcctcctgctacggctcatttcgtttctactgagaataacgagcccgtcactctccaccccgtcgcctatgatactactatctag

SEQ ID NO: 2630 - protein, 160 aa, Schizosaccharomyces pombe
MPHSYGIRARTRYTFQRGFREHGQIRLSTYLKTYKVGDIVDIKVNGAVQKGMPHKYYHGKTGVVYNVTQSSVGVLIYKVVGNRYMEKRVNVRIEHVKHSKCRQDFLDRVKANEAKRKEAKAQGKTVQLRRQPAPPATAHFVSTENNEPVTLHPVAYDTTI

SEQ ID NO: 2631 - DNA, 483 bp, Encephalitozoon cuniculi
  CDS (1)..(483)
atgaggagcaagggatacagaagaggaaccaggtatctattttcacaggaccacaggaagcacggagttgcacatgtgtcgaagtatctcgaaaagtacgagattggagacatggtggacattctagtcaatccggcgatgatgaaggggatgcctcacaagtactaccatgggaggacgggacgcgtgtatgatgtgaagcccaggtctctcaacgttgctctttacaagagggttcgtggaaagtatgtgatcaagaagatcattgtgcgtattgagcacgtgaggaagagtaggtgctcagaagagagccaaaagaggattcttatggctgcagaaatggcaagggatgccgagtcgagaggagtggtgcttgcaccttccaaaaggaagattgaaggcccgaggaaggcggtggaggtatcccttgataacaatcagcccattgaggtgggatacgagccccacgtggtgatcttctaa

SEQ ID NO: 2632 - protein, 160 aa, Encephalitozoon cuniculi
MRSKGYRRGTRYLFSQDHRKHGVAHVSKYLEKYEIGDMVDILVNPAMMKGMPHKYYHGRTGRVYDVKPRSLNVALYKRVRGKYVIKKIIVRIEHVRKSRCSEESQKRILMAAEMARDAESRGVVLAPSKRKIEGPRKAVEVSLDNNQPIEVGYEPHVVIF

SEQ ID NO: 2633 - DNA, 495 bp, Oryza sativa
  CDS (1)..(495)
atgccggcggggcacgggctgcgggcgcggacgcgcgacctcttcgcgcggccgttccgcaagaagggttacatcccgctcaccacctacctgaggacgtacaagatcggcgattacgtcgacgtcaaggtgaacggcgccgtgcacaagggcatgccgcacaagttctaccacggccgcaccggccgcgtctggaacgtcaccaagcgcgccatcggcgtcgagatcaacaagcaggtcggtaaccgcatcatcaggaagaggatccatgtccgtgtggagcatgtccagccatccaggtgcaccgaggagctccgcctgaggaaaatcaagaacgatcagctcaaggctgatgccaaggcccgtggtgaggttatcagcaccaagagacagcccgagggacccaaacctggtttcatggttgagggtgctacgctggagactgttacccccattccgtatgatgtggtcaatgatctcaagggtggttactag

SEQ ID NO: 2634 - protein, 164 aa, Oryza sativa
MPAGHGLRARTRDLFARPFRKKGYIPLTTYLRTYKIGDYVDVKVNGAVHKGMPHKFYHGRTGRVWNVTKRAIGVEINKQVGNRIIRKRIHVRVEHVQPSRCTEELRLRKIKNDQLKADAKARGEVISTKRQPEGPKPGFMVEGATLETVTPIPYDVVNDLKGGY

SEQ ID NO: 2635 - DNA, 495 bp, Oryza sativa
  CDS (1)..(495)
atgccggcgggccacgggctgcgtgcgcggacgcgcgacctgttcgcgcggccgttcaggaagaaggggtacatcccgctcaccacctacctccgcacctacaagatcggcgagcacgtcgacgtcaaggtgaacggcgccgtgcacaaggggatgccgcacaagttctaccacggccgcaccggccgcgtctggaacgtcaccaagcgcgccatcggcgtcgagatcaacaagcaggttgggaaccgcattatcaggaagaggatccatgtccgtgtggagcatgtgcagccatccaggtgcactgaggagttccgcctgaggaagatcaagaacgaccagctcaaggcagatgccaaggctcgtggtgaggtcatcagcacgaagaggcagccgcagggtcctaagcccggcttcatggttgagggtgcaacactggagactgtcacccccatcccgtacgatgtggtcaatgatctcaagggtggttactag

SEQ ID NO: 2636 - protein, 164 aa, Oryza sativa
MPAGHGLRARTRDLFARPFRKKGYIPLTTYLRTYKIGEHVDVKVNGAVHKGMPHKFYHGRTGRVWNVTKRAIGVEINKQVGNRIIRKRIHVRVEHVQPSRCTEEFRLRKIKNDQLKADAKARGEVISTKRQPQGPKPGFMVEGATLETVTPIPYDVVNDLKGGY

SEQ ID NO: 2637 - DNA, 495 bp, Brassica napus
  CDS (1)..(495)
atgccggcgggacatggagttcgtgctaggacaagagatctgttcgctagggggttcaggaagaagggtacaattccattgtcgacctacctcaggaccttcaaggtcggagaatacgtggatgttaaagtgaacggtgcgatccacaagggtatgcctcacaagttctaccatggtcgtaccggtcgtgtctggaacgttacgaaacgtgccgtcggtgtcgaagtcaacaaacagattggcaacaggatcattaagaagaggcttcatgtgcgtgtggagcacgtgcagcagtcaaggtgcgcagaggagttcaagctgaggattaagaagaacgatgagctcaaggctgcagccaaagccaaaggcgagacaataagcaccaagaggcaacctaaaggacccaaaccaggattcatggtcgaaggtatgaccttggagactgtcactccaatcccttacgatgtcgtcaacgatctcaagggaggctattag

SEQ ID NO: 2638 - protein, 164 aa, Brassica napus
MPAGHGVRARTRDLFARGFRKKGTIPLSTYLRTFKVGEYVDVKVNGAIHKGMPHKFYHGRTGRVWNVTKRAVGVEVNKQIGNRIIKKRLHVRVEHVQQSRCAEEFKLRIKKNDELKAAAKAKGETISTKRQPKGPKPGFMVEGMTLETVTPIPYDVVNDLKGGY

SEQ ID NO: 2639 - DNA, 495 bp, Brassica napus
  CDS (1)..(495)
atgccggcgggacatggagttcgtgctcgaacgagggatctgttcgcgagggggttcaggaagaagggtacaattccattgtccacgtacctcaggaccttcaaggtcggcgaatacgtcgatgttaaagtgaatggcgccatccacaagggtatgcctcacaagttctaccacggtcgtactggtcgtgtctggaacgttaccaaacgtgctgttggtgtcgaagtcaacaaacagattggaaacaggatcataaagaagaggcttcatgtgcgtgtggagcatgtgcagcagtctagatgtgcggaagagttcaaactgaggataaagaagaacgatgagctcaaagctgcagccaaagctagaggcgagacaataagcaccaagaggcagcctaaaggacccaaaccaggattcatggtcgaaggtatgaccttggagactgtcactcctatcccctacgacgtcgtcaacgacctcaagggaggctattag

SEQ ID NO: 2640 - protein, 164 aa, Brassica napus
MPAGHGVRARTRDLFARGFRKKGTIPLSTYLRTFKVGEYVDVKVNGAIHKGMPHKFYHGRTGRVWNVTKRAVGVEVNKQIGNRIIKKRLHVRVEHVQQSRCAEEFKLRIKKNDELKAAAKARGETISTKRQPKGPKPGFMVEGMTLETVTPIPYDVVNDLKGGY

SEQ ID NO: 2641 - DNA, 495 bp, Brassica napus
  CDS (1)..(495)
atgccggcgggtcatggagttcgcgcgaggacgagggatctgtttgctagagggttcaggaagaagggtacaatccccgggtcgacctacctcaggaccttcaaggtcggagaatacgtggatgttaaagtgaacggtgcgatccacaagggtatgcctcacaagttctaccatggtcgtaccggtcgtgtctggaacgttacgaaacgtgccgtcggtgtcgaagtcaacaaacagattggcaacaggatcattaagaagaggcttcatgtgcgtgtggagcacgtgcagcagtcaaggtgcgcagaggagttcaagctgaggattaagaagaacgatgagctcaaggctgcagccaaagccaaaggcgagacaataagcaccaagaggcagcctaaaggacccaaaccaggattcatggtcgaaggtatgaccttggagactgtcaccccaatcccttacgatgtcgtcaacgatctcaagggaggctattag

SEQ ID NO: 2642 - protein, 164 aa, Brassica napus
MPAGHGVRARTRDLFARGFRKKGTIPGSTYLRTFKVGEYVDVKVNGAIHKGMPHKFYHGRTGRVWNVTKRAVGVEVNKQIGNRIIKKRLHVRVEHVQQSRCAEEFKLRIKKNDELKAAAKAKGETISTKRQPKGPKPGFMVEGMTLETVTPIPYDVVNDLKGGY

SEQ ID NO: 2643 - DNA, 495 bp, Brassica napus
  CDS (1)..(495)
atgccggcaggtcatggagttcgcgctaggacgagggatctgttcgcgagggggttcaggaagaagggtacaatcccactgtcgacttacctcaggaccttcaaggtcggcgattacgtggatgtcaaggtgaacggtgcgatccacaagggtatgcctcacaagttctaccacggtcgtaccggtcgtgtctggaacgtcaccaagcgcgccgtcggtgtcgaagtcaacaaacagattggaaacaggatcattaggaagaggcttcatgtgcgtgtggagcatgtgcagcagtccaggtgcgcagaggagttcaagctgaggattaagaagaacgatgagctcaaggccgcagccaaagccagaggcgatacaataagcaccaagagacagcctaaaggccccaagccaggattcatggttgagggtatgaccttggagactgtcacccctatcccttacgacgtcgtcaacgatctcaagggaggctactag

SEQ ID NO: 2644 - protein, 164 aa, Brassica napus
MPAGHGVRARTRDLFARGFRKKGTIPLSTYLRTFKVGDYVDVKVNGAIHKGMPHKFYHGRTGRVWNVTKRAVGVEVNKQIGNRIIRKRLHVRVEHVQQSRCAEEFKLRIKKNDELKAAAKARGDTISTKRQPKGPKPGFMVEGMTLETVTPIPYDVVNDLKGGY

SEQ ID NO: 2645 - DNA, 495 bp, Brassica napus
  CDS (1)..(495)
atgccggcgggtcatggagttcgcgctaggacgagggatctgttcgcgagggggttcaggaagaagggtacaatcccactgtcgacttacctcaggaccttcaaggtcggcgattacgtggatgtcaaggtgaacggtgcgatccacaagggtatgcctcacaagttctaccacggtcgtaccggtcgtgtctggaacgtcaccaagcgagccgtcggtgtcgaagtcaacaaacagattggaaacaggatcattaggaagaggcttcatgtgcgtgtggagcacgtgcagcaatccaggtgtgcagaggagttcaagctgaggattaagaagaatgatgagctcaaggccgcagccaaagccagaggtgagacaataagcaccaagagacagcctaaaggccccaagccaggattcatggttgagggtatgaccttggagactgtcaccccaatcccctacgacgtcgtcaacgatctcaagggaggctattag

SEQ ID NO: 2646 - protein, 164 aa, Brassica napus
MPAGHGVRARTRDLFARGFRKKGTIPLSTYLRTFKVGDYVDVKVNGAIHKGMPHKFYHGRTGRVWNVTKRAVGVEVNKQIGNRIIRKRLHVRVEHVQQSRCAEEFKLRIKKNDELKAAAKARGETISTKRQPKGPKPGFMVEGMTLETVTPIPYDVVNDLKGGY

SEQ ID NO: 2647 - DNA, 495 bp, Brassica napus
  CDS (1)..(495)
atgccggcgggacatggagttcgtgctcgaacgagggatctgttcgcgagggggttcaggaagaagggtagaattcccgggtcgacctacctcaggaccttcaaggtcggcgattacgtcgatgttaaagtgaacggtgcgatccacaagggtatgcctcacaagttctaccacggtcgtaccggtcgtgtctggaacgtcaccaagcgagccgtcggtgttgaagtcaacaaacagattggcaacaggatcataaggaagaggcttcatgtgcgtgtggagcatgtgcagcagtcaaggtgtgcagaggagtttaagctgaggattaagaagaacgatgagctcaaggccgcagccaaagccagaggcgagacgataagcaccaagagacagcctaaaggccccaagccaggattcatggttgagggtatgaccttggagaccgtcactcctatcccttacgacgtcgtcaacgatctcaagggaggctattag

SEQ ID NO: 2648 - protein, 164 aa, Brassica napus
MPAGHGVRARTRDLFARGFRKKGRIPGSTYLRTFKVGDYVDVKVNGAIHKGMPHKFYHGRTGRVWNVTKRAVGVEVNKQIGNRIIRKRLHVRVEHVQQSRCAEEFKLRIKKNDELKAAAKARGETISTKRQPKGPKPGFMVEGMTLETVTPIPYDVVNDLKGGY

SEQ ID NO: 2649 - DNA, 495 bp, Brassica napus
  CDS (1)..(495)
atgccggcgggtcacggagtgagggcgagaaccagggatctgttcgcgagagggttcaggaagaagggtgttatcccactctctacctacctcaggaccttcaaagtcggtgattacgtggatgtgaaggtaaatggagccatccacaagggtatgcctcacaagttctaccatggtcgtactggtcgtgtctggaacgttactaagcgagctgttggtgtcgaagtcaacaagcagattggtaacagaatcataaggaagaggttgcatgtgcgtgtggagcacgtgcagcagtcaaggtgtgctgaggagtttaaactaaggaagaagaataacgatgtgctcaaggctgcagccaaagccagaggggagacaatcagcaccaagagacagcctaaaggtcccaagcctggtttcatggtcgagggtatgacattggagactgtcactcccatcccttacgatgttgtcaacgatctcaagggtggctattaa

SEQ ID NO: 2650 - protein, 164 aa, Brassica napus
MPAGHGVRARTRDLFARGFRKKGVIPLSTYLRTFKVGDYVDVKVNGAIHKGMPHKFYHGRTGRVWNVTKRAVGVEVNKQIGNRIIRKRLHVRVEHVQQSRCAEEFKLRKKNNDVLKAAAKARGETISTKRQPKGPKPGFMVEGMTLETVTPIPYDVVNDLKGGY

SEQ ID NO: 2651 - DNA, 495 bp, Brassica napus
  CDS (1)..(495)
atgccggcgggacatggagttcgtgctaggacaagagatctgttcgcgagggggttcaggaagaagggtacaattccattgtctacctacctcaggaccttcaaggtcggagattacgtggatgttaaagtgaatggtgcgatccacaagggtatgcctcacaagttctaccatggtcgtaccggtcgtgtctggaacgttacgaaacgtgccgtcggtgtcgaagtcaacaaacagattggcaacaggatcattaagaagaggcttcatgtgcgtgtggagcacgtgcagcagtcaaggtgcgcagaggagttcaagctgaggattaagaagaacgatgagctcaaggctgcagccaaagccaaaggcgagacaataagcaccaagaggcaacctaaaggacccaaaccaggattcatggtcgaaggtatgaccttggagactgtcaccccaatcccttacgatgtcgtcaacgatctcaagggaggctattag

SEQ ID NO: 2652 - protein, 164 aa, Brassica napus
MPAGHGVRARTRDLFARGFRKKGTIPLSTYLRTFKVGDYVDVKVNGAIHKGMPHKFYHGRTGRVWNVTKRAVGVEVNKQIGNRIIKKRLHVRVEHVQQSRCAEEFKLRIKKNDELKAAAKAKGETISTKRQPKGPKPGFMVEGMTLETVTPIPYDVVNDLKGGY

SEQ ID NO: 2653 - DNA, 495 bp, Helianthus annuus
  CDS (1)..(495)
atgccggctggtcacgggttacgctcaagaacaagggatttgttcgcaagagggttcaggaagaagggaaccatccatctctccacatacctcagaacctaccatgtcggagattacgtcgacatcaaggttaacggcgccgttcacaagggtatgccccacaagttctaccatggtcgcactggtcaggtctggaatgtcaccaagcgtgctattggagtcgagatgaacaaacaggttggtaacagaatcattaagaagaggattcatgtgcgaattgagcatgtgatgccatcaaggtgcaacgaagagttgaagcagaggatcaagaagaacgatcaactaaaggctgaggctaaggcgaagggtgtggtgatcagtactaagaggcagccgcttggacccaaaccgggatttatggttgaaggaaccaccctagagactgtgactcctattccttatgatgtggtcaatgatctcaagggtggatattaa

SEQ ID NO: 2654 - protein, 164 aa, Helianthus annuus
MPAGHGLRSRTRDLFARGFRKKGTIHLSTYLRTYHVGDYVDIKVNGAVHKGMPHKFYHGRTGQVWNVTKRAIGVEMNKQVGNRIIKKRIHVRIEHVMPSRCNEELKQRIKKNDQLKAEAKAKGVVISTKRQPLGPKPGFMVEGTTLETVTPIPYDVVNDLKGGY

SEQ ID NO: 2655 - DNA, 495 bp, Hordeum vulgare
  CDS (1)..(495)
atgccggcgggccatggtctgcggtcgcggacgcgcgacctgttcgcgcgccccttccggaagaagggttacatcccgctcaccacctacctgcgcacctacaaggtcggcgagtacgtcgacgtcaaggtgaacggcgccgtgcacaagggtatgccgcacaagttctaccacggccgcaccggacgcgtgtggaacgtcaccaagcgcgccatcggcgtcgagatcaacaagcaggttggaaaccgcatcatcaggaaaaggatccatgtccgtgttgagcatgtgcagccatccaggtgtgctgaggagttccgcctgaggaaagtgaagaatgaccagctcaaggcggaagccaaggcacgtggtgaggtcatcagcaccaagaggcagccactcggccctaaacccgggttcatggtcgagggtaccacaatcgagaccgtcactcccattccttatgatgtggtcaatgatctcaagggtggttactag

SEQ ID NO: 2656 - protein, 164 aa, Hordeum vulgare
MPAGHGLRSRTRDLFARPFRKKGYIPLTTYLRTYKVGEYVDVKVNGAVHKGMPHKFYHGRTGRVWNVTKRAIGVEINKQVGNRIIRKRIHVRVEHVQPSRCAEEFRLRKVKNDQLKAEAKARGEVISTKRQPLGPKPGFMVEGTTIETVTPIPYDVVNDLKGGY

SEQ ID NO: 2657 - DNA, 495 bp, Hordeum vulgare
  CDS (1)..(495)
atgccggcgggccatggtctgcggtcgcggacgcgcgacctgttcgcgcgccccttccggaagaagggttacatcccgctcaccacctacctgcgcacctacaaggtcggcgagtacgtcgacgtcaaggtgaacggcgccgtgcacaagggtatgccgcacaagttctaccacggccgcaccggacgcgtgtggaacgtcaccaagcgcgccatcggcgccgagatcaacaagcaggttggaaaccgcatcatcaggaaaaggatccatgtccgtgttgagcatgtgcagccatccaggtgtgctgaggagttccgcctgaggaaagtgaagaatgaccagctcaaggcggaagccaaggcacgtggtgaggtcatcagcaccaagaggcagccactcggccctaaacccgggttcatggtcgagggtaccacaatcgagaccgtcactcccattccttatgatgtggtcaatgatctcaagggtggttactag

SEQ ID NO: 2658 - protein, 164 aa, Hordeum vulgare
MPAGHGLRSRTRDLFARPFRKKGYIPLTTYLRTYKVGEYVDVKVNGAVHKGMPHKFYHGRTGRVWNVTKRAIGAEINKQVGNRIIRKRIHVRVEHVQPSRCAEEFRLRKVKNDQLKAEAKARGEVISTKRQPLGPKPGFMVEGTTIETVTPIPYDVVNDLKGGY

SEQ ID NO: 2659 - DNA, 498 bp, Oryza sativa
  CDS (1)..(498)
atgccggcggggcacgggctgcgggcgcggacgcgcgacctcttcgcgcggccgttccgcaagaagggttacatcccgctcaccacctacctgaggacgtacaagatcggcgattcccgggtcgacgtcaaggtgaacggcgccgtgcacaagggcatgccgcacaagttctaccacggccgcaccggccgcgtctggaacgtcaccaagcgcgccatcggcgtcgagatcaacaagcaggtcggtaaccgcatcatcaggaagaggatccatgtccgtgtggagcatgtccagccatccaggtgcaccgaggagctccgcctgaggaaaatcaagaacgatcagctcaaggctgatgccaaggcccgtggtgaggttatcagcaccaagagacagcccgagggacccaaacctggtttcatggttgagggtgctacgctggagactgttacccccattccgtatgatgtggtcaatgatctcaagggtggttactag

SEQ ID NO: 2660 - protein, 165 aa, Oryza sativa
MPAGHGLRARTRDLFARPFRKKGYIPLTTYLRTYKIGDSRVDVKVNGAVHKGMPHKFYHGRTGRVWNVTKRAIGVEINKQVGNRIIRKRIHVRVEHVQPSRCTEELRLRKIKNDQLKADAKARGEVISTKRQPEGPKPGFMVEGATLETVTPIPYDVVNDLKGGY

SEQ ID NO: 2661 - DNA, 495 bp, Zea mays
  CDS (1)..(495)
atgccggctggccacggcctgcgctcgcggacgcgcgacctcttcgcgcgccccttccgcaagaagggctacatcccgctcaccacctacctccgcacctacaagatcggcgattacgtcgatgtcaaggtgaacggcgccgtccacaaggggatgccgcacaagttctaccacggccgcaccggtcgcgtctggaacgtcaccaagcgcgccatcggcgtcgaggtcaacaagcaggtcaatgggcgcatcatcaggaagcgtatccatgtccgtgtggagcatgtgcagccgtcccgctgcacagaagagttccgcctgaggaaggcgaagaatgaccagctgaaggcggatgccaaaaagtgcggcgaggttatcagcaccaagaggcagccattgggtcccaagcccggcttcatggtcgagggcaccaccattgagaccgtaactcccatcccatatgatgtggtcaatgatctcaagggtggatactag

SEQ ID NO: 2662 - protein, 164 aa, Zea mays
MPAGHGLRSRTRDLFARPFRKKGYIPLTTYLRTYKIGDYVDVKVNGAVHKGMPHKFYHGRTGRVWNVTKRAIGVEVNKQVNGRIIRKRIHVRVEHVQPSRCTEEFRLRKAKNDQLKADAKKCGEVISTKRQPLGPKPGFMVEGTTIETVTPIPYDVVNDLKGGY

SEQ ID NO: 2663 - DNA, 483 bp, Triticum aestivum
  CDS (1)..(483)
atgggtcactcctacggaaagagagcgggcacccgctatgccttcagccgggacttccgcaagaagggtatgattgccctgaacacctacctccgacagtaccgcgttggagatatcgtcgacatcaaggcgaacggtgccgtccagaagggtatgcccttcaaggtctaccacggaaagactggtgtcatctacaacgtcaccaagtccgctgtcggtgtcatcatctacaagcaggtcaagcaccgatacatcgagaagcgaatcaacgtccgaatcgagcacatccagcagtcccgatctcgtgaggacttcctcaagcgagtcaaggctaacgccgaggccaagcgtgaggccaaggccaccggaaccgttgtccaggtcaagcgtcagcccattggacctcgtggcgcccacacactgtcgctctccgagaacccccccatgaccgttacccctcttgcctacgagaccacgatctaa

SEQ ID NO: 2664 - protein, 160 aa, Triticum aestivum
MGHSYGKRAGTRYAFSRDFRKKGMIALNTYLRQYRVGDIVDIKANGAVQKGMPFKVYHGKTGVIYNVTKSAVGVIIYKQVKHRYIEKRINVRIEHIQQSRSREDFLKRVKANAEAKREAKATGTVVQVKRQPIGPRGAHTLSLSENPPMTVTPLAYETTI

SEQ ID NO: 2665 - DNA, 495 bp, Triticum aestivum
  CDS (1)..(495)
atgccggcgggccacggtctgcggtcgcggacgcgcgacctgttcgcgcgcccgttccggaagaagggttacatcccgctcaccacctacctgcgcacctacaaggtcggcgagtacgtcgatgtcaaggtgaacggcgccgtgcacaagggtatgccgcacaagttctaccacggccgcaccggacgcgtgtggaacgtcaccaagcgcgccatcggcgtcgagatcaacaagcaggttggaaaccgcattatcaggaaaaggatccatgtccgtgttgagcatgtgcagccatccaggtgtgcggaggagttccgcctgaggaaagtgaagaatgaccagctcaaggaggaagccaaggcacgtggtgaggtcatcagcaccaagaggcagccgctcggccctaaacctgggttcatggttgagggtaccacaatcgagaccgtcactcccattccgtacgatgtggtcaatgatctcaagggtggttactag

SEQ ID NO: 2666 - protein, 164 aa, Triticum aestivum
MPAGHGLRSRTRDLFARPFRKKGYIPLTTYLRTYKVGEYVDVKVNGAVHKGMPHKFYHGRTGRVWNVTKRAIGVEINKQVGNRIIRKRIHVRVEHVQPSRCAEEFRLRKVKNDQLKEEAKARGEVISTKRQPLGPKPGFMVEGTTIETVTPIPYDVVNDLKGGY

SEQ ID NO: 2667 - DNA, 495 bp, Triticum aestivum
  CDS (1)..(495)
atgccgccgggccacggtctgcggtccggaccgcgcgacctgttcgcgcgcccgttccggaagaagggttacatcccgctcaccacctacctgcgcacctacaaggtcggcgagtacgtcgacgtcaaggtgaacggcgccgtgcacaagggtatgccgcacaagttctaccacggccgcaccggacgcgtgtggaacgtcaccaagcgcgccatcggcgttgagatcaacaagcaggttggaaaccgcattatcaggaaaaggatccatgtccgtgttgagcatgtgcagccatccaggtgtgctgaggagttccgcctgaggaaagtgaagaacgaccagctcaaggcggaagccaaggcgcgcggtgaggtcatcagcaccaagaggcagccgctcggccctaaacctgggttcatggtcgagggtaccacaattgagactgtcactcccattccctacgatgcgcccaatgatctcaagggtggttactag

SEQ ID NO: 2668 - protein, 164 aa, Triticum aestivum
MPPGHGLRSGPRDLFARPFRKKGYIPLTTYLRTYKVGEYVDVKVNGAVHKGMPHKFYHGRTGRVWNVTKRAIGVEINKQVGNRIIRKRIHVRVEHVQPSRCAEEFRLRKVKNDQLKAEAKARGEVISTKRQPLGPKPGFMVEGTTIETVTPIPYDAPNDLKGGY

SEQ ID NO: 2669 - DNA, 495 bp, Zea mays
  CDS (1)..(495)
atgccggcggggcacgggctgcggtcgcggacccgcgacctgttcgcgcggcccttccgcaagaaggggtacatcccgctcaccacgtacctgcgcacctacaagatcggcgactacgtcgacgtcaaggttaacggcgccgtgcacaagggcatgccgcacaagttctaccacggccgcaccgggagcgtctggaacgtcaccaagcgcgccatcggcgtcgagatcaacaagcaggttaatggccgcatcatcaggaagcggatccatgtccgcgtggagcatgtgcagccctcccgttgcacagaggagttccgcctgaggaaagccaagaatgaccagctcaaggcggatgccaaggcccgcggtgaggtgatcagcaccaagaggcagcctgtgggacccaaacctggcttcatggttgagggtgctacactcgagacagtcactcctattccttatgatgtggtcaacgatctcaagggcggttactag

SEQ ID NO: 2670 - protein, 164 aa, Zea mays
MPAGHGLRSRTRDLFARPFRKKGYIPLTTYLRTYKIGDYVDVKVNGAVHKGMPHKFYHGRTGSVWNVTKRAIGVEINKQVNGRIIRKRIHVRVEHVQPSRCTEEFRLRKAKNDQLKADAKARGEVISTKRQPVGPKPGFMVEGATLETVTPIPYDVVNDLKGGY

SEQ ID NO: 2671 - DNA, 495 bp, Zea mays
  CDS (1)..(495)
atgccggctggccacgggctgcgctcgcggacgcgcgacctgttcgcgcgccccttccgcaagaagggctacatcccgctcaccacctacctccgcacctacaagatcggcgactacgtcgacgtcaaggtgaacggcgccgtccacaaggggatgccgcacaagttctaccacggccgcaccggtcgcgtctggaacgtcaccaagcgcgccatcggcgtcgagataaacaagcaggtgaatggtcgcatcatcaggaagcgtatccatgtccgcgtggagcatgtgcagccgtcccgctgcacagaagagttccgcctgaggaaggtgaagaatgaccagctgaaggcggatgcaaaggagcgcggcgaggtcatcagcaccaagaggcagccgttgggccccaagcctggcttcatggttgaggggactaccatcgagaccgtcactcccatcccgtacgatgtggtcaatgatcttaagggaggatactag

SEQ ID NO: 2672 - protein, 164 aa, Zea mays
MPAGHGLRSRTRDLFARPFRKKGYIPLTTYLRTYKIGDYVDVKVNGAVHKGMPHKFYHGRTGRVWNVTKRAIGVEINKQVNGRIIRKRIHVRVEHVQPSRCTEEFRLRKVKNDQLKADAKERGEVISTKRQPLGPKPGFMVEGTTIETVTPIPYDVVNDLKGGY

SEQ ID NO: 2673 - DNA, 495 bp, Zea mays
  CDS (1)..(495)
atgccggctggccacgggctgcgctcgcggacgcgcgacctgttcgcgcgccccttccgcaagaagggctacatcccgctcaccacctacctccgcacctacaagatcggcgactacgtcgacgtcaaggtgaacggcgccgtccacaaggggatgccgcacaagttctaccacggccgcaccggtcgcgtctggaacgtcaccaagcgcgccatcggcgtcgagataaacaagcaggtgaatggtcgcatcatcaggaagcgtatccatgtccgcgtggagcatgtgcagccatcccgctgcacagaagagttccgcctgaggaaggtgaagaatgaccagctgaaggcggatgcaaaggagcgcggcgaggtcatcagcaccaagaggcagccgttgggccccaagcctgtcttcatggttgaggggactaccatcgagaccgtcactcccatcccgtacgatgtggtcaatgatcttaagggaggatactag

SEQ ID NO: 2674 - protein, 164 aa, Zea mays
MPAGHGLRSRTRDLFARPFRKKGYIPLTTYLRTYKIGDYVDVKVNGAVHKGMPHKFYHGRTGRVWNVTKRAIGVEINKQVNGRIIRKRIHVRVEHVQPSRCTEEFRLRKVKNDQLKADAKERGEVISTKRQPLGPKPVFMVEGTTIETVTPIPYDVVNDLKGGY

SEQ ID NO: 2675 - DNA, 495 bp, Zea mays
  CDS (1)..(495)
atgccggctggccacggcctgcgctcgcggacgcgcgacctcttcgcgcgccccttccgcaagaagggctacatcccgctcaccacctacctccgcacctacaagatcggcgattacgtcgatgtcaaggtgaacggcgccgtccacaaggggatgccgcacaagttctaccacggccgcaccggtcgcgtctggaacgtcaccaagcgcgccatcggcgtcgaggtcaacaagcaggtcaatgggcgcatcatcaggaagcgtatccatgtccgtgtggagcatgtgcagccgtcccgctgcacagaagagttccgcctgaggaaggcgaagaatgaccagctgaaggcggatgccaaaaagcgcggcgaggttatcagcaccaagaggcagccattgggtcccaagcccggcttcatggtcgagggcaccaccattgagaccgtaactcccatcccatatgatgtggtcaatgatctcaagggtggatactag

SEQ ID NO: 2676 - protein, 164 aa, Zea mays
MPAGHGLRSRTRDLFARPFRKKGYIPLTTYLRTYKIGDYVDVKVNGAVHKGMPHKFYHGRTGRVWNVTKRAIGVEVNKQVNGRIIRKRIHVRVEHVQPSRCTEEFRLRKAKNDQLKADAKKRGEVISTKRQPLGPKPGFMVEGTTIETVTPIPYDVVNDLKGGY

SEQ ID NO: 2677 - DNA, 26 bp, Artificial sequence
  primer
atgggtaaatcgtatgtccatataac

SEQ ID NO: 2678 - DNA, 26 bp, Artificial sequence
  primer
ttaaatgaaggtttcgtatggaactg

SEQ ID NO: 2679 - protein, 162 aa, Artificial sequence
  consensus sequence
  Variant (2)..(5): Xaa in position 2 to 5 is any amino acid
  Variant (7)..(7): Xaa in position 7 is any amino acid
  Variant (9)..(10): Xaa in position 9 to 10 is any amino acid
  Variant (13)..(14): Xaa in position 13 to 14 is any amino acid
  Variant (16)..(16): Xaa in position 16 is any amino acid
  Variant (18)..(18): Xaa in position 18 is any amino acid
  Variant (21)..(22): Xaa in position 21 to 22 is any amino acid
  Variant (24)..(24): Xaa in position 24 is any amino acid
  Variant (26)..(26): Xaa in position 26 is any amino acid
  Variant (28)..(28): Xaa in position 28 is any amino acid
  Variant (31)..(34): Xaa in position 31 to 34 is any amino acid
  Variant (36)..(36): Xaa in position 36 is any amino acid
  Variant (39)..(39): Xaa in position 39 is any amino acid
  Variant (40)..(40): Xaa in position 40 is any or no amino acid
  Variant (43)..(43): Xaa in position 43 is any amino acid
  Variant (45)..(45): Xaa in position 45 is any amino acid
  Variant (49)..(50): Xaa in position 49 to 50 is any amino acid
  Variant (55)..(55): Xaa in position 55 is any amino acid
  Variant (57)..(57): Xaa in position 57 is any amino acid
  Variant (61)..(61): Xaa in position 61 is any amino acid
  Variant (64)..(64): Xaa in position 64 is any amino acid
  Variant (66)..(66): Xaa in position 66 is any amino acid
  Variant (70)..(71): Xaa in position 70 to 71 is any amino acid
  Variant (73)..(73): Xaa in position 73 is any amino acid
  Variant (76)..(77): Xaa in position 76 to 77 is any amino acid
  Variant (80)..(80): Xaa in position 80 is any amino acid
  Variant (82)..(83): Xaa in position 82 to 83 is any amino acid
  Variant (85)..(87): Xaa in position 85 to 87 is any amino acid
  Variant (90)..(92): Xaa in position 90 to 92 is any amino acid
  Variant (94)..(94): Xaa in position 94 is any amino acid
  Variant (97)..(99): Xaa in position 97 to 99 is any amino acid
  Variant (101)..(101): Xaa in position 101 is any amino acid
  Variant (103)..(105): Xaa in position 103 to 105 is any amino acid
  Variant (107)..(108): Xaa in position 107 to 108 is any amino acid
  Variant (110)..(112): Xaa in position 110 to 112 is any amino acid
  Variant (114)..(119): Xaa in position 114 to 119 is any amino acid
  Variant (122)..(123): Xaa in position 122 to 123 is any amino acid
  Variant (125)..(127): Xaa in position 125 to 127 is any amino acid
  Variant (128)..(132): Xaa in position 128 to 132 is any or no amino acid
  Variant (135)..(135): Xaa in position 135 is any amino acid
  Variant (137)..(138): Xaa in position 137 to 138 is any amino acid
  Variant (139)..(139): Xaa in position 139 is any or no amino acid
  Variant (141)..(145): Xaa in position 141 to 145 is any amino acid
  Variant (147)..(155): Xaa in position 147 to 155 is any amino acid
  Variant (156)..(158): Xaa in position 156 to 158 is any or no amino acid
  Variant (160)..(160): Xaa in position 160 is any amino acid
MXXXXGXRXXTRXXFXRXFRXXGXIXLXTYXXXXKXGDXXVDXKXNGAXXKGMPXKXYHGXTGXVXNVTXXAXGVXXNKXVXXRXXXKRXXXRXEHXXXSXCXXXFXXRXXXNXXXXXXAKXXGXXXXXXXXKRXPXXXPXXXXXVXXXXXXXXXXXXPXPY

SEQ ID NO: 2680 - protein, 29 aa, Artificial sequence
  protein pattern
  Variant (3)..(3): Xaa in position 3 is Ile or Val
  Variant (5)..(5): Xaa in position 5 is Ala, Gly or Val
  Variant (6)..(6): Xaa in position 6 is any amino acid
  Variant (8)..(8): Xaa in position 8 is Ala or Ser
  Variant (9)..(9): Xaa in position 9 is Phe, Ile or Val
  Variant (10)..(10): Xaa in position 10 is any amino acid
  Variant (15)..(15): Xaa in position 15 is Phe, His or Tyr
  Variant (17)..(17): Xaa in position 17 is any amino acid
  Variant (19)..(19): Xaa in position 19 is any amino acid
  Variant (21)..(21): Xaa in position 21 is Lys or Arg
  Variant (24)..(24): Xaa in position 24 is any amino acid
  Variant (25)..(25): Xaa in position 25 is Ile or Val
  Variant (26)..(26): Xaa in position 26 is Phe, Trp or Tyr
  Variant (29)..(29): Xaa in position 29 is Ala, Ser or Thr
VDXKXXGXXXKGMPXKXYXGXTGXXXNVX

SEQ ID NO: 2681 - protein, 27 aa, Artificial sequence
  protein pattern
  Variant (2)..(3): Xaa in position 2 to 3 is any amino acid
  Variant (5)..(5): Xaa in position 5 is Ala, Gln or Ser
  Variant (7)..(7): Xaa in position 7 is any amino acid
  Variant (10)..(10): Xaa in position 10 is any amino acid
  Variant (11)..(11): Xaa in position 11 is His or Lys
  Variant (13)..(18): Xaa in position 13 to 18 is any or no amino acid
  Variant (20)..(20): Xaa in position 20 is Ile, Leu or Met
  Variant (21)..(22): Xaa in position 21 to 22 is any amino acid
  Variant (23)..(23): Xaa in position 23 is Phe or Tyr
  Variant (24)..(24): Xaa in position 24 is His, Lys or Arg
  Variant (25)..(25): Xaa in position 25 is any amino acid
  Variant (27)..(27): Xaa in position 27 is Asp, Glu or Gln
RXXFXRXFRXXGXXXXXXYXXXXXXGX

SEQ ID NO: 2682 - protein, 21 aa, Artificial sequence
  protein pattern
  Variant (3)..(3): Xaa in position 3 is Ile, Leu or Val
  Variant (4)..(4): Xaa in position 4 is any amino acid
  Variant (5)..(5): Xaa in position 5 is Ile, Leu or Val
  Variant (7)..(7): Xaa in position 7 is Ile or Val
  Variant (10)..(10): Xaa in position 10 is Ile or Val
  Variant (11)..(12): Xaa in position 11 to 12 is any amino acid
  Variant (14)..(15): Xaa in position 14 to 15 is any or no amino acid
  Variant (17)..(18): Xaa in position 17 to 18 is any amino acid
  Variant (19)..(20): Xaa in position 19 to 20 is any or no amino acid
KRXXXRXEHXXXSXXRXXXXF

SEQ ID NO: 2683 - DNA, 1356 bp, Saccharomyces cerevisiae
  CDS (1)..(1356)
atggacggaaatgatcacaaagtcgaaaatttaggagatgtagacaaattttattccagaatacgctggaataaccaattttcatatatggccactctgccgccccacctacaaagcgaaatggaaggtcagaaatcattgctaatgcgatatgatacttataggaaggaaagttcttcttttagtggtgaaggcaagaaagttactctgcagcatgttcctacagatttttcagaagcatcacaagcagtgattagcaagaaagatcacgatacgcatgcatctgcttttgtgaataaaattttccaaccagaggttgctgaagaacttatagttaatcgatacgaaaaacttctgtcacaaaggccggaatggcatgcaccctggaaactttcacgcgttatcaatggccatcttggatgggtacgatgcgttgcaatcgatcctgttgacaacgaatggttcatcaccggaagtaatgatacgacaatgaaagtttgggatcttgcaacaggaaaattaaaaactaccttagcagggcatgtaatgacagtgagagacgttgctgtgtcagatcgacatccttatttattttctgttagtgaagataagacggtcaaatgctgggacctagagaaaaaccaaattattagagattactatggacatttatcgggggttcgtacggtgagcatacatccaacgctggatctcatagctaccgcaggccgagatagcgttatcaaactctgggatatgagaaccagaatacctgttattacactagttgggcataagggtccaatcaatcaagtacagtgtactccagtagaccctcaagtggtgagttcatcgactgatgctacggtaaggttatgggatgtagttgctgggaaaacaatgaaagttctaacacatcataagaggtctgtgagagctacagcgttgcatcctaaggagttttcggtggcttctgcgtgtactgatgacatcagatcatggggattagcagaggggtctttactcaccaattttgagtctgaaaagacaggcataatcaatactttaagcattaatcaagatgatgtattattcgctggcggtgacaatggtgtgctttccttttatgattataagtctggtcacaaataccaatcgttggccacgagagaaatggtaggctctctggaaggtgaacggagtgttctttgtagcactttcgataaaacaggtttaagattaatcactggagaagcagacaaaagcataaagatttggaaacaggatgagacggctacaaaagagtcagaaccggggctagcgtggaaccccaacttaagcgccaaaagattttag

SEQ ID NO: 2684 - protein, 451 aa, Saccharomyces cerevisiae
MDGNDHKVENLGDVDKFYSRIRWNNQFSYMATLPPHLQSEMEGQKSLLMRYDTYRKESSSFSGEGKKVTLQHVPTDFSEASQAVISKKDHDTHASAFVNKIFQPEVAEELIVNRYEKLLSQRPEWHAPWKLSRVINGHLGWVRCVAIDPVDNEWFITGSNDTTMKVWDLATGKLKTTLAGHVMTVRDVAVSDRHPYLFSVSEDKTVKCWDLEKNQIIRDYYGHLSGVRTVSIHPTLDLIATAGRDSVIKLWDMRTRIPVITLVGHKGPINQVQCTPVDPQVVSSSTDATVRLWDVVAGKTMKVLTHHKRSVRATALHPKEFSVASACTDDIRSWGLAEGSLLTNFESEKTGIINTLSINQDDVLFAGGDNGVLSFYDYKSGHKYQSLATREMVGSLEGERSVLCSTFDKTGLRLITGEADKSIKIWKQDETATKESEPGLAWNPNLSAKRF

SEQ ID NO: 2685 - DNA, 1982 bp, Glycine max
  CDS (153)..(1586)
gaagaatatagtgttaaagagagcaagttctgtttaacacagacgagctgtggtagcagctagcgggtgaaggtttttgcgccgcgccttatatcacaccgtcgtccgaaagcgtcgttgccgtgaaaccctagaaagaaacgacgacgtaaatggaggtggagcccgtggagccgcagtcgctgaagaagctaagcttcaagtctctgaagcgcgctctcgatctcttctctcccatccacggacacctcgctactcccgatgccgaaagcaagaaaatacgcactagccacaaggtgagcgtggagtatggtggaatcaaaagcactgccaatcaacctcctcctcgtcaagttagttctgccacccaggatccagggtcctctaacactctggctcttccaggtcccggagattccaaggattctcagaaaggaggaccccaaaatgccttggttgttggtccaactatcccatccacaacaccgaatgatactggttttcagaacaaaagtacagcggttgtttcagcctctggttcatctgaaagaaatttatcaacatctgctttgatggaaagaatgccaagtaaatggccacgtcctgtatggcacgcaccatggaagaactacagggtcatcagcggtcacttgggatgggtgagatctgttgcagttgatcccagtaacacatggttttgtactggttctgcagatcgaactatcaagatatgggacttggcaagtggagtattgaagctcacattaacaggccacattgaacaagttagaggtcttgctgttagcaacagacatacttacatgttctctgctggtgacgataaacaagttaaatgttgggatcttgaacagaataaggttattaggtcttatcatggtcatctgagtggtgtttattgcttggctcttcatcccacaattgacgttttactaaccggaggacgtgattctgtctgccgggtttgggatatacgaagtaaaatgcagattcatgctctttcaggtcatgataacactgtctgttctgtgtttacgcggccaacggatccccaagttgttacaggttctcatgacactaccatcaagatgtgggaccttagatatggtaaaacaatgtcaactcttacaaaccataaaaaatctgttcgagcaatggcccagcatcccaaagagcaagcttttgcatctgcttcagctgacaatattaaaaagttcacccttccaaaaggagaattttgccacaatatgctctctcaacagaaaactatcatcaatgcaatggctgtcaatgaggagggtgtgatggttactggaggcgacaatggcagcatgtggttctgggattggaagagtggtcacaatttccagcaatcccaaacaattgtccagcctggttcattggacagtgaagctggtatttatgcttgtacctatgatcttactggttcgaggctcataacctgcgaagctgacaagacgataaaaatgtggaaagaagatgagagtgccactccagaaacccatccccttaacttcaggcctcctaaagacatccgtcgattctagacatgctcctcatttatctcaggcaacttattctgctaatacagagtgggtatgtgctatctggagggcttggtgtaaatttacttgttgggagattcacagttctcttcttagcaggcttttatcatcatatttgtatcacgagaaatgttaggaaaatactctcaaatactcttttgaacacaatctttcttattgattgaaaatcacaaattggtggatgctacatatttaacgaacctccttattttgtattttctgataattttcaactagtaggagagtgtggtgtcagaaagtatgtgttaaagagtgtgtaacacttctgtgtgcatcattggattgcttgtaagattattcctacatagttcgtgtgtctcaatagctttgcatttc

SEQ ID NO: 2686 - protein, 477 aa, Glycine max
MEVEPVEPQSLKKLSFKSLKRALDLFSPIHGHLATPDAESKKIRTSHKVSVEYGGIKSTANQPPPRQVSSATQDPGSSNTLALPGPGDSKDSQKGGPQNALVVGPTIPSTTPNDTGFQNKSTAVVSASGSSERNLSTSALMERMPSKWPRPVWHAPWKNYRVISGHLGWVRSVAVDPSNTWFCTGSADRTIKIWDLASGVLKLTLTGHIEQVRGLAVSNRHTYMFSAGDDKQVKCWDLEQNKVIRSYHGHLSGVYCLALHPTIDVLLTGGRDSVCRVWDIRSKMQIHALSGHDNTVCSVFTRPTDPQVVTGSHDTTIKMWDLRYGKTMSTLTNHKKSVRAMAQHPKEQAFASASADNIKKFTLPKGEFCHNMLSQQKTIINAMAVNEEGVMVTGGDNGSMWFWDWKSGHNFQQSQTIVQPGSLDSEAGIYACTYDLTGSRLITCEADKTIKMWKEDESATPETHPLNFRPPKDIRRF

SEQ ID NO: 2687 - DNA, 1431 bp, Glycine max
  CDS (1)..(1431)
atggaggtggagcccgtggagccacagtcgctaaagaagctaagcttcaagtctctgaagcgcgctctcgatctcttctctcccattcacggacacctcgctcctcccgatgccgaaagcaagaaaatccgcactagccacaaggtgagcgtggagtatggcggaatcaaaagcactgctaatcaacctcctcatcaagttagttctgccacacaggatccagggccctctaacactcttgctcttccaggtccaggagattccaaggattctcagaaaggaggaccccaaaatgccttggttgttggtccaactatgccatccacaacaccgaatgatactggctttcagagcaaaagtacagcggttgtttcagcctctggttcatctgaaagaaatttatcaacatctgctttgatggaaagaatgccaagtaaatggccacgtcctgtatggcatgcaccatggaagaactacagggtcatcagcggccacttaggatgggtgagatctgttgcagttgatcccagtaacacatggttttgtactggttctgcagatcgaactatcaagatatgggacttggcaagtggagtattgaagctcacattaacaggccacattgaacaagttagaggtcttgctgttagcaacagacatacttacatgttctctgctggtgatgataaacaagttaaatgttgggaccttgaacagaataaggttattagatcttatcatggtcatctgagtggtgtttattgcttggctcttcatcccacaattgacgttttactaaccggaggacgtgattctgtctgccgggtttgggatatacgaagtaaaatgcagattcatgctctttcaggacatgataacactgtctgctctgtgtttacgcggccgacggatccccaagttgttacgggttctcatgacactaccatcaagatgtgggaccttagatatggtaaaacaatgtcaactcttacaaaccataaaaaatctgttcgagcaatggcccagcatcccaaagagcaagcttttgcatctgcttcagctgacaatattaaaaagttcaaccttccaaaaggagaatttttgcacaacatgctctctcaacagaaaactatcatcaatgcaatggctgtcaatgaggagggtgtgatggttactggaggtgacaatggcagcatgtggttctgggattggaagagtggtcataatttccagcaatcccaaacaattgtacagcctggttccctggatagtgaagctggtatttatgcttgtacctatgatcttactggctcgaggcttataacctgcgaggctgacaagacgataaaaatgtggaaagaagacgagagtgccactccagaaacccatccccttaacttcaggcctcctaaagacatccgtcgattctag

SEQ ID NO: 2688 - protein, 476 aa, Glycine max
MEVEPVEPQSLKKLSFKSLKRALDLFSPIHGHLAPPDAESKKIRTSHKVSVEYGGIKSTANQPPHQVSSATQDPGPSNTLALPGPGDSKDSQKGGPQNALVVGPTMPSTTPNDTGFQSKSTAVVSASGSSERNLSTSALMERMPSKWPRPVWHAPWKNYRVISGHLGWVRSVAVDPSNTWFCTGSADRTIKIWDLASGVLKLTLTGHIEQVRGLAVSNRHTYMFSAGDDKQVKCWDLEQNKVIRSYHGHLSGVYCLALHPTIDVLLTGGRDSVCRVWDIRSKMQIHALSGHDNTVCSVFTRPTDPQVVTGSHDTTIKMWDLRYGKTMSTLTNHKKSVRAMAQHPKEQAFASASADNIKKFNLPKGEFLHNMLSQQKTIINAMAVNEEGVMVTGGDNGSMWFWDWKSGHNFQQSQTIVQPGSLDSEAGIYACTYDLTGSRLITCEADKTIKMWKEDESATPETHPLNFRPPKDIRRF

SEQ ID NO: 2689 - DNA, 1449 bp, Drosophila melanogaster
  CDS (1)..(1449)
atggccatggaagacgtgcagaagcacagcgtgcacacgctgatattccgctccctgaagcgcacccacgatctgttcgtctccaaccagggaaatctgcccgaaatcgacgaacgtttagagaagttgcgacgttccatcaaggcgaaggatggctatggccttgtgctggacaaggtggcgaagatcggcgaggccaggaaggcatcaggagcccaaacgccgggcgacaagacgctggccatcaccgatggcagtgcaacggatgcggccagcggtgccggcagtctggttaagtacaatgcgggcgccaggccagcggagaagacagcgccactggttaccggcacacacacatccctggtgcgcgcctccctggcgaacagcaatgcagatatgagcgccaatggcgccatcgccagccatctgcaattgataccgaagaaggcgcccagcatacccaagcccaagtggcacgcaccctggaaactgtcgcgcgtcatctccggccatttgggctgggtgcgatgcatcgccgtggagccgggcaacgagtggttcgccaccggcgctggcgatcgtgtgatcaagatctgggacctggccagcggcaaactgaagctctcgctcaccggtcatgtgagcactgtgcgcggtgtggccgtcagcacgaagcatccgtatctgtttagctgcggcgaggatcggcaggtcaagtgctgggatctggagtacaacaaagtcatacggcattatcacggtcacttatcggctgtttactcgctggccctgcatcccaccatcgatgtgctggccacctccggtcgcgattccactgcccgcatctgggacatgcggaccaaggcgaatgtgcacacactgacgggccatacgaacacggtggccagtgtggtggcgcaggccaccaatccgcagatcatcaccggctcccacgattccacggtgcgtctgtgggatttggccgccggcaagagcgtctgcacgctaaccaatcacaagaagtccgtgcgcagcatagtcctccatccatcgctgtacatgttcgcctccgcctcgccggataacatcaagcagtggcgctgtccggagggcaagtttgtgcagaacatctccggccacacgtccattgtcaattgcatggcggcgaatagtgagggcgtgctcgtttcgggcggcgacaacggcacgatgttcttttgggactggcgtaccggctacaatttccagcggttccaagcgcccgtccaaccgggctccatggacagcgaggcgggcatattcgccatgtgcttcgatcaatcgggcagcaggctaatcaccgccgaggcggacaagacaatcaaagtgtacaaggaggatgacgaggccagcgaggagtcgcatccgattaactggcgaccggatctactgaagcgccgcaaattctag

SEQ ID NO: 2690 - protein, 482 aa, Drosophila melanogaster
MAMEDVQKHSVHTLIFRSLKRTHDLFVSNQGNLPEIDERLEKLRRSIKAKDGYGLVLDKVAKIGEARKASGAQTPGDKTLAITDGSATDAASGAGSLVKYNAGARPAEKTAPLVTGTHTSLVRASLANSNADMSANGAIASHLQLIPKKAPSIPKPKWHAPWKLSRVISGHLGWVRCIAVEPGNEWFATGAGDRVIKIWDLASGKLKLSLTGHVSTVRGVAVSTKHPYLFSCGEDRQVKCWDLEYNKVIRHYHGHLSAVYSLALHPTIDVLATSGRDSTARIWDMRTKANVHTLTGHTNTVASVVAQATNPQIITGSHDSTVRLWDLAAGKSVCTLTNHKKSVRSIVLHPSLYMFASASPDNIKQWRCPEGKFVQNISGHTSIVNCMAANSEGVLVSGGDNGTMFFWDWRTGYNFQRFQAPVQPGSMDSEAGIFAMCFDQSGSRLITAEADKTIKVYKEDDEASEESHPINWRPDLLKRRKF

SEQ ID NO: 2691 - DNA, 1344 bp, Nasonia vitripennis
  CDS (1)..(1344)
atggatgtgcagcgtcactcggtgcacacgttggtgttccgttcgctgaaacggacacacgacatgtttctcgccaaccaaggaatgctaccaccagtcgacccatcgatggaaaagttgaaaatggcagtaaaagccaaagacagttatggcacagttcttcaacaagttaatttacaaaatgaaatgaagaagaggaaagagatcaacgcaagctctacgccgagcgaggccgagagctcgagcaacagcaccagcaacagcttagccataatagcctccagcactcctgcgcaaaccgataacacagtggcgaatattatgacaaatcctatcaaaaaggtcatgcccatggccaaaccaaagtggcacgccccatggaaattatacagagttattagtggtcaccttggatgggtgcgctgcgctgcaatcgaacctggcaatgagtggttcgccactggttcggctgatcgtgttatcaaaatttgggacttggctacaggaaagctaaaaatttcacttactggtcacattagcagtgtgagaggcctagccttttctcaaaggcacccgtacttgttttcatgcggagaagacagacaagttaagtgctgggaccttgaatataacaaggtcattagacattaccatggtcacctatcagctgtatattctttagctctccatcctaccttagatattttgcttactgctggcagagactgcactgctagggtatgggatatgcgcaccaaagcaaatgtccacacccttactggccacacaaacactgtggcaagcgttatcactcaagtgcacgaccctcaggtcatcaccggtagccatgactgtacaatcaggttgtgggacttggcagcagggaaatcaagagtgactctcactaaccacaagaaaagtgtgagagcattgacatttcacccaaccctcgacatgtttgcttcagcatctcctgacaacattaaagaatggaagtctgtggacggcaaatttatacagaatttgtctggccacaatgccattatcaactgtcttgcagccaatgaagatggagttctagtttctggagctgataacggaagtatgtacctttgggattggcgtactgggtataatttccaaaggctacaagctccggttcaacctggttctatggattctgaagcaggaatatttagcataacttttgacatgtcaggaaccagaatgatcacaactgaagctgacaaaacaatcaaagtgtataaagaggacgatacagcttcagaagaaacgcatccaattaacttcaaaccagaaattgtcaaacggcggaaatattaa

SEQ ID NO: 2692 - protein, 447 aa, Nasonia vitripennis
MDVQRHSVHTLVFRSLKRTHDMFLANQGMLPPVDPSMEKLKMAVKAKDSYGTVLQQVNLQNEMKKRKEINASSTPSEAESSSNSTSNSLAIIASSTPAQTDNTVANIMTNPIKKVMPMAKPKWHAPWKLYRVISGHLGWVRCAAIEPGNEWFATGSADRVIKIWDLATGKLKISLTGHISSVRGLAFSQRHPYLFSCGEDRQVKCWDLEYNKVIRHYHGHLSAVYSLALHPTLDILLTAGRDCTARVWDMRTKANVHTLTGHTNTVASVITQVHDPQVITGSHDCTIRLWDLAAGKSRVTLTNHKKSVRALTFHPTLDMFASASPDNIKEWKSVDGKFIQNLSGHNAIINCLAANEDGVLVSGADNGSMYLWDWRTGYNFQRLQAPVQPGSMDSEAGIFSITFDMSGTRMITTEADKTIKVYKEDDTASEETHPINFKPEIVKRRKY

SEQ ID NO: 2693 - DNA, 1485 bp, Physcomitrella patens subsp. patens
  CDS (1)..(1485)
atgccggcctcggggggaggcagcaccgaggtgctggaggctgtggagccccagtccctgaagaagctctccctcaagtccttgaagcgcgccttggatatcttcgcgcctactcatggcgatcgcaacggcgcgatgcctgagagttgcaaaattcgtatcagttgcaaggtgaatgatgagtatgctgctgtcaaggacatgccggctgcaagcactagggagaatgttggtgcaaaaccaggagataatggactccaaagcttgcgagtccctggctcagagcagcctactacaaatgcaggaccagcatctggaaaaggaggaggcaagcaacttgcattggtgcctgctcgggctcaacctccagttccagcaccggttgttggtgctgctcctgcagctcctgctgtggatcgtacttctacagctattgcatcgactgaccgacatcaaccaagcgctgcggttatgaagaggcttcctagtaaatggccaaagcctgtctggcatccaccttgggtgaactatagggttattagtgggcacttagggtgggtgcggtcgatagcatttgatcctggaaatgaatggttttgtacaggctcagctgataggaccatcaagatttgggatagtggaactggacagctgaaacttactttaactggccatatcgagcaagttcgaggccttgcagtgagcgcccggcatccttatttattctcagctggtgatgacaaacaggtcaaatgttgggatcttgaatacaataaggttattcggtcatatcatggtcatttgagtggagtttattgcttagctcttcatcctacacttgatattctcatgactgggggtcgagattcagtgtgccgagtatgggacattagaaccaaggcccaggtgtttgcattatcaggacatgagaacacggtctgctctgtgattacgcaggcaactgatccacaagttgtaacaggatcacacgacacaactattaaactttgggatcttgctgcaggaaaaactatgtcgacgctgacatttcacaaaaagtcagtcagagcattagcgatgcatccttttgaacatacttttacttcagcgtcagcggacaacattaagaagttccggctaccaaagggagactttttgcataacatgctttctcagcagcggacaattgttaactgcatgtctatcaacgaagataatgtaatggtatcagcaggtgataatggaagtttgtggttttgggattacaaaagtgggcataacttccagcaagcgcagacaatcgtgcagcctggttctctggatagtgaggccggaatttatgctctttcgtatgatcagacagggtctcggttgattacgtgtgaagcagacaagactattaaattttggaaggaagacgaaacagctacaccagaatcacatcctgtacactttaggccgccgaaggacatgcgccggttctaa

SEQ ID NO: 2694 - protein, 494 aa, Physcomitrella patens subsp. patens
MPASGGGSTEVLEAVEPQSLKKLSLKSLKRALDIFAPTHGDRNGAMPESCKIRISCKVNDEYAAVKDMPAASTRENVGAKPGDNGLQSLRVPGSEQPTTNAGPASGKGGGKQLALVPARAQPPVPAPVVGAAPAAPAVDRTSTAIASTDRHQPSAAVMKRLPSKWPKPVWHPPWVNYRVISGHLGWVRSIAFDPGNEWFCTGSADRTIKIWDSGTGQLKLTLTGHIEQVRGLAVSARHPYLFSAGDDKQVKCWDLEYNKVIRSYHGHLSGVYCLALHPTLDILMTGGRDSVCRVWDIRTKAQVFALSGHENTVCSVITQATDPQVVTGSHDTTIKLWDLAAGKTMSTLTFHKKSVRALAMHPFEHTFTSASADNIKKFRLPKGDFLHNMLSQQRTIVNCMSINEDNVMVSAGDNGSLWFWDYKSGHNFQQAQTIVQPGSLDSEAGIYALSYDQTGSRLITCEADKTIKFWKEDETATPESHPVHFRPPKDMRRF

SEQ ID NO: 2695 - DNA, 1371 bp, Culex quinquefasciatus
  CDS (1)..(1371)
atggaggaggtccaacggcactcggtgcacacgctggtgttccgttcgctcaagcgaacccacgatttcttcgtcgcgaaccagtcgctgatgccggagattgacgaatcgctggaaaagatgaagttcaacattaaggcacgcgacacgtacgggctggtgtttgaccggaccgcgaaggccaaacatttggcggccttacggggcgacagtggccgaccggaacatcctgtgcaggacagtgttttagcaatcaccgccggtggagaatcggatcacgcaatcaacacccagacggcacttctaccaacgagttctgcgggttcacaaaactcaacctccaacacggttcaaatcctgccgaagaaggctccgacaattcccaagcccaagtggcacgccccgtggaagttgtatcgcgtcatttccggtcacttgggttgggttcgctgcgtggcggtggaaccgggcaacgagtggtttgccacgggagccgccgatcgggtcattaagatttgggacctggcaagcggcaagttgaagctgtccctgacgggtcacgtcagcacggttcgtgggctgtgcgtgagtccccggcatccgtacctgttcagctgcggcgaggatcgacaggtcaagtgctgggatctggagtacaacaaggtcattcggcattatcacggacacttgtcggcggtctacacgatgtccctgcaccccacgatcgatgtcctcgtgacggcgggtcgtgactccaccgctcgcgtctgggacatgcgcaccaaggccaacattcacaccctgggaggacacaccaacacggtggccagcgtggtctgccaggccgccaacccgcaggtcatcaccggaagccacgactcgacggttcgcctgtgggacctggccgccggtaaaagcatgggcacgctgaccaatcacaaaaagagcgtccgcagcattgtgctccatccgtcgctgtacatgttcgcgtcggcctcgccggacaacatcaagcagtggcgctgccccgagggcaacttcatccagaacctgaacggccacaatgcgatcgttaacgcgatggccgtcaacccggagggtgtgctcgtgtccggaggcgacaacgggaccatgttcttctgggactggcgcaccgggtacaacttccagcgattccaggccgccgtccagcccggctcgatggacagcgaggcgggcatcttttcgatgacgttcgacgtgtccggatcgcgactcatcacgaccgaggcggacaagacgatcaagatctacaaggaagacgacgaagcctcggaggagtcgcatccggtcaactggcggccggagattctgaagcggaggaagtattga

SEQ ID NO: 2696 - protein, 456 aa, Culex quinquefasciatus
MEEVQRHSVHTLVFRSLKRTHDFFVANQSLMPEIDESLEKMKFNIKARDTYGLVFDRTAKAKHLAALRGDSGRPEHPVQDSVLAITAGGESDHAINTQTALLPTSSAGSQNSTSNTVQILPKKAPTIPKPKWHAPWKLYRVISGHLGWVRCVAVEPGNEWFATGAADRVIKIWDLASGKLKLSLTGHVSTVRGLCVSPRHPYLFSCGEDRQVKCWDLEYNKVIRHYHGHLSAVYTMSLHPTIDVLVTAGRDSTARVWDMRTKANIHTLGGHTNTVASVVCQAANPQVITGSHDSTVRLWDLAAGKSMGTLTNHKKSVRSIVLHPSLYMFASASPDNIKQWRCPEGNFIQNLNGHNAIVNAMAVNPEGVLVSGGDNGTMFFWDWRTGYNFQRFQAAVQPGSMDSEAGIFSMTFDVSGSRLITTEADKTIKIYKEDDEASEESHPVNWRPEILKRRKY

SEQ ID NO: 2697 - DNA, 1401 bp, Acyrthosiphon pisum
  CDS (1)..(1401)
atgtcgaccagaagccaaaacgcaatgagtttctcggaggaagtacagcggcactctgttcatacattagtttttaggtcgctcaaaaggactcacgatatgttcttatcgtgtcaagggatgttaccaccaatagacgaagaagcggagagaataaaaaaactcgtcaaggctcgagattgttatggtcttgtttttgacaaagtggaacgcaataagataaacatgaagaagtctcaaccgaatcatcctaaatcagatagccttgatatctataaagataatcaccttccattagccataactgataatcctgagaaagtaaataaaaacacagagactagtatggtgttatcaagtccaagtactcaaaacatagctgcagctaatcgactaattaatcatattatgccaaaaccaaaatggcatccaccatggaagttatatcgagtaatatctggacatttgggttgggtgcgatgtgttactgttgaacctggcaatgaatggttcgcaactggtgctgctgatcgagttattaaaatttgggatttagcctctggaaaattaaaactttccttaactgggcacgtgagtactgtgcgaggcctacaagtaagtcctagacacccttatttattcagttgtggcgaagataggcaagtgaagtgttgggatttggaacataataaagtagttcgacattatcatggacatttgagtgctgtatacagtcttgcattacatccaacgattgacgtattattaactgctggacgagattcaacagctcgagtatgggacatgcgtaccaaagccaacgttcacacactcactggacatacaaatacagttgccagtgttgttgcccatgaatttgaacctcaagtattgactggatctcacgactgtacaattagactatgggacttagctgctggaaaaactcgtgcaactcttacaaatcacaaaaaaagtgtgagatcacttgttttacatccaaaagtgtatatgtttgccagtgcaagtccagataatataaaacaatggacatgcccagatgggaaatttatacaaaatcttactggtcataatgctatagttaactgtatggctgtgaattctgatggggtattgatgtctggagcaaacaatgggtcaatgtatgcttgggattggagaactggttataatttccagaggatgcaggctcctgtacaacctggatcgatggacagtgaagccggagtatttgcgatggcatttgataacagtggcacaagacttattacagctgaagctgataaaactattaaactttatcgagaagacgatacggctaccgaagaaagtcatccaattaattggaagcctgatataatccgaagaaggaaatattaa

SEQ ID NO: 2698 - protein, 466 aa, Acyrthosiphon pisum
MSTRSQNAMSFSEEVQRHSVHTLVFRSLKRTHDMFLSCQGMLPPIDEEAERIKKLVKARDCYGLVFDKVERNKINMKKSQPNHPKSDSLDIYKDNHLPLAITDNPEKVNKNTETSMVLSSPSTQNIAAANRLINHIMPKPKWHPPWKLYRVISGHLGWVRCVTVEPGNEWFATGAADRVIKIWDLASGKLKLSLTGHVSTVRGLQVSPRHPYLFSCGEDRQVKCWDLEHNKVVRHYHGHLSAVYSLALHPTIDVLLTAGRDSTARVWDMRTKANVHTLTGHTNTVASVVAHEFEPQVLTGSHDCTIRLWDLAAGKTRATLTNHKKSVRSLVLHPKVYMFASASPDNIKQWTCPDGKFIQNLTGHNAIVNCMAVNSDGVLMSGANNGSMYAWDWRTGYNFQRMQAPVQPGSMDSEAGVFAMAFDNSGTRLITAEADKTIKLYREDDTATEESHPINWKPDIIRRRKY

SEQ ID NO: 2699 - DNA, 1386 bp, Anopheles gambiae str. PEST
  CDS (1)..(1386)
atggaggaagttcagcgtcactcggtgcacacgttggtgttccgttcgttaaagcgtacgcacgattttttcgtcgccaaccaatcgctgctgccggagatcgacgaaacacttgaaaagttgaaatacaacattaaagctcgggacacgtatgggttggtttttgaccgtgcggccaaggcaaaggcgctggcagcgaagcgtggtgatagtgaccgaatcgagggacagcatggcggcaaggatggcgtgttggcaataacagccgccggcgaacaggaaggaagcgcatcggatggtacaaatggtcagatggcgctggttcctgccgctaccccgacaccccaggctgcctccagcgcggtgcaaatactgccaaagaaagcgcctaccatcccgaaaccgaaatggcacgccccgtggaagctgtgccgcgtcatttcgggccatctgggctgggtgcgttgcgttgcggtggagccgggcaacgagtggttcgctacgggtgctgccgatcgggtgattaaaatttgggacctggccagcggcaagctgaagctctcgcttaccggccacgtcagcacggtgcgggcgctggcggtaagcccgcggcatccgtacctgttcagctgcggcgaggaccggcaggtgaagtgctgggacctggagtacaacaaggtgatccggcactaccacggccacctgtcggcggtctacacgatgtcgctgcatccgacgatcgacgtgctggtgacggccgggcgcgattcgacggcgcgcgtgtgggacatgcgcaccaaggccaacatccacacgctgaccgggcacacgaacacggtcgcgagcgtggtaacgcaggcggccaatccgcagatcatcaccggcagccacgactcgaccgtgcggctgtgggatctggccgccggcaagagcatgtgcacgctgaccaaccacaagaagagcgtgcgtgcgatcgtgctgcacccgtcgctgtacatgtttgcgtcggcctcgccggacaacatcaagcagtggcgctgcccggaaggcaacttcatccagaacctgggcggccacaactcgatcgtgaactgtatggcggtcaatccggagggggtgctggtgtcgggcggcgacaatggtacgatgtttttctgggactggcgcaccgggtacaacttccagcgcttccaggcggcggtccagccgggctcgatggacagcgaggcgggcattttctcgatgacgttcgaccagtccggctcgcggctgatcacgaccgaggcggacaagacgatcaagatctacaaggaggacgacgaggcgacggaggagtcgcatccgatcaactggcggccggaaattattaagcgtagaaagtattaa

SEQ ID NO: 2700 - protein, 461 aa, Anopheles gambiae str. PEST
MEEVQRHSVHTLVFRSLKRTHDFFVANQSLLPEIDETLEKLKYNIKARDTYGLVFDRAAKAKALAAKRGDSDRIEGQHGGKDGVLAITAAGEQEGSASDGTNGQMALVPAATPTPQAASSAVQILPKKAPTIPKPKWHAPWKLCRVISGHLGWVRCVAVEPGNEWFATGAADRVIKIWDLASGKLKLSLTGHVSTVRALAVSPRHPYLFSCGEDRQVKCWDLEYNKVIRHYHGHLSAVYTMSLHPTIDVLVTAGRDSTARVWDMRTKANIHTLTGHTNTVASVVTQAANPQIITGSHDSTVRLWDLAAGKSMCTLTNHKKSVRAIVLHPSLYMFASASPDNIKQWRCPEGNFIQNLGGHNSIVNCMAVNPEGVLVSGGDNGTMFFWDWRTGYNFQRFQAAVQPGSMDSEAGIFSMTFDQSGSRLITTEADKTIKIYKEDDEATEESHPINWRPEIIKRRKY

SEQ ID NO: 2701 - DNA, 1533 bp, Magnaporthe grisea 70-15
  CDS (1)..(1533)
atggctcaagactctgtcgagggtccagctgacgccgcgctccaggctctcatcatcaagaacgcaaagcagacaagggatatctttaccgacatcacaagccgtaagcgcataaagcttgttgacccggcgacaccgaccgatggcgacctcgacagggacacattagccttgcgcttcaattccgagtatgcagacctcagggagctgccgccagctctggcagcaaggcaagttgccgctgcggggggaaggaaaaagcctggtgcgaggaaggcggcagcagcgggcccaccggcagacacacccgaagaggagaagtcccgcaagttgatagagggcatcccgacacggggagcgaatccaagatcacagaacgggactggtgccgcgcagtcgagtgcactcgtcctcaagggtcgtggcacgggcacggaaggacaaggcggacaggagcagagacaacaacaaaaacagaatgataggggaccaccggtgatcgggcagcagctcacgctggcacgggcacaggagctcaacatgcagctcaagcccgaatggcacagaccatggaagctgatgcgtgtcatctcaggacacctgggttgggtgcgggccctcgcagttgagcccgacaacaagtggttcgccagcggtgccggcgaccgcaccatcaagatttgggatctggcgagcggccggctgaggctgacgctgactggtcacatctcgactgtgcgtggtttggccgtctcgccccggcacccatacctcttctcttgcgctgaggacaagatggtcaagtgctgggacttggagacgaacaaggtcatcaggcactaccacggccatctgagtggtgtctacacacttgctctgcatccaacccttgacgtcctggtgacgggtggacgtgacggtgtggcccgtgtttgggacatgcgcactcgcagcaacattcacgtgctgagcgggcacaccggaaccgtgtcggagctagtgtgccaggaggcggatccgcaagtcattacaggcagtctggactcgacggtgcgcatgtgggaccttgccgctggcaagaccatgggagtgctcacccaccacaaaaagggtgtgcgcgcgctggccacgcacccaacagagttcacctttgcctcgggaagcgccggctctatcaagcagtggaaatgccccgagggtgcttttatgcagaattttgagggtcacaattcaatcatcaacacactgtcagtcaacgaccagaacgttttcttctcaggtgccgacaatggctccatgagcttctgggattggaagactggtcatcgcttccagtcactagacacgactgcccagcccggttcgctccaggctgagtcgggtatctttacatcgacctttgatcagtcgggcagccgtctcatttgtggcgaggcagacaagactatcaaaatatggaaggaggatatggaggcaacgccagagacccacccacttgactggaagcctacattgggtaggaggaagttttaa

SEQ ID NO: 2702 - protein, 510 aa, Magnaporthe grisea 70-15
MAQDSVEGPADAALQALIIKNAKQTRDIFTDITSRKRIKLVDPATPTDGDLDRDTLALRFNSEYADLRELPPALAARQVAAAGGRKKPGARKAAAAGPPADTPEEEKSRKLIEGIPTRGANPRSQNGTGAAQSSALVLKGRGTGTEGQGGQEQRQQQKQNDRGPPVIGQQLTLARAQELNMQLKPEWHRPWKLMRVISGHLGWVRALAVEPDNKWFASGAGDRTIKIWDLASGRLRLTLTGHISTVRGLAVSPRHPYLFSCAEDKMVKCWDLETNKVIRHYHGHLSGVYTLALHPTLDVLVTGGRDGVARVWDMRTRSNIHVLSGHTGTVSELVCQEADPQVITGSLDSTVRMWDLAAGKTMGVLTHHKKGVRALATHPTEFTFASGSAGSIKQWKCPEGAFMQNFEGHNSIINTLSVNDQNVFFSGADNGSMSFWDWKTGHRFQSLDTTAQPGSLQAESGIFTSTFDQSGSRLICGEADKTIKIWKEDMEATPETHPLDWKPTLGRRKF

SEQ ID NO: 2703 - DNA, 1374 bp, Gibberella zeae PH-1
  CDS (1)..(1374)
atggaaacgccagaagtactgcaagatgcgctgcagcttggcgctctcgccacgcaaaatgccactgtttcaagaacactatactcgcacgctcaagcaaccagcacgaagcgacagaaactatacgacgcgtctgaagatcccatcatgaaacgtcgctttcgcaacgaatacgccgatgtcgagactttaccgccctcaatcactgcgaagctcccgactaaacaacctggaaagaagactaaagctggagcgctggttcggccagccatgaagctcctcgagggcgcgcccggttcaggcaaggcgtctgcatccgcagctaggaacgaaggcacaccacagaacatgtcccttacgacacggggaacccagaacacgatgcagcaaaagcccgaatggcacgcgccatggaaactgatgagagtcatatcaggacatttgggttgggtacgcagtctggccgttgagcctggaaataagtggttcgctagtggtgctggcgaccgaactatcaagatttgggatttggcaagcggctcgttgaaattgacacttactggacacatcagcacagtacgtggccttgctgtgtctccccgtcacccctatctcttctcttgcggtgaagataagatggtcaaatgttgggatctcgagacaaacaaggttattcgccactatcacggtcatctgagtggtgtttacacactggctctgcatcctacacttgatgttcttgtcactggcggtcgagatggtgttgctcgtgtttgggatatgcgaaccaggagcaacatccatgttctatcaggccacactcagactgtctccgatcttgtttgtcaagaggcggaccctcaagttattaccggatcactggactcaacagtacgactttgggatcttgcggccggaaagaccatgggcgtgctcacccaccacaagaagggtgtccgagccctggctacccatccctcagagtttacatttgccagtggcagtaccggaagtgtgaagcaatggaagtgccccgaaggagccttcatgcaaaattttgagggccacaattccatcattaacaccatgagcgtcaatgagcagaatgtctttttcacaggaggagataatggatctatgagcttctgggactggaagactggacatagattccagtctcttgataccacagcccaacctggttctttagacgccgaggcaggcattatgagttcaacgtttgaccgctccggactacgtctgatttgcggtgaagctgacaaaacaattaaagtctggaagcaggatgagacagcgacagaagagtcgcatcctctcgaatggaagccaactctggcccggaggaaattttaa

SEQ ID NO: 2704 - protein, 457 aa, Gibberella zeae PH-1
METPEVLQDALQLGALATQNATVSRTLYSHAQATSTKRQKLYDASEDPIMKRRFRNEYADVETLPPSITAKLPTKQPGKKTKAGALVRPAMKLLEGAPGSGKASASAARNEGTPQNMSLTTRGTQNTMQQKPEWHAPWKLMRVISGHLGWVRSLAVEPGNKWFASGAGDRTIKIWDLASGSLKLTLTGHISTVRGLAVSPRHPYLFSCGEDKMVKCWDLETNKVIRHYHGHLSGVYTLALHPTLDVLVTGGRDGVARVWDMRTRSNIHVLSGHTQTVSDLVCQEADPQVITGSLDSTVRLWDLAAGKTMGVLTHHKKGVRALATHPSEFTFASGSTGSVKQWKCPEGAFMQNFEGHNSIINTMSVNEQNVFFTGGDNGSMSFWDWKTGHRFQSLDTTAQPGSLDAEAGIMSSTFDRSGLRLICGEADKTIKVWKQDETATEESHPLEWKPTLARRKF

SEQ ID NO: 2705 - DNA, 1392 bp, Apis mellifera
  CDS (1)..(1392)
atggtaagttgtgaagtatttttcgatgtacaaaggcattctgtacatactcttgtatttcgatctttaaaaagaacccatgatatgtttctattaaatcaaggtactttgccacctatggatcctaatttacaaaaaataaaaaagtttgtgaaagcaaaagactcttatggtcctgtactagaacgtgttaaaaataacaatataataaaagtacaaaatgaaaatgaaaatacagatcctcccccaccaggcgatgaatctttcggaggaaataatactactgcagttataccttataattctatacaaaataataatatagtaacaacacaaacaaattcaggaggaaatgcaagtaatcttacattacatatgccacaaaaaaaaacacattctatggcaaaaccaaaatggcatgcaccatggaaattatatagagttattagtggtcatcttggttgggtaagatgttgtgctgttgaaccagggaatgaatggtttgctacagggtctgcagatagagtaattaaaatatgggatcttgcaagtggtaaattgaaagtttcattaactggtcatataagtagtgttcgtggacttgcattttctcaacgacatccatatttattttcttgtggagaagatcgacaagtaaagtgttgggatcttgaatacaataaggttataagacattatcatggtcatttatcagctgtatattctatggcattacatcctagtattgatgtattagtaactgcaggaagagattccactgctagagtgtgggatatgcgtaccaaagcaaatgtacatacacttgttggtcataccaatacagttgctagtgtaatttgtcaaacagctgaaccacagattgtcactggaagtcatgattgtactatacgattatgggatttagcaggtggaaaatctagagctactttaacaaatcataaaaagagtgtaagagctgtaacttttcatccatcattatacatgtttgcatcagcatccccagataatattaaacaatggaaatgtccagaaggaaaatttattcagaacttatctggacataatgctattgttaattgtttggctgttaatcctgatggagtgttagtttctggagcagataatggtactatgcatctttgggactggaggacagggtataattttcaacgtttacaagcacctgttcaaccaggttcaatggatagcgaagctggagtatttagtattacatttgacatgtctggtactcgtatgattacaacagaagcagataaaacaatcaaagtttataaagaagatgatactgctaccgaagaaacacatccagtaaattggagaccagatataataaaacgaagaaaatattaa

SEQ ID NO: 2706 - protein, 463 aa, Apis mellifera
MVSCEVFFDVQRHSVHTLVFRSLKRTHDMFLLNQGTLPPMDPNLQKIKKFVKAKDSYGPVLERVKNNNIIKVQNENENTDPPPPGDESFGGNNTTAVIPYNSIQNNNIVTTQTNSGGNASNLTLHMPQKKTHSMAKPKWHAPWKLYRVISGHLGWVRCCAVEPGNEWFATGSADRVIKIWDLASGKLKVSLTGHISSVRGLAFSQRHPYLFSCGEDRQVKCWDLEYNKVIRHYHGHLSAVYSMALHPSIDVLVTAGRDSTARVWDMRTKANVHTLVGHTNTVASVICQTAEPQIVTGSHDCTIRLWDLAGGKSRATLTNHKKSVRAVTFHPSLYMFASASPDNIKQWKCPEGKFIQNLSGHNAIVNCLAVNPDGVLVSGADNGTMHLWDWRTGYNFQRLQAPVQPGSMDSEAGVFSITFDMSGTRMITTEADKTIKVYKEDDTATEETHPVNWRPDIIKRRKY

SEQ ID NO: 2707 - DNA, 1422 bp, Cryptococcus neoformans var. neoformans B-3501A
  CDS (1)..(1422)
atgtcaacgtcactcgaaaccccctcagggacctccgctggcccttcaattgttgccagcgggctcccccctctagctgatttagtacgagcagggagcaaacgaactcgagtcgtgtacggtgcggagacttcagcggtggaagacgatggtctcgcaagggcaaacaaaattaagctggccacgaaactggcgattgagtacaaggacgttcaaacattaccacctatcttacaagctcagcaaaccggtccagccggacccaagcgaccaacacagccatccattgccgcttccgctaccgctggtcccaacgtcaagctcattggcggacccgaggctgagaaagcgtcctcatccacccctcaagctgttgccgagcctcgctcattagtgaagttcagacatcaagaaggatttgccgctgagggtggccaggctacttccagattgtcgcaagctttgatgaggaagaaggaagccagagaagtcaagcccgaatatcaccccgagtggaagcttacacgagttatttctggccatatgggatgggtgcgcgccgttgcaatggatccaggaagtcaatggtttgccaccggtgctggtgatcgtgttatcaagatatgggatcttgcttcgggagaactcaaactgtcattaactggacatatctctaccatccgagggttagcagtatcagatcgtcacccgtatttgttttcttgcgcggaagacaagatggtcaagtgctgggatcttgagaccaacaaggtcatccggcactatcatggtcacttttccggcgtctattccctttcagtccatcctacgttagacgtactagtcaccggtggtcgagatgcgagcgttagagtatgggacatgcgtacgcgagccaacatcttcacactcactggccatacgagtactgtgggcgatgtcaagactcaggactctgatccgcaaatcatatccggtagtatggatagcaccgttaggctatgggatcttgcggctggcaaatgcatgaacactctcactcaccacaagaagtctgttcgtgcccttgcgatccatccgacggagtacagctttgctagtgctagctcaggtggcaacaatatcaaaaaatggaaatgcccagagggcatctttgtcaacaactttgtcggtcatgaggccatcatcaatacactgagtatcaactcggagaatgtcttgttttctggagcggacaacggtactctcacattatgggattacaagactggtttgcctttccaacacctcaaggatattccccaacctggttcactcgatgccgaagcgggagtgttctgttctacatttgacaaaacgggcacgcgtctcattacaggtggagcagataagacaatcaaggtgtattccgagcaggcatag

SEQ ID NO: 2708 - protein, 473 aa, Cryptococcus neoformans var. neoformans B-3501A
MSTSLETPSGTSAGPSIVASGLPPLADLVRAGSKRTRVVYGAETSAVEDDGLARANKIKLATKLAIEYKDVQTLPPILQAQQTGPAGPKRPTQPSIAASATAGPNVKLIGGPEAEKASSSTPQAVAEPRSLVKFRHQEGFAAEGGQATSRLSQALMRKKEAREVKPEYHPEWKLTRVISGHMGWVRAVAMDPGSQWFATGAGDRVIKIWDLASGELKLSLTGHISTIRGLAVSDRHPYLFSCAEDKMVKCWDLETNKVIRHYHGHFSGVYSLSVHPTLDVLVTGGRDASVRVWDMRTRANIFTLTGHTSTVGDVKTQDSDPQIISGSMDSTVRLWDLAAGKCMNTLTHHKKSVRALAIHPTEYSFASASSGGNNIKKWKCPEGIFVNNFVGHEAIINTLSINSENVLFSGADNGTLTLWDYKTGLPFQHLKDIPQPGSLDAEAGVFCSTFDKTGTRLITGGADKTIKVYSEQA

SEQ ID NO: 2709 - DNA, 1368 bp, Tribolium castaneum
  CDS (1)..(1368)
atgaccgaagacgtgcagagacactccgtacatacgttagtattccgttccttgaaacggtctcacgacatgtttctctcaaaccagggactactgccatcagtggacgaaaaagccgaaatggtgcgaaaagccataaaagcccgtgacttgtacggcctagtctttgacgacgttaagaaaatgcaagctatgaagcacttacgggaggcagaagctgggccaaaccccccaccaccgggcacacgcactgacgacgcggccccaaacaccgagggggctgttgtaccgtacactgacacaagtttgatgacacgaagcgtccaaaataacacacaaaaccagctcgccaatttaatgaaaaaagtccccacaatgccaaagccgaaatggcacgccccttggaagctatacagggtgattgcggggcatttggggtgggtcaggtgtgtttcggtggagccaggaaatgagtggtttgcgaccggcgcagcggaccgaataataaaaatctgggacctggcaagtgggcagttgaaagtgtccctaactgggcatgtgagcacggtcagagggttggctgtgagcagtagacacccttatttgttcagttgcggtgaagacagacaggtcaagtgttgggatttggagtacaacaaagtcattagacattaccatggccatttatcggctgtatactctctagcgcttcaccccacaatcgatgttttattaacagcagggcgtgattcaacagcccgggtttgggacatgaggacgaaagcaaatgttcacactttgaccggccacacgcatactgtagctagcgtggtggcgcaagcctccgaacctcaagttatcacaggatctcatgataccacaatcagattatgggacctggcagctgggaaatcaatttgtacgcttaccaatcacaaaaagagcgttagagatgtgattctccacccgactttgaacatgttcgcgtcgggctcacccgataacataaaacagtggaaatgtcctgacgggaaattcatacagaatttgtccggtcataatgctattgttaattgtctcgctgtcaatccagaaggcgtcctggtttcagggggcgataatggaactttacatttctgggattggaggaccggttacaatttccaaagattacaagccccagtacaacctgggtcaatggacagtgaagctggaatattctcaatgattttcgacaattctggctcaagattaatcacaactgaagctgacaagaccatcaaaatctacaaagaggatgaaactgcgactgaagaaacgcatccgattaactggaaacccgatattttgaaacggaggaaattctaa

SEQ ID NO: 2710 - protein, 455 aa, Tribolium castaneum
MTEDVQRHSVHTLVFRSLKRSHDMFLSNQGLLPSVDEKAEMVRKAIKARDLYGLVFDDVKKMQAMKHLREAEAGPNPPPPGTRTDDAAPNTEGAVVPYTDTSLMTRSVQNNTQNQLANLMKKVPTMPKPKWHAPWKLYRVIAGHLGWVRCVSVEPGNEWFATGAADRIIKIWDLASGQLKVSLTGHVSTVRGLAVSSRHPYLFSCGEDRQVKCWDLEYNKVIRHYHGHLSAVYSLALHPTIDVLLTAGRDSTARVWDMRTKANVHTLTGHTHTVASVVAQASEPQVITGSHDTTIRLWDLAAGKSICTLTNHKKSVRDVILHPTLNMFASGSPDNIKQWKCPDGKFIQNLSGHNAIVNCLAVNPEGVLVSGGDNGTLHFWDWRTGYNFQRLQAPVQPGSMDSEAGIFSMIFDNSGSRLITTEADKTIKIYKEDETATEETHPINWKPDILKRRKF

SEQ ID NO: 2711 - DNA, 1500 bp, Oryza sativa subsp
  CDS (1)..(1500)
atggcgacggcggagccggtggagccgcagtcgctgaagaagctgagcctcaagtcgctcaagcgctcgcacgacctcttcgcgcccacccactccctcctcttcactcccgatccggagagaaccctaacggcgctgtttgctaaactgtttcccccctttggtttggttgttgtggcggacggcagtaagcaggttcgtgtcggctgcaaggtgaatgcagagtacagcgcggtgaagaacctaccaacagatcagggccgaggacaggtcaagagtgctgcggcaccttcaactgcattggcgcttccaggaacacaagatgtcaaagatgctgataacaaaggcagcagtactgctattgttcctgcaccacatatgctccccaaagcaccggattcaacgataccaggcaagaatacaactataacaattcctggttcatctgacagattctctacatctgcactgatggaaaggataccaagtagatggccacggcctgtctggcatgctccttggaagaattatagggtgatcagtggtcacttgggatgggtgcggtcaattgcatttgatccaagtaacgaatggttctgtacgggttctgccgacaggacgattaagatctgggaccttgcatcaggaacattgaagcttacattgactggccatattgaacaaattcgtgggcttgctgtgagccaacggcacacatatttattttctgctggtgatgacaaacaagtaaagtgttgggatcttgaacaaaacaaggttattaggtcttatcatggccatttgagtggggtgtactgccttgctctacatccaacaatcgatatcttgctgactggtggtcgcgattcagtttgtagggtctgggacatccgaacgaaagctcatgtttctgctttaactggtcatgataacaccgtatgctcagtgtttgctcgtcctacggatccacaagttgtcacgggctcacatgattcaactatcaagttctgggaccttgtagctgttatttttcctataggaaggactatgtgtactcttacacatcataagaaatcagttcgggctatggcgctgcatccaaaagagaaatcgtttgcatctgcatcagcagacaatataaagaagtttagcctgcccaaaggcgaatttctacacaatatgctgtcccagcagaaaaccatcataaactcaatggctgtaaatgaagatggtgtcttggcaactggaggggataatgggagtctctggttttgggattggaagagtggccataactttcaacaagatcagactatagtacaacctggatcattggagagtgaggcatgcatatatgccctttcatacgatgttagtggatcacggctggtgacatgtgaagctgacaagacaataaaaatgtggaaggaagatttgtcagccactccagagacccatcctatcaatttcaagcctccaaaggacatcagaagatactga

SEQ ID NO: 2712 - protein, 499 aa, Oryza sativa subsp
MATAEPVEPQSLKKLSLKSLKRSHDLFAPTHSLLFTPDPERTLTALFAKLFPPFGLVVVADGSKQVRVGCKVNAEYSAVKNLPTDQGRGQVKSAAAPSTALALPGTQDVKDADNKGSSTAIVPAPHMLPKAPDSTIPGKNTTITIPGSSDRFSTSALMERIPSRWPRPVWHAPWKNYRVISGHLGWVRSIAFDPSNEWFCTGSADRTIKIWDLASGTLKLTLTGHIEQIRGLAVSQRHTYLFSAGDDKQVKCWDLEQNKVIRSYHGHLSGVYCLALHPTIDILLTGGRDSVCRVWDIRTKAHVSALTGHDNTVCSVFARPTDPQVVTGSHDSTIKFWDLVAVIFPIGRTMCTLTHHKKSVRAMALHPKEKSFASASADNIKKFSLPKGEFLHNMLSQQKTIINSMAVNEDGVLATGGDNGSLWFWDWKSGHNFQQDQTIVQPGSLESEACIYALSYDVSGSRLVTCEADKTIKMWKEDLSATPETHPINFKPPKDIRRY

SEQ ID NO: 2713 - DNA, 1461 bp, Arabidopsis thaliana
  CDS (1)..(1461)
atgccggctccgacgacggagatcgaacccatcgaagcacagtcactgaaaaagctcagtctcaaatccctcaaacgatcacttgaactcttctctcccgtccatggccaattccctcctcctgacccggaagccaagcagattcgtctcagccataagatgaaagttgcgtttggaggtgtagaacctgttgtgagtcaacctccacgtcaacctgaccgcatcaatgagcagccaggaccttcaaatgctcttgccctcgcagctcctgaagggtctaagagtacgcaaaagggtgcgacagagagtgctattgttgttggtccaactttactgcgtccaatactgcctaaaggcttgaactatacaggttcctcagggaagagcaccaccattatacctgcaaatgtatcttcatatcaaagaaatctgtcaactgctgcattaatggagagaataccaagtagatggccccggccagagtggcatgcaccatggaagaattacagggtcattcaggggcacttgggttgggtcagatctgttgcgtttgacccgagtaatgaatggttttgtactggttcagctgatcgtaccatcaagatatgggatgtagcaactggagttctgaagctaacacttactgggcatatcgagcaagtacgaggccttgctgtaagcaatcgacatacctatatgttctctgctggtgatgacaagcaagtcaaatgctgggaccttgaacagaataaggttatccgatcttatcatggtcacttgagtggtgtctattgcttagctctgcacccaactttggatgttttattaaccggggggcgagactctgtctgcagggtgtgggatattcgtaccaagatgcaaatttttgcactctcaggacatgacaacaccgtttgttctgtatttactcgtccaacagacccacaagttgtcaccggatcccatgacacgaccattaaattttgggaccttcgatatggaaaaacaatgtcaacgctaacacatcataagaaatctgtccgagcaatgaccctccatcctaaagagaatgcctttgcttctgcatcagctgacaacaccaagaaatttagccttccaaagggagagttctgccacaacatgctttcgcaacagaaaaccataattaatgcaatggctgtaaacgaggatggtgtgatggtcactggaggtgataatggaagtatatggttctgggactggaagagtggtcacagtttccaacagtcagaaactatcgtacagcctggttccctggagagtgaagcgggtatatatgcagcgtgttatgataatacaggttcaagattggtaacatgcgaggctgataagacgataaagatgtggaaagaagatgagaatgcaactccagaaactcatcctatcaatttcaaaccaccaaaggagattaggcgcttctaa

SEQ ID NO: 2714 - protein, 486 aa, Arabidopsis thaliana
MPAPTTEIEPIEAQSLKKLSLKSLKRSLELFSPVHGQFPPPDPEAKQIRLSHKMKVAFGGVEPVVSQPPRQPDRINEQPGPSNALALAAPEGSKSTQKGATESAIVVGPTLLRPILPKGLNYTGSSGKSTTIIPANVSSYQRNLSTAALMERIPSRWPRPEWHAPWKNYRVIQGHLGWVRSVAFDPSNEWFCTGSADRTIKIWDVATGVLKLTLTGHIEQVRGLAVSNRHTYMFSAGDDKQVKCWDLEQNKVIRSYHGHLSGVYCLALHPTLDVLLTGGRDSVCRVWDIRTKMQIFALSGHDNTVCSVFTRPTDPQVVTGSHDTTIKFWDLRYGKTMSTLTHHKKSVRAMTLHPKENAFASASADNTKKFSLPKGEFCHNMLSQQKTIINAMAVNEDGVMVTGGDNGSIWFWDWKSGHSFQQSETIVQPGSLESEAGIYAACYDNTGSRLVTCEADKTIKMWKEDENATPETHPINFKPPKEIRRF

SEQ ID NO: 2715 - DNA, 1515 bp, Neurospora crassa
  CDS (1)..(1515)
atggcggccgaggttgccaacagcgccgccaatggctctggccctgacaccaacccgctctcgaccatgatccgcgagaacgctagaaaaacgaaactcatctacgccgccacagccacaactacagatgcctctggcacttccgggagaaagcgtctaaaactcgaccctgggcttgcgtcagaagatcccgacatcaccaagaccggcctatctctccgtctccacgccgagtacagcgacgtccagaccctccccgaagccattgcctccaagttgccagccggcggaccacgcaaaaagaaggccaagccagccatcgaagaggctccctcaaaatccgaagaacacgcccgcaaactcatcgagggtatcccaccgagcaagtccgccgccgccaactcgaatgctctggtcctgtcgcgcagcaagcccggcggcgctggcgcgtcgtcaaccagaccaaatgcgcaacgaaacgagccccaaacaaacagcctggcgcggcgatccgacgtgctggtacagcccaggccagattggcacccaccttggaagcttctcaaggtgctttcgggccatctggggtgggtgcgtgccttggcagtagaaccggacaacaagtggtttgcctcgggcgcaggcgaccgcactatcaagatttgggatttggcgtcaggagcgctgaagttgactcttaccggacacatctcgacggttcgcggattggccgtgtcaccgagacacccatacctgttctcgtgcggtgaggataagatggtcaagtgctgggatttggagacgaacaaggttatccgacattaccacggccatctcagcggtgtttatacccttgcgctgcatcctacactggatgttttggtaacaggcggtcgcgacggtgtcgcgcgtgtgtgggatatgcggacaagaagcaacattcacgtcctctctggacacacaggcacagtagcggatcttgtctgtcaggaggccgaccctcaggtcatcacagccagcttggactcgaccgttcgcatgtgggatctggcagccggcaagacgatgggcgtcttgacacatcacaagaagggtgtgcgagcgttgacgacgcatccaaccgagtttacgttcgcaacgggtagcacaggcagcatcaagcagtggaagtgtcccgagggtgcttttatgcagaattttgagggacacaatgccatcatcaacacgctatccgtgaacgaccaaaacgtcatgttctctggtggcgacaatggttccatgagcttctgggattggaagtcgggccatcgcttccaggctcttgatacgattgctcagcctggttcacttgatgcggagtcgggtatcatgagctcgacctttgacaagtctggcgcccgcttgatttgcggtgaagcggacaagaccattaaaatatggggtgaagaccttagcgcgacaccagagtcgcatcccctcgagtggaagccaacattggctaagcgtaaattttaa

SEQ ID NO: 2716 - protein, 504 aa, Neurospora crassa
MAAEVANSAANGSGPDTNPLSTMIRENARKTKLIYAATATTTDASGTSGRKRLKLDPGLASEDPDITKTGLSLRLHAEYSDVQTLPEAIASKLPAGGPRKKKAKPAIEEAPSKSEEHARKLIEGIPPSKSAAANSNALVLSRSKPGGAGASSTRPNAQRNEPQTNSLARRSDVLVQPRPDWHPPWKLLKVLSGHLGWVRALAVEPDNKWFASGAGDRTIKIWDLASGALKLTLTGHISTVRGLAVSPRHPYLFSCGEDKMVKCWDLETNKVIRHYHGHLSGVYTLALHPTLDVLVTGGRDGVARVWDMRTRSNIHVLSGHTGTVADLVCQEADPQVITASLDSTVRMWDLAAGKTMGVLTHHKKGVRALTTHPTEFTFATGSTGSIKQWKCPEGAFMQNFEGHNAIINTLSVNDQNVMFSGGDNGSMSFWDWKSGHRFQALDTIAQPGSLDAESGIMSSTFDKSGARLICGEADKTIKIWGEDLSATPESHPLEWKPTLAKRKF

SEQ ID NO: 2717 - DNA, 1278 bp, Ashbya gossypii
  CDS (1)..(1278)
atgaatgagcacagcgatgatgtatatgtacgtgcgaggctgcgcaaccagtttggttatatgacatgggtaccagaatatgtcgaagacagaatcagtagcaagaaaggcatactgcaacgatacgaggactaccagcagaagcaagctaaggcgcaggaggtgaagacagacagcttggtaaagtacgatggcgcaaaggacgtccctcgcaatctgctgcgcatctaccggttcgaggcggatacgtctgcgcttgcgcgctacgaggaagtggtgtcacagaagccgcaatggcatgcgccctggaaactgacacgagtgatcaacgggcacacaggctgggttcgctgcgtgtgtgtcgaccctgtcgacaacgcgtggtttgccacggggagcaacgactccaccatccgggtgtgggacctggccactggcaagctcaaggtgacgctgcagggccacatcatgacggtccgggatatatgcatctccgcgcgacacccgtatatgttttctgcgagccaggataagttggtgaagtgctgggacctggagaggaacaccgtggtccgcgacttccatggcacgctctctggcgtccactcagtcgacctgcatccatcgctcgaccttatagtatctgctggccgggactcagttgtgcgggtgtgggatatccggagccggagctgcgtcctgacgcttgcgggccaccgcggccccatcaacaaggtgcgctgtctgcccgtggacccccagatcgtcagctgctccacggacgcgaccgtgaagctctgggacctggtggccggcaaaccaatgaagaccctaacccaccacaaacgcaatgtgcgcgacctcgcgttcaacccaaccgaattttcctttgcgtccgcctgcaccgacgacattcgctcctggaagcttgtggatggtcagctactcaccaacttcaactctgaggcgctcgggatagtgaacacgctcgcctgcaaccaggacggcgtgctcttcgccggcggtgacaccggcgagctctcgttcttcgattacaagactggccataagtttcagaagctggagactacggcgatgccgggttccctggagagcgagaagggggtgctagcgagcacttttgaccgcacagggctacgtctactaacttgtgaacgggataagagcatcaagatatggaaacacatagacggagcgacccaagattcccacccgggccttccatggaaccccagcctggtcagacagcggttctga

SEQ ID NO: 2718 - protein, 425 aa, Ashbya gossypii
MNEHSDDVYVRARLRNQFGYMTWVPEYVEDRISSKKGILQRYEDYQQKQAKAQEVKTDSLVKYDGAKDVPRNLLRIYRFEADTSALARYEEVVSQKPQWHAPWKLTRVINGHTGWVRCVCVDPVDNAWFATGSNDSTIRVWDLATGKLKVTLQGHIMTVRDICISARHPYMFSASQDKLVKCWDLERNTVVRDFHGTLSGVHSVDLHPSLDLIVSAGRDSVVRVWDIRSRSCVLTLAGHRGPINKVRCLPVDPQIVSCSTDATVKLWDLVAGKPMKTLTHHKRNVRDLAFNPTEFSFASACTDDIRSWKLVDGQLLTNFNSEALGIVNTLACNQDGVLFAGGDTGELSFFDYKTGHKFQKLETTAMPGSLESEKGVLASTFDRTGLRLLTCERDKSIKIWKHIDGATQDSHPGLPWNPSLVRQRF

SEQ ID NO: 2719 - DNA, 1362 bp, Aspergillus fumigatus
  CDS (1)..(1362)
atggacgtcttcccttctaccacaccggacgaagccgtccgcaaatccgcgaagcgaaccgctgaacttttcggctccgaatacctcctggtcacacctagcgtcgccgatggatcgatcggactatcgtaccgaaaaaaggcggaatactcagatgtgaaggaattacctccagctcttgccgagaagcaggcgaaagcagcagcggcaggtcgcgcgaagcgcccaaagatccaaccgcagacgaagccccaagcagacggaagcggcgcctcgatgtccctcgtgaagagggctgctggaccggctgcaggcggagtgggtggtgaaggtcaaccgaagagtttgattcagagaccctcggcgacgcgacagcaaagacctgactggcatcctccgtggaagctgatgagagtgatttcgggacatctgggatgggtgcggagtttggcggtggaaccgaacaacgaatggtttgctagcggtgcaggtgacagaacgatcaagatctggaatcttgcgacaggtgctcttcgtctgacgctgacgggccatatctctactgtccgcggcttggccgtgtctcctcgacacccgtacctcttctcctgtggtgaagacaaaatggtcaagtgctgggacctggaaacaaacaaggtcatccgtcactatcacggtcatctgagcggagtatataccctcgcattacatccgcgcctcgaccttctagtgaccggtggtcgagatggtgttgcccgagtctgggatatgcggacaagaagcaacatccacgtcctgtcaggccacaagggcaccgttgccgacttgaaatgccaggaagccgacccacagattattaccggttctctcgacgctacagtgcgcctgtgggaccttgcagccggaaagactatgggtgttctgacgcaccacaagaagggcgtgcgcaacctcgccatccatccgcgagaattcaccttcgccagcgccagcacaggaagcatcaagcaatggaagtgtcccgagggtgacttcatgcagaacttcgagggccacaatgccgtcatcaactctcttgccgtgaacgaggacaacgtcctcttctccggtggtgataacggctccatgtgcttctgggactggaagacaggctacaagttccagtccatcgacaccatggcgcagccgggttctttggacgccgaagccggtatcatgtctgctacattcgatcgcaccggcttgcgtttgatcaccggagaggccgataagactattaaggtctggaagcctgacgacgaagcgacgccagagtctcatcctgtcacttgggcaccgacccttggcagacagagatattaa

SEQ ID NO: 2720 - protein, 453 aa, Aspergillus fumigatus
MDVFPSTTPDEAVRKSAKRTAELFGSEYLLVTPSVADGSIGLSYRKKAEYSDVKELPPALAEKQAKAAAAGRAKRPKIQPQTKPQADGSGASMSLVKRAAGPAAGGVGGEGQPKSLIQRPSATRQQRPDWHPPWKLMRVISGHLGWVRSLAVEPNNEWFASGAGDRTIKIWNLATGALRLTLTGHISTVRGLAVSPRHPYLFSCGEDKMVKCWDLETNKVIRHYHGHLSGVYTLALHPRLDLLVTGGRDGVARVWDMRTRSNIHVLSGHKGTVADLKCQEADPQIITGSLDATVRLWDLAAGKTMGVLTHHKKGVRNLAIHPREFTFASASTGSIKQWKCPEGDFMQNFEGHNAVINSLAVNEDNVLFSGGDNGSMCFWDWKTGYKFQSIDTMAQPGSLDAEAGIMSATFDRTGLRLITGEADKTIKVWKPDDEATPESHPVTWAPTLGRQRY

SEQ ID NO: 2721 - DNA, 1284 bp, Candida glabrata
  CDS (1)..(1284)
atgagtattggcgatgagttggtagatgctgatgaggtatacagacaagcaagatggaaaaatcagtttgaagttttgagcaagctgccgagagtcttacaagagcgtgtcgatgctcaaaagcctgttattgaagcaagtggtaacagtgcaactccctccaatgccagtcgggcgctggtcaggcatcaacaaaacccaggagatgttggattggttctaaataagaagtttgccgatgagcaaggccatgaatcggtaattgagagacacgataagcttttgaatcaaacacctaggtggcatgcaccatggcatttaactagggtgatacatgggcatcatgggtgggtacgatgtattgcaatggataaagttgataatgaatggtttgctacaggaagtaatgataaaaccattaagatttggaacttggcttctggtaagcttaaagtaactttaaaggctcatgatatgactgtcagagaccttgcaatctctaataggcatccatacatgttctcggtgagtgaggataaaacggtcaaatgttgggacctggaaaagaatacggcaattagaaattatcatggacatctatctggtgtgcatactgtagatatccatccaacagttgatgtggtagtaactgcagggcgtgacagtgttgtaaaagtgtgggacataaggacaagattaccagtgatgacattacctggtcataaaggacccataacaaaagtacggtgtcttccagttgacccccaggtgatcagcagttctgtagatgcgtcaataagattatgggatttagtagcaggaaaatcaatgaaggtgttaacacatcatcaaagaacggtaagagatatatcagttcatccatctgaattttcgtttgcatctgcgtgtacaaatgatatacgatcatggttgttaccaaagggagagttactaacaaactttgtctcacaagacttagatgttataaatacagtatcgattaatcaagatgatgttttgtttgctggttctgacaatggatcattaacgttctttgactataaatcaggtcataagtatcagactttcaagacaaaagaggcgcctggttctcctgaaagtgaacgaggtatcctatcaagtactttcgatggaacaggtttacgtttattgacaggtgagacagatcgaacaatcaaaatttggaaacaagatgaaactgcctctcaagacactcatcctaatttaccttggaatccaaaactagattcacaaagactttaa

SEQ ID NO: 2722 - protein, 427 aa, Candida glabrata
MSIGDELVDADEVYRQARWKNQFEVLSKLPRVLQERVDAQKPVIEASGNSATPSNASRALVRHQQNPGDVGLVLNKKFADEQGHESVIERHDKLLNQTPRWHAPWHLTRVIHGHHGWVRCIAMDKVDNEWFATGSNDKTIKIWNLASGKLKVTLKAHDMTVRDLAISNRHPYMFSVSEDKTVKCWDLEKNTAIRNYHGHLSGVHTVDIHPTVDVVVTAGRDSVVKVWDIRTRLPVMTLPGHKGPITKVRCLPVDPQVISSSVDASIRLWDLVAGKSMKVLTHHQRTVRDISVHPSEFSFASACTNDIRSWLLPKGELLTNFVSQDLDVINTVSINQDDVLFAGSDNGSLTFFDYKSGHKYQTFKTKEAPGSPESERGILSSTFDGTGLRLLTGETDRTIKIWKQDETASQDTHPNLPWNPKLDSQRL

SEQ ID NO: 2723 - DNA, 1422 bp, Cryptococcus neoformans
  CDS (1)..(1422)
atgtcaacatcactcgaaaccccctcaggggcctccgctggcccttcaattgttgccagcgggctcccccctctagctgatttagtacgagcaggaagcaaacgaactcgagtcgtgtacggtgcggagacttcagcggtggaagacgatggtctcgcaagggcaaacaaaattaagctggccacgaaactggcgattgagtacaaggacgttcaaacattaccacctatcttacaagctcagcaaaccggtccagccggacccaagcgaccaacacagccatccattgccgcttcagctaccgctggtcccaacgtcaagctcattggcggacccgaggctgagaaagcgtcctcatccacccctcaagctgttgccgagcctcgctcattagtgaagttcagacatcaagaaggatttgccgctgagggtggccaggctacttccagattgtcgcaagctttgatgaggaagaaggaagccagagaagtcaagcccgaatatcaccccgagtggaagcttacacgagttatttctggccatatgggatgggtgcgcgccgttgcaatggatccaggaaatcaatggtttgccaccggtgctggtgatcgtgttatcaagatatgggatcttgcttcgggagaactcaaactgtcattaactggacatatctctaccatccgagggttagcagtatcagatcgtcacccgtatttgttttcttgcgcggaagacaagatggtcaagtgctgggatcttgagaccaacaaggtcatccggcactatcatggtcacttttccggcgtctattccctttcagtccatcctacgttagacgtactagtcaccggtggtcgagatgcgagcgttagagtatgggacatgcgtacgcgagccaacatcttcacactcactggccatacgagtactgtgggcgatgtcaagactcaggattctgatccgcaaatcatatccggtagtatggatagcaccgttaggctatgggatcttgcggctggcaaatgcatgaacactctcactcaccacaagaagtctgttcgtgcccttgcgatccatccgacggagtacagctttgctagtgctagctcaggtggcaacaatatcaaaaaatggaaatgcccagagggcatctttgtcaacaactttgtcggtcatgaggccatcatcaacacactgagtatcaactcggagaatgtcttgttttctggagcggacaacggtactctcacattatgggattacaagactggtttgcctttccaacacctcaaggatattccccaacctggttcactcgatgccgaagcgggagtgttctgttctacatttgacaaaacgggcacgcgtctcattacaggtggagcagataagacaatcaaggtgtattccgagcaggcatag

SEQ ID NO: 2724 - protein, 473 aa, Cryptococcus neoformans
MSTSLETPSGASAGPSIVASGLPPLADLVRAGSKRTRVVYGAETSAVEDDGLARANKIKLATKLAIEYKDVQTLPPILQAQQTGPAGPKRPTQPSIAASATAGPNVKLIGGPEAEKASSSTPQAVAEPRSLVKFRHQEGFAAEGGQATSRLSQALMRKKEAREVKPEYHPEWKLTRVISGHMGWVRAVAMDPGNQWFATGAGDRVIKIWDLASGELKLSLTGHISTIRGLAVSDRHPYLFSCAEDKMVKCWDLETNKVIRHYHGHFSGVYSLSVHPTLDVLVTGGRDASVRVWDMRTRANIFTLTGHTSTVGDVKTQDSDPQIISGSMDSTVRLWDLAAGKCMNTLTHHKKSVRALAIHPTEYSFASASSGGNNIKKWKCPEGIFVNNFVGHEAIINTLSINSENVLFSGADNGTLTLWDYKTGLPFQHLKDIPQPGSLDAEAGVFCSTFDKTGTRLITGGADKTIKVYSEQA

SEQ ID NO: 2725 - DNA, 1359 bp, Emericella nidulans
  CDS (1)..(1359)
atggacgtgattccatcgactacgccaggtgaggccgtgcgcatctcggcgaagagaacagccgagcttttcggtcccgaatatctcatggtcacaccctccgcctcgaacggatcgattggtgtttcctaccgacgaaaaacagaatatgaacatgtgaaggagcttcctccagctcttgccgcaaaacaagcgcaagcagccgcagcaaggtcgaagcggcctaagatcagttcacggtcagaaggatcgggctctggggacaagagtggcgcgtctacggcccttgtaaggagaggaggtcgcgcgagcggcgctgcgggagatgacaagccaacgagcttaattcagagaccatcagccacacggcaacaacctcccgagtggcacgcaccatggaagctgatgagggttatatcgggccatctgggatgggtgcggagtttggctgtggaaccgaataacgagtggtttgccagtggtgctggagaccggacaattaagatctggaatcttgcgaccggtgcactgcggttaacccttacgggtcatatctcgactgttcgcggtttagccgtatccccgcgacacccatacctcttctcctgcggtgaggataagatggtcaaatgctgggatctggaaacgaacaaggtcattcgtcattaccacggccatctcagtggtgtatacacacttgcgctccacccccgtcttgacctgctagtaactggtggtcgagatggcgtcgcacgtgtgtgggatatgcgcactcgcagcaacattcacgttctgtccggccacaccggcactgtcgcagatgtacaatgccaagaagccgaccctcaagtcattaccggatctctcgacgcgaccgtccgcctctgggatctcgcagctggaaagaccatgggcgtcctcactcaccacaaaaagggcattcgcagtctagccacgcaccctcgcgaattcaccttcgcatctgctagcacagggagcatcaagcaatggaagtgtcctggtggcgagttcatgcagaactttgaaggtcataacgcgatcatcaataccctctccgtcaatgaagacaatgtcctcttctccggtggtgacaacggctccatgtccttctgggactggaagacgggataccgctaccagactatcgatacaaccgcccagccgggttcgcttgaagctgaagctggtatcatgacgtctacgttcgataggacgggcctgcgcttgattaccggtgaggcggataagactatcaaggtctggaagcaggatgatcaggctacgccagagactcatcctgtgacgtgggctccaacactggggaggcagagatattag

SEQ ID NO: 2726 - protein, 452 aa, Emericella nidulans
MDVIPSTTPGEAVRISAKRTAELFGPEYLMVTPSASNGSIGVSYRRKTEYEHVKELPPALAAKQAQAAAARSKRPKISSRSEGSGSGDKSGASTALVRRGGRASGAAGDDKPTSLIQRPSATRQQPPEWHAPWKLMRVISGHLGWVRSLAVEPNNEWFASGAGDRTIKIWNLATGALRLTLTGHISTVRGLAVSPRHPYLFSCGEDKMVKCWDLETNKVIRHYHGHLSGVYTLALHPRLDLLVTGGRDGVARVWDMRTRSNIHVLSGHTGTVADVQCQEADPQVITGSLDATVRLWDLAAGKTMGVLTHHKKGIRSLATHPREFTFASASTGSIKQWKCPGGEFMQNFEGHNAIINTLSVNEDNVLFSGGDNGSMSFWDWKTGYRYQTIDTTAQPGSLEAEAGIMTSTFDRTGLRLITGEADKTIKVWKQDDQATPETHPVTWAPTLGRQRY

SEQ ID NO: 2727 - DNA, 1305 bp, Kluyveromyces lactis
  CDS (1)..(1305)
atgaatacatccagccgtagctctgaaccttcgaaggtagcagatgatgtttacgttcaaactcggtggaataatgaatttaaacatgctgattatttacctgagtcgttacagaagtgcctggatcaagaaaagactgttttagaaaggtacagtgaattagttgaggtgtcgaaaactgttgcaaacgaaagctctcaagcattagtcaaacataccacaaaaccaggcgaccaactagtacgaagagtgttccaacagccacatcagcagatttcattgatggaacgttatgaaaagactcgaagttataaaccgcaatggcatgcaccatggaaactcagtaaggtaataaatggtcatactggatgggtaagatgtgtatgcgtggaccccgttgacaatgaatggtttgctactggtagcaacgatacaaccattaaaatctgggatttagctgcgggaaagttgaaaattactctaatcgggcatgtaatgagtgttcgagatattgctatctcaaagagacatccttatatgttctcagcaagcgaagataaacttgtaaaatgttgggatctagaaagaaatactgcaattagggattttcacggtcatttatctggcgtgcataccgttgatgttcatccgagccttgatataatagctactgctggtcgtgatgctgtagtaaggttgtgggatatacgatcaagatctgagataatggttctgcccggtcataaaagccctataaataaagtcaaatgccttcccgttgacccacaaataatcagttgttccggggatgcaacagttagactttgggatatcattgcagggaaggcaagcaaagttttaacgcaccatagtagaaacatcagagacttgacgctacacccagcagagtttagctttgccagtgtatctacgaacgacgtcagatcctggaaattgcccgaaggacagctattaaccaactttcaatcccagaacactgggattttgaataccgtatcaattaatcacgataatgtactattagctggtggagatgacggtactttgtgcttttacgattacaaaacaggacacaaataccaaagtatgatgacaactgaagttgctggctcacttgaaagtgagcgatcgattttatgcagcacctttgatgtcacaggaacaagactcatcacaggggaaggagacaaaagcatcaaaatatggaagcaagtccctgatgctacagaagatacattccctggcttgccgtggaatcccacgttaatatctcaaagattctaa

SEQ ID NO: 2728 - protein, 434 aa, Kluyveromyces lactis
MNTSSRSSEPSKVADDVYVQTRWNNEFKHADYLPESLQKCLDQEKTVLERYSELVEVSKTVANESSQALVKHTTKPGDQLVRRVFQQPHQQISLMERYEKTRSYKPQWHAPWKLSKVINGHTGWVRCVCVDPVDNEWFATGSNDTTIKIWDLAAGKLKITLIGHVMSVRDIAISKRHPYMFSASEDKLVKCWDLERNTAIRDFHGHLSGVHTVDVHPSLDIIATAGRDAVVRLWDIRSRSEIMVLPGHKSPINKVKCLPVDPQIISCSGDATVRLWDIIAGKASKVLTHHSRNIRDLTLHPAEFSFASVSTNDVRSWKLPEGQLLTNFQSQNTGILNTVSINHDNVLLAGGDDGTLCFYDYKTGHKYQSMMTTEVAGSLESERSILCSTFDVTGTRLITGEGDKSIKIWKQVPDATEDTFPGLPWNPTLISQRF

SEQ ID NO: 2729 - DNA, 1422 bp, Schizosaccharomyces pombe
  CDS (1)..(1422)
atgacagaagcaaaaaacatatcggatgatacagatgtactttctttgactacaaatagtcttagaacatcaaaaactctttttggagccgagtttgggtcagttaccagttttgacgatactgtagctcaaaatctcaaaagaacatacaaagaacatttagaatatggttctgttcttggaggaactgttggaaaacggaagaaccgacattacgaagaagacactattggtagtaatgctttgacggttagagcagacagtgaaaacccttcctcccaagtgatcaccaagttttcagatcctaataagaaaatagcagggcaggtttccatgcaatctttagaaaaaattaaaggagttcctgaagcagcacatagaattgccggagaatcccaggcttctctcgtaaagcgcactcttgccgaacagattcgccctgaatggcatgctccatggactcttatgcgtgttattagtggtcatttgggttgggttcgatgcgtagatgttgaacccggtaatcaatggttttgcacgggtgctggggaccgcaccatcaaaatatgggacttagcgtctggagtacttaagctaacattgactgggcatatcgccactgtgcgaggattagcagtatctccccgtcatccatatttattttcctgtggtgaagacaaaatggtaaaatgctgggacctcgaaactaataaagtgatccgccattatcacgggcatctttccggagtctatgccttaaaactccatccaacacttgacgtccttgttaccgctggtcgtgatgcagtcgctcgtgtttgggatatgcgcactcgccaaaatgtccatgttttatcgggccacaaatccactgttgcttctttagccgttcaagaattcgatcctcaagtagtcacgggttccatggattctactatcagattatgggatttagcagctgggaaaaccttgacgaccttgacacatcacaaaaaaactgttcgtgccctgtctttgcatccagatgaatttacttttgccagtggctcgtccgacaatatcaaacattggaaattccctgaaggcgcatttatgggtaattttgaaggacataatgcaatcgttaatactctttcaataaactcagataatgttatgttttctggtgctgataatggaagcatgtgcttttgggattggaagtctggtcacaaatatcaagagcttcaatctgttgttcaacctggttcattggatagcgaagctggaatctttgctagttcttttgataaaaccggtttgcgtctaattacttgtgaggctgataaaagcgtaaagatatacaaacaagtggacaatgccacacctgaaacacatcccaatttgccatggacaccatcaaatcttcgtcggcgatattaa

SEQ ID NO: 2730 - protein, 473 aa, Schizosaccharomyces pombe
MTEAKNISDDTDVLSLTTNSLRTSKTLFGAEFGSVTSFDDTVAQNLKRTYKEHLEYGSVLGGTVGKRKNRHYEEDTIGSNALTVRADSENPSSQVITKFSDPNKKIAGQVSMQSLEKIKGVPEAAHRIAGESQASLVKRTLAEQIRPEWHAPWTLMRVISGHLGWVRCVDVEPGNQWFCTGAGDRTIKIWDLASGVLKLTLTGHIATVRGLAVSPRHPYLFSCGEDKMVKCWDLETNKVIRHYHGHLSGVYALKLHPTLDVLVTAGRDAVARVWDMRTRQNVHVLSGHKSTVASLAVQEFDPQVVTGSMDSTIRLWDLAAGKTLTTLTHHKKTVRALSLHPDEFTFASGSSDNIKHWKFPEGAFMGNFEGHNAIVNTLSINSDNVMFSGADNGSMCFWDWKSGHKYQELQSVVQPGSLDSEAGIFASSFDKTGLRLITCEADKSVKIYKQVDNATPETHPNLPWTPSNLRRRY

SEQ ID NO: 2731 - DNA, 1419 bp, Yarrowia lipolytica
  CDS (1)..(1419)
atggcggactgcatcaaggtgatgccaacaccgacaggaatggcgatggctggccgtcataatcagagactacaaggaacttgtaatccacacatgcctgtcgccaaagacctgtttccagagtatggtactctcgcgaccggcgaaaatgaaccctctcgaaatatccgacgtgctcaaaaactcagggagttccagaacctcgaacttccaccatacctagcaaagcaggtggctgccaaaatggcagagaagggtttggcagtggaagccacaggaggtgtggcagtccagcgaatcgcaggaggatctcagagcggccagaaggctctgatgggagcttcttcctcggcactcacgaaacacacgccctctgcaagccaaccaactacacacgacagtctcactaatctcggagccaaccttacacagtcgaaaccggcgtggcacgcaccatgggagatctacagagtcattacaggccatcagggctgggtgagatctgtttgtgttgaaccagagaaccagtggtttgctacaggttctgcagacaagactatcaagatctgggatctggctacaggaaaattgcgactgactctcacaggacacattatgggtgttagagcattgggagtgtcgccacgacatccttacatgttttcgggaggtgaagacaagatggtcaagtgttgggatctggaaactaacaaggtcgttcgacactaccatggccatctctctgcagtctactcgctggacattcatcctactctggatgtcctagtgtctgctggtcgagacgctgtggcccgtgtgtgggacattcgtactcgtgaccctgtggttgttctcagtggacacaagtcgactatcaacagagtcaagttccaggcctctgaaccccaggtgattacagcttcggcagatgagactgtgcgactgtggaacctacaggccgggaagaccatgacaacgctcacgcatcacaagaagagtgtgcgaggcctcactttacatcccgaggagttcactttctccacggcctctgctaactccagtaagcaatggaagtgtcccgagggcgatctagtgctcaactacgacgaccagaacgctatcatcaataccctgtccgttaaccaagacaacgtcatgttttcgggaggcgacaacggctctattggcttttatgactggaagactggacatatgttccagagcacccagtctattcccatcccaggatctatcgagagtgaaaacggtattttcgactccagtttcgacaagactggtcttcgcctcatcacctgtgaggctgacaagagcatcaaaatgtggcgcgagaagcccaatgccacagcagaaagtgatcccggtctcgaatggaaacccaagatataccagacctattag

SEQ ID NO: 2732 - protein, 472 aa, Yarrowia lipolytica
MADCIKVMPTPTGMAMAGRHNQRLQGTCNPHMPVAKDLFPEYGTLATGENEPSRNIRRAQKLREFQNLELPPYLAKQVAAKMAEKGLAVEATGGVAVQRIAGGSQSGQKALMGASSSALTKHTPSASQPTTHDSLTNLGANLTQSKPAWHAPWEIYRVITGHQGWVRSVCVEPENQWFATGSADKTIKIWDLATGKLRLTLTGHIMGVRALGVSPRHPYMFSGGEDKMVKCWDLETNKVVRHYHGHLSAVYSLDIHPTLDVLVSAGRDAVARVWDIRTRDPVVVLSGHKSTINRVKFQASEPQVITASADETVRLWNLQAGKTMTTLTHHKKSVRGLTLHPEEFTFSTASANSSKQWKCPEGDLVLNYDDQNAIINTLSVNQDNVMFSGGDNGSIGFYDWKTGHMFQSTQSIPIPGSIESENGIFDSSFDKTGLRLITCEADKSIKMWREKPNATAESDPGLEWKPKIYQTY

SEQ ID NO: 2733 - DNA, 1419 bp, Oryza sativa
  CDS (1)..(1419)
atggcgacggcggagccggtggagccgcagtcgctgaagaagctgagcctcaagtcgctcaagcgctcgcacgacctcttcgcgcccacccactccctcctcttcactcccgatccggagagtaagcaggttcgtgtcggctgcaaggtgaatgcagagtacagcgcggtgaagaacctaccaacagatcagggccgaggacaggtcaagagtgctgcggcaccttcaactgcattggcgcttccaggaacacaagatgtcaaagatgctgataacaaaggcagcagtactgctattgttcctgcaccacatatgctccccaaagcaccggattcaacgataccaggcaagaatacaactataacaattcctggttcatctgacagattctctacatctgcactgatggaaaggataccaagtagatggccacggcctgtctggcatgctccttggaagaattatagggtgatcagtggtcacttgggatgggtgcggtcaattgcatttgatccaagtaacgaatggttctgtacgggttctgccgacaggacgattaagatctgggaccttgcatcaggaacattgaagcttacattgactggccatattgaacaaattcgtgggcttgctgtgagccaacggcacacatatttattttctgctggtgatgacaaacaagtaaagtgttgggatcttgaacaaaacaaggttattaggtcttatcatggccatttgagtggggtgtactgccttgctctacatccaacaatcgatatcttgctgactggtggtcgcgattcagtttgtagggtctgggacatccgaacgaaagctcatgtttctgctttaactggtcatgataacaccgtatgctcagtgtttgctcgtcctacggatccacaagttgtcacgggctcacatgattcaactatcaagttctgggaccttgtagctggaaggactatgtgtactcttacacatcataagaaatcagttcgggctatggcgctgcatccaaaagagaaatcgtttgcatctgcatcagcagacaatataaagaagtttagcctgcccaaaggcgaatttctacacaatatgctgtcccagcagaaaaccatcataaactcaatggctgtaaatgaagatggtgtcttggcaactggaggggataatgggagtctctggttttgggattggaagagtggccataactttcaacaagatcagactatagtacaacctggatcattggagagtgaggcatgcatatatgccctttcatacgatgttagtggatcacggctggtgacatgtgaagctgacaagacaataaaaatgtggaaggaagatttgtcagccactccagagacccatcctatcaatttcaagcctccaaaggacatcagaagatactga

SEQ ID NO: 2734 - protein, 472 aa, Oryza sativa
MATAEPVEPQSLKKLSLKSLKRSHDLFAPTHSLLFTPDPESKQVRVGCKVNAEYSAVKNLPTDQGRGQVKSAAAPSTALALPGTQDVKDADNKGSSTAIVPAPHMLPKAPDSTIPGKNTTITIPGSSDRFSTSALMERIPSRWPRPVWHAPWKNYRVISGHLGWVRSIAFDPSNEWFCTGSADRTIKIWDLASGTLKLTLTGHIEQIRGLAVSQRHTYLFSAGDDKQVKCWDLEQNKVIRSYHGHLSGVYCLALHPTIDILLTGGRDSVCRVWDIRTKAHVSALTGHDNTVCSVFARPTDPQVVTGSHDSTIKFWDLVAGRTMCTLTHHKKSVRAMALHPKEKSFASASADNIKKFSLPKGEFLHNMLSQQKTIINSMAVNEDGVLATGGDNGSLWFWDWKSGHNFQQDQTIVQPGSLESEACIYALSYDVSGSRLVTCEADKTIKMWKEDLSATPETHPINFKPPKDIRRY

SEQ ID NO: 2735 - DNA, 1434 bp, Triticum aestivum
  CDS (1)..(1434)
atggcggcggcatcagcgggcggcgagccggtagagccgcagtcgttgaagaagctgagtctcaagtcgctgagacgctccctcgacctcttcgcgcccacccactccctccccttcgctcccgacgccgagagcaaacggattcgcgtcagctgcaaggtgaatgcggagtacggcgcggtcaagaacctgccgaccgaccaggaccgagcgcaggggaagggcgccgccgctccttccaatgcattggcgcttctaggcacacaagacacaaaagatgctcctagggaaggcactagtaatgccattatccctgcaccgcttatgcttcctaaagcacctgaatctgcagtgcctggcaaaaatacaaccgtattgtcggttcctgggtcatctgatagattctcgacatctgcactgatggaaaggttgccaagtagatggcctaaacctgtatggcatgctccctggaagaactatcgggttatcagtggccacttgggctgggtgcgatctatagcatttgatccaggcaatgaatggttctgtactggttctgctgatagaacaataaagatatgggacctggcatcaggaatgttgaagctgacactaactggtcatattgaacaagtccgtggacttgctgtcagtcagcggcacacatatttattttctgctggtgatgacaaacaagtaaaatgttgggatcttgaacaaaataaggttattcggtcttatcatgggcatctgagtggggtttactgcttagctctccatccaacaattgatgtcttgctgacaggtggtcgagattcagtttgcagggtgtgggatatccgaacaaaggctcatgtttctgctttaactggacatgataacacagtttgttcagtgtttgctcggccaacggatccacaagttgtcactggctcacatgatacaactatcaagttctgggatcttgtagctgggaaaactatgtgtactcttacacaccataagaagtctgttcgggccatggcactacatccaaaagagaaatcatttgcttcagcatctgccgacaacataaaaaagtggagtctgcccaaaggcgaatttctgcacaacatgctgtcccagcaaaaaacaattctaaatgcaatggctgttaatgaggatggtgtcctggcaactgcaggggataatggaagcatgtggttttgggattggaagagcggccacaattttcagcaagaacagactattgtccagcctggatcattggagagtgaagcatgtatatatgccctttcttatgataatagtggatcaaggcttgtgacatgcgaggcagataaaacaataaagatgtggaaagaagatttaacagcaacaccagaaacccaccctgtcaacttcaagccaccaaaagacatccggagatattga

SEQ ID NO: 2736 - protein, 477 aa, Triticum aestivum
MAAASAGGEPVEPQSLKKLSLKSLRRSLDLFAPTHSLPFAPDAESKRIRVSCKVNAEYGAVKNLPTDQDRAQGKGAAAPSNALALLGTQDTKDAPREGTSNAIIPAPLMLPKAPESAVPGKNTTVLSVPGSSDRFSTSALMERLPSRWPKPVWHAPWKNYRVISGHLGWVRSIAFDPGNEWFCTGSADRTIKIWDLASGMLKLTLTGHIEQVRGLAVSQRHTYLFSAGDDKQVKCWDLEQNKVIRSYHGHLSGVYCLALHPTIDVLLTGGRDSVCRVWDIRTKAHVSALTGHDNTVCSVFARPTDPQVVTGSHDTTIKFWDLVAGKTMCTLTHHKKSVRAMALHPKEKSFASASADNIKKWSLPKGEFLHNMLSQQKTILNAMAVNEDGVLATAGDNGSMWFWDWKSGHNFQQEQTIVQPGSLESEACIYALSYDNSGSRLVTCEADKTIKMWKEDLTATPETHPVNFKPPKDIRRY

SEQ ID NO: 2737 - DNA, 1446 bp, Brassica napus
  CDS (1)..(1446)
atgccggctcccacgacggaggccgaatcaatagaaccacagtcgctgaaaaagctcagcatcaaatccctaaaacgagcacttgatctcttctcccccgtccacggccaattccctcctcctgatgccgaagccaagaagattcgtctcagccataagatgaaagttgcttttggaggtgtggagcctgtgagccagcctccacgtcagcctgaccgtggcaatgagcagaccggaacctcaagtgctcttgctctcccaggtcctgaaggctccaagagtacccaaaagggtgtgacagagaatgctcttgttgttggtccaactttccagccaaagggcttgaacagtattggtacctcaggcaaaagcaccaccatcatccctgcaaatgtatcctcttatgaaagaaacttttcaacttctgcattaatggagagaatacctagtagatggccgcgcccagagtggcatgcaccatggaagaattacagggtcattcaagggcacttggggtgggtcagatctgtcgcctttgaccccagtaatgaatggttttgtactggttcagctgatcgtaccatcaagatatgggatgtagcaactggagttctgaagctaacacttactggtcatatagagcaagtgcgaggccttgctgtaagcaatcgacatacatacatgttctcagctggggatgacaagcaagtcaaatgctgggaccttgagcagaataaggttatccgatcttatcatggacacttgagtggagtctattgcttagctcttcacccaactctagacgtggtactaaccggagggcgagactctgtctgcagggtgtgggatattcgtaccaagatgcaaatttttgcactcacaggacatgacaacaccgtttgttctgttttcactcgtccaacagacccacaagttgtaactggatctcatgacactactattaaattctgggaccttcgatatggcaaaacaatgacgactctaacacatcataagaaatctgtccgagcaatgacccttcatcctaaagagaatgcatttgcttctgcatcagctgacaacaccaaaaagtttagccttccaaagggagagttttgccacaacatgctttcgcagcagaaaaccataattaacgcaatggctgtgaacgaggatggtgtaatggtcactggaggtgataatggaagtatatggttctgggactggaagagtggtcatagtttccaacagtcagaaactattgtacagcctggttcactggagagtgaagcgggtatatacgcagcgtgttatgatcagacaggttcaagattggtaacatgtgaggctgataagacgataaagatgtggaaagaagatgagaatgctactccagagactcaccctgtcaatttcaaaccacccaaggagattaggcgcttctga

SEQ ID NO: 2738 - protein, 481 aa, Brassica napus
MPAPTTEAESIEPQSLKKLSIKSLKRALDLFSPVHGQFPPPDAEAKKIRLSHKMKVAFGGVEPVSQPPRQPDRGNEQTGTSSALALPGPEGSKSTQKGVTENALVVGPTFQPKGLNSIGTSGKSTTIIPANVSSYERNFSTSALMERIPSRWPRPEWHAPWKNYRVIQGHLGWVRSVAFDPSNEWFCTGSADRTIKIWDVATGVLKLTLTGHIEQVRGLAVSNRHTYMFSAGDDKQVKCWDLEQNKVIRSYHGHLSGVYCLALHPTLDVVLTGGRDSVCRVWDIRTKMQIFALTGHDNTVCSVFTRPTDPQVVTGSHDTTIKFWDLRYGKTMTTLTHHKKSVRAMTLHPKENAFASASADNTKKFSLPKGEFCHNMLSQQKTIINAMAVNEDGVMVTGGDNGSIWFWDWKSGHSFQQSETIVQPGSLESEAGIYAACYDQTGSRLVTCEADKTIKMWKEDENATPETHPVNFKPPKEIRRF

SEQ ID NO: 2739 - DNA, 1446 bp, Brassica napus
  CDS (1)..(1446)
atgccggctcccacgacggaggccgaatcaatagaaccacagtcgctgaaaaagctgagcatcaaatccctaaaacgagctcttgatctcttctcccccgtccacggccaattccctcctcctgatgccgaagccaagaagattcgtctcagccataagatgaaagttgcttttggaggtgtggagcctgtgagtcagcctccacgtcagcctgaccgtggcaatgagcagaccggaacctcaagtgctcttgctctcacaggtcctaaaggttctaagagtacccaaaagggcgtgacagagaatgctcttgttattggtccaactttccagccaaagggcttgaacagtattggtacctcaggcaaaagcaccaccattattcctgcaaatgtatcctcttacgaaaggaacttttcaacttctgcattaatggagagaataccgagtagatggcctcgcccagagtggcatgcaccatggaagaattacagggtcattcaggggcacttgggttgggtcagatctgtcgcctttgaccccagtaatgaatggttttgtactggttcagctgatcgtaccatcaagatatgggatgtagcaactggagttctgaagctaacacttactggtcatatagagcaagtgcgaggccttgctgtaagcaatcgacatacatacatgttctcagctggggatgacaagcaagtcaaatgctgggaccttgagcagaataaggttatccggtcttatcatggacacttgagtggagtctattgcttagctcttcacccaactttagacgtgttactaaccggagggcgagactctgtctgcagggtgtgggatattcgtaccaagatgcaaatttttgcactcacaggacatgacaacaccgtttgttctgttttcactcgtccaacagacccacaagttgtaactggatctcatgacactactattaaattctgggaccttcgatatggcaaaacaatgacgactctaacacatcataagaaatctgtccgagcaatgacccttcatcctaaagagaatgcatttgcttctgcatcagctgacaacaccaaaaagtttagccttccaaagggagagttttgccacaacatgctttcgcagcagaaaaccataattaacgcaatggctgtgaacgaggatggtgtaatggtcactggaggtgataatggaagtatatggttctgggactggaagagtggtcatagtttccaacagtcagaaactattgtacagcctggttcactggagagtgaagcgggtatatacgcagcgtgttatgatcagacaggttcaagattggtaacatgtgaggctgataagacgataaagatgtggaaagaagatgagaatgctactccagagactcaccctgtcaatttcaaaccacccaaggagattaggcgcttctga

SEQ ID NO: 2740 - protein, 481 aa, Brassica napus
MPAPTTEAESIEPQSLKKLSIKSLKRALDLFSPVHGQFPPPDAEAKKIRLSHKMKVAFGGVEPVSQPPRQPDRGNEQTGTSSALALTGPKGSKSTQKGVTENALVIGPTFQPKGLNSIGTSGKSTTIIPANVSSYERNFSTSALMERIPSRWPRPEWHAPWKNYRVIQGHLGWVRSVAFDPSNEWFCTGSADRTIKIWDVATGVLKLTLTGHIEQVRGLAVSNRHTYMFSAGDDKQVKCWDLEQNKVIRSYHGHLSGVYCLALHPTLDVLLTGGRDSVCRVWDIRTKMQIFALTGHDNTVCSVFTRPTDPQVVTGSHDTTIKFWDLRYGKTMTTLTHHKKSVRAMTLHPKENAFASASADNTKKFSLPKGEFCHNMLSQQKTIINAMAVNEDGVMVTGGDNGSIWFWDWKSGHSFQQSETIVQPGSLESEAGIYAACYDQTGSRLVTCEADKTIKMWKEDENATPETHPVNFKPPKEIRRF

SEQ ID NO: 2741 - DNA, 1434 bp, Glycine max
  CDS (1)..(1434)
atggaggtggagcccgtggagccgcagtcgctgaagaagctaagcttcaagtctctgaagcgcgctctcgatctcttctctcccatccacggacacctcgctactcccgatgccgaaagcaagaaaatacgcactagccacaaggtgagcgtggagtatggtggaatcaaaagcactgccaatcaacctcctcctcgtcaagttagttctgccacccaggatccagggtcctctaacactctggctcttccaggtcccggagattccaaggattctcagaaaggaggaccccaaaatgccttggttgttggtccaactatcccatccacaacaccgaatgatactggttttcagaacaaaagtacagcggttgtttcagcctctggttcatctgaaagaaatttatcaacatctgctttgatggaaagaatgccaagtaaatggccacgtcctgtatggcacgcaccatggaagaactacagggtcatcagcggtcacttgggatgggtgagatctgttgcagttgatcccagtaacacatggttttgtactggttctgcagatcgaactatcaagatatgggacttggcaagtggagtattgaagctcacattaacaggccacattgaacaagttagaggtcttgctgttagcaacagacatacttacatgttctctgctggtgacgataaacaagttaaatgttgggatcttgaacagaataaggttattaggtcttatcatggtcatctgagtggtgtttattgcttggctcttcatcccacaattgacgttttactaaacggaggacgtgattctgtctgccgggtttgggatatacgaagtaaaatgcagattcatgctctttcaggtcatgataacactgtctgttctgtgtttacgcggccaacggatccccaagttgttacaggttctcatgacactaccatcaagatgtgggaccttagatatggtaaaacaatgtcaactcttacaaaccataaaaaatctgttcgagcaatggcccagcatcccaaagagcaagcttttgcatctgcttcagctgacaatattaaaaagttcacccttccaaaaggagaattttgccacaatatgctctctcaacagaaaactatcatcaatgcaatggctgtcaatgaggagggtgtgatggttactggaggcgacaatggcagcatgtggttctgggattggaagagtggtcacaatttccagcaatcccaaacaattgtccagcctggttcattggacagtgaagctggtatttatgcttgtacctatgatcttactggttcgaggctcataacctgcgaagctgacaagacgataaaaatgtggaaagaagatgagagtgccactccagaaacccatccccttaacttcaggcctcctaaagacatccgtcgattctag

SEQ ID NO: 2742 - protein, 477 aa, Glycine max
MEVEPVEPQSLKKLSFKSLKRALDLFSPIHGHLATPDAESKKIRTSHKVSVEYGGIKSTANQPPPRQVSSATQDPGSSNTLALPGPGDSKDSQKGGPQNALVVGPTIPSTTPNDTGFQNKSTAVVSASGSSERNLSTSALMERMPSKWPRPVWHAPWKNYRVISGHLGWVRSVAVDPSNTWFCTGSADRTIKIWDLASGVLKLTLTGHIEQVRGLAVSNRHTYMFSAGDDKQVKCWDLEQNKVIRSYHGHLSGVYCLALHPTIDVLLNGGRDSVCRVWDIRSKMQIHALSGHDNTVCSVFTRPTDPQVVTGSHDTTIKMWDLRYGKTMSTLTNHKKSVRAMAQHPKEQAFASASADNIKKFTLPKGEFCHNMLSQQKTIINAMAVNEEGVMVTGGDNGSMWFWDWKSGHNFQQSQTIVQPGSLDSEAGIYACTYDLTGSRLITCEADKTIKMWKEDESATPETHPLNFRPPKDIRRF

SEQ ID NO: 2743 - DNA, 1437 bp, Zea mays
  CDS (1)..(1437)
atggcaacggcggcggcggatggcccccctgtggaaccgcagtctctgaagaagctgagcctccggtcgctcaagcggtccctggacctcttcgccccggcgcacgccctcctcttcacgcccgacgccgagagcaagcggattcgtactgggtgcaaggtgagtgcggagtacggtgcggtgaaggacctcacgccggagcaggggcgcggtgggcagggcaagggtcctgcgccgccatcttcaacagctttggcattgccaggaacacaagatacaaaagatgctcacggagaaggctctaggaatgccattgtccctgcaccacttatgctgccaaaagcacctgaatctaccatacctggcaaaaatacaactctgtcaattcctggatcatctgacagattttctacatccgcactgatggaaaggatacctagtagatggccacggcctacatggcatgctccttggaagaactatcgggtcatcagtggtcacttgggatgggttcgatctattgcatttgatccagcgaatgaatggttctgcactggttctgccgataggacaataaagatatgggatcttgcatcaggaaccctgaagcttacactgactggtcatattgagcaaattcgtggacttgctgtcagccaacgtcacacttatttattttctgctggtgatgacaaacaagtaaaatgttgggatcttgaacaaaacaaggttattaggtcctaccatgggcatctgagtggtgtttactgcctagctctccatccaacaattgatatcttactgactggtggccgggattcagtttgcagggtgtgggacatcagaacaaaagcacatgtttctgctttaacagggcatgacaacactgtctgttcagtgtttgctcgtcctacggatcctcaagttgttactggttcacatgatacaactattaaattctgggatcttgtagctgggaggactatgtgtacccttactcaccataaaaagtctgtccgagctatggcgcttcatccaaaggagaaagcatttgcatcagcatcagcagacaacgtaaagaagtttaaccttcccaaaggcgaatttctgcacaacatgctgtcgcagcagaaaacaataatcaattcaatggctgtaaatgaggatggtgtcttggcaactggaggggataatggaagcctgtggttttgggactggaagagtggtcataactttcaacaagatcagactatagtccagcctggatcactggagagtgaggcatgcatatatgccctctcatatgacgtgagcggatcaaggcttgtgagctgtgaggcggataagactataaagatgtggaaagaggacttgacagcgacgccagagactcatcccatcaatttcaagcccccaaaggacatccgaagatattga

SEQ ID NO: 2744 - protein, 478 aa, Zea mays
MATAAADGPPVEPQSLKKLSLRSLKRSLDLFAPAHALLFTPDAESKRIRTGCKVSAEYGAVKDLTPEQGRGGQGKGPAPPSSTALALPGTQDTKDAHGEGSRNAIVPAPLMLPKAPESTIPGKNTTLSIPGSSDRFSTSALMERIPSRWPRPTWHAPWKNYRVISGHLGWVRSIAFDPANEWFCTGSADRTIKIWDLASGTLKLTLTGHIEQIRGLAVSQRHTYLFSAGDDKQVKCWDLEQNKVIRSYHGHLSGVYCLALHPTIDILLTGGRDSVCRVWDIRTKAHVSALTGHDNTVCSVFARPTDPQVVTGSHDTTIKFWDLVAGRTMCTLTHHKKSVRAMALHPKEKAFASASADNVKKFNLPKGEFLHNMLSQQKTIINSMAVNEDGVLATGGDNGSLWFWDWKSGHNFQQDQTIVQPGSLESEACIYALSYDVSGSRLVSCEADKTIKMWKEDLTATPETHPINFKPPKDIRRY

SEQ ID NO: 2745 - DNA, 24 bp, Artificial sequence
  primer
atggacggaaatgatcacaaagtc

SEQ ID NO: 2746 - DNA, 25 bp, Artificial sequence
  primer
ctaaaatcttttggcgcttaagttg

(The sequence listing continues in the following parts.)

1. A method for producing a transgenic plant cell, plant, or part thereof with increased biotic stress resistance to pathogenic fungi as compared to a corresponding non-transformed wild type control plant cell, plant, or part thereof, wherein the method comprises:
a) introducing into a plant cell a polynucleotide encoding a “disease resistance conferring protein” BSRP from Escherichia and/or yeast, and optionally
b) generating from the plant cell a transgenic plant or part thereof expressing the polynucleotide.

2. The method according to of claim 1, wherein the BSRP has an activity selected from the group consisting of:
chorismate mutase-T and prephenate dehydrogenase, b3262-protein, b3644-protein, chloramphenicol resistance protein homolog ydeA, Gamma subunit of the translation initiation factor eIF2B, glucose dehydrogenase, glucose-6-phosphate 1-dehydrogenase, peptidyl-prolyl cis-trans isomerase A (rotamase A), recombinase A, ribosomal protein, RNA polymerase sigma-E factor (sigma-24), Splicing factor that is found in the Cef1p subcomplex of the spliceosome (Prp46p), sulfite reductase (NADPH), flavoprotein beta subunit, transcription regulator farR, fatty acyl-responsive, transmembrane pore-generating protein mglC, YCR087W-protein, YGR150c-protein, YIL172C-protein, YLR168C-protein, YLR407W-protein, and YOR299W-protein.

3. A method for producing a transgenic plant cell, plant or part thereof with increased biotic stress resistance to pathogenic fungi as compared to a corresponding non-transformed wild type control plant cell, plant, or part thereof comprising increasing or generating one or more activities selected from the group consisting of:
chorismate mutase-T and prephenate dehydrogenase, b3262-protein, b3644-protein, chloramphenicol resistance protein homolog ydeA, Gamma subunit of the translation initiation factor eIF2B, glucose dehydrogenase, glucose-6-phosphate 1-dehydrogenase, peptidyl-prolyl cis-trans isomerase A (rotamase A), recombinase A, ribosomal protein, RNA polymerase sigma-E factor (sigma-24), Splicing factor that is found in the Cef1p subcomplex of the spliceosome (Prp46p), sulfite reductase (NADPH), flavoprotein beta subunit, transcription regulator farR, fatty acyl-responsive, transmembrane pore-generating protein mglC, YCR087W-protein, YGR150c-protein, YIL172C-protein, YLR168C-protein, YLR407W-protein, and YOR299W-protein.

4. The method of claim 3 wherein the activity of at least one polypeptide comprising a polypeptide selected from the group consisting of:
(i) a polypeptide comprising a polypeptide, a consensus sequence, or at least one polypeptide motif as depicted in column 5 or 7 of Table II or of Table IV, respectively;
(ii) an expression product of a nucleic acid molecule comprising a polynucleotide as depicted in column 5 or 7 of Table I; and
(iii) a functional equivalent of (i) or (ii);
is increased or generated.

5. The method of claim 1 wherein the expression of at least one nucleic acid molecule comprising a nucleic acid molecule selected from the group consisting of:
(a) a nucleic acid molecule encoding a polypeptide 5 or 7 of comprising a polypeptide as shown in column 5 or 7 of Table II;
(b) a nucleic acid molecule shown in column 5 or 7 of Table I;
(c) a nucleic acid molecule which encodes a polypeptide sequence depicted in column 5 or 7 of Table II and confers to a plant cell, plant or part thereof an increased biotic stress resistance to pathogenic fungi as compared to a corresponding non-transformed wild type control plant cell, plant, or part thereof;
(d) a nucleic acid molecule having at least 30% identity with a nucleic acid molecule sequence of a polynucleotide comprising the nucleic acid molecule shown in column 5 or 7 of Table I and conferring to a plant cell, plant or part thereof an increased biotic stress resistance to pathogenic fungi as compared to a corresponding non-transformed wild type control plant cell, plant, or part thereof;
(e) a nucleic acid molecule encoding a polypeptide having at least 30% identity with the amino acid sequence of the polypeptide encoded by the nucleic acid molecule of (a) to (c) and having the activity of a polypeptide comprising a polynucleotide as depicted in column 5 of Table II and conferring to a plant cell, plant or part thereof an increased biotic stress resistance to pathogenic fungi as compared to a corresponding non-transformed wild type control plant cell, plant, or part thereof;
(f) a nucleic acid molecule which hybridizes with a nucleic acid molecule of (a) to (c) under stringent hybridization conditions and confers to a plant cell, plant, or part thereof an increased biotic stress resistance to pathogenic fungi as compared to a corresponding non-transformed wild type control plant cell, plant, or part thereof;
(g) a nucleic acid molecule encoding a polypeptide which can be isolated with the aid of a monoclonal or polyclonal antibody made against a polypeptide encoded by one of the nucleic acid molecules of (a) to (e) and having the activity represented by the polypeptide comprising a polypeptide as depicted in column 5 of Table I;
(h) a nucleic acid molecule encoding a polypeptide comprising the consensus sequence or one or more polypeptide motifs as shown in column 7 of Table IV and having the activity of a protein comprising a polypeptide as depicted in column 5 of Table II or IV;
(i) a nucleic acid molecule encoding a polypeptide having the activity represented by a protein as depicted in column 5 of Table II and conferring to a plant cell, plant, or part thereof an increased biotic stress resistance to pathogenic fungi as compared to a corresponding non-transformed wild type control plant cell, plant, or part thereof;
(j) a nucleic acid molecule which comprises a polynucleotide which is obtained by amplifying a cDNA library or a genomic library using the primers in column 7 of Table III and having the activity represented by a protein comprising a polypeptide as depicted in column 5 of Table II, and
(k) a nucleic acid molecule which is obtained by screening a suitable nucleic acid library under stringent hybridization conditions with a probe comprising a complementary sequence of a nucleic acid molecule of (a) or (b) or with a fragment thereof, having at least 15 nt of a nucleic acid molecule complementary to a nucleic acid molecule characterized in (a) to (e) and encoding a polypeptide having the activity of a protein comprising a polypeptide as depicted in column 5 of Table II;
is increased or generated.

6. The method of claim 1 wherein the transgenic plant cell, plant or part thereof with increased biotic stress resistance is derived from a monocotyledonous plant.

7. The method of claim 1 wherein the transgenic plant cell, plant, or part thereof with increased biotic stress resistance is derived from a dicotyledonous plant.

8. The method of claim 1 wherein the plant is selected from the group consisting of maize, wheat, rye, oat, triticale, rice, barley, soybean, peanut, cotton, oil seed rape, canola, winter oil seed rape, corn, manihot, pepper, sunflower, flax, borage, safflower, linseed, primrose, rapeseed, turnip rape, tagetes, a solanaceous plant, potato, tobacco, eggplant, tomato, Vicia species, pea, alfalfa, coffee, cacao, tea, Salix species, oil palm, coconut, perennial grass, a forage crop and Arabidopsis thaliana.

9. The method of claim 1 wherein the transgenic plant cell, plant, or part thereof with increased biotic stress resistance is derived from a gymnosperm plant, spruce, pine, or fir.

10. An isolated nucleic acid molecule comprising a nucleic acid molecule selected from the group consisting of:
(a) a nucleic acid molecule encoding a polypeptide shown in column 7 of Table II B;
(b) a nucleic acid molecule shown in column 7 of Table I B;
(c) a nucleic acid molecule which encodes a polypeptide sequence depicted in column 5 or 7 of Table II and confers to a plant cell, plant, or part thereof an increased biotic stress resistance to pathogenic fungi as compared to a corresponding non-transformed wild type control plant cell, plant, or part thereof;
(d) a nucleic acid molecule having at least 30% identity with the nucleic acid molecule sequence of a polynucleotide comprising a nucleic acid molecule shown in column 5 or 7 of Table I and conferring to a plant cell, plant, or part thereof an increased biotic stress resistance to pathogenic fungi as compared to a corresponding non-transformed wild type control plant cell, plant, or part thereof;
(e) a nucleic acid molecule encoding a polypeptide having at least 30% identity with the amino acid sequence of the polypeptide encoded by the nucleic acid molecule of (a) to (c) and having the activity of a nucleic acid molecule comprising a polynucleotide as depicted in column 5 of Table I and conferring to a plant cell, plant, or part thereof an increased biotic stress resistance to pathogenic fungi as compared to a corresponding non-transformed wild type control plant cell, plant, or part thereof;
(f) a nucleic acid molecule which hybridizes with a nucleic acid molecule of (a) to (c) under stringent hybridization conditions and confers to a plant cell, plant, or part thereof increased biotic stress resistance to pathogenic fungi as compared to a corresponding non-transformed wild type control plant cell, plant, or part thereof;
(g) a nucleic acid molecule encoding a polypeptide which can be isolated with the aid of a monoclonal or polyclonal antibody made against a polypeptide encoded by one of the nucleic acid molecules of (a) to (e) and having the activity of a nucleic acid molecule comprising a polynucleotide as depicted in column 5 of Table I;
(h) a nucleic acid molecule encoding a polypeptide comprising the consensus sequence or one or more polypeptide motifs as shown in column 7 of Table IV and having the activity of a protein comprising a polypeptide as depicted in column 5 of Table II or IV;
(i) a nucleic acid molecule encoding a polypeptide having the activity of a protein as depicted in column 5 of Table II and conferring to a plant cell, plant, or part thereof an increased biotic stress resistance to pathogenic fungi as compared to a corresponding non-transformed wild type control plant cell, plant, or part thereof;
(j) a nucleic acid molecule which comprises a polynucleotide which is obtained by amplifying a cDNA library or a genomic library using the primers in column 7 of Table III and has the activity of a protein comprising a polypeptide as depicted in column 5 of Table II or IV; and
(k) a nucleic acid molecule which is obtained by screening a suitable nucleic acid library under stringent hybridization conditions with a probe comprising a complementary sequence of a nucleic acid molecule of (a) or (b) or with a fragment thereof, having at least 15 nt of a nucleic acid molecule complementary to a nucleic acid molecule characterized in (a) to (e) and encoding a polypeptide having the activity of a protein comprising a polypeptide as depicted in column 5 of Table II;
whereby the nucleic acid molecule according to (a) to (j) differs by at least one nucleotide from a sequence depicted in column 5 or 7 of Table I A and encodes a protein which differs by at least one amino acid from a protein sequence depicted in column 5 or 7 of Table II A.

11. A nucleic acid construct which confers the expression of the nucleic acid molecule of claim 10 or of a nucleic acid molecule encoding a polypeptide shown in column 5 of Table II, wherein said nucleic acid construct comprises one or more regulatory elements and expression of the nucleic acid in a host cell results in increased biotic stress resistance to pathogenic fungi as compared to a corresponding non-transformed wild type control host cell.

12. A vector comprising:
(a) the nucleic acid molecule of claim 10;
(b) a nucleic acid molecule encoding a polypeptide shown in column 5 of Table II; or
(c) a nucleic acid construct which confers the expression of (a) or (b), whereby expression of said coding nucleic acid in a host cell results in increased biotic stress resistance to pathogenic fungi as compared to a corresponding non-transformed wild type control host cell, and wherein the vector further comprises:
(i) a promoter regulating constitutive expression of an operably linked polynucleotide in a plant;
(ii) a promoter regulating tissue-specific expression of an operably linked polynucleotide in a plant;
(iii) a promoter regulating expression of an operably linked polynucleotide in a syncytia site of a plant upon nematode infection; or
(iv) a promoter regulating pathogen-inducible expression of an operably linked polynucleotide.

13. A host cell which has been transformed stably or transiently with
(i) the nucleic acid molecule of claim 10;
(ii) a nucleic acid molecule encoding a polypeptide shown in column 5 of Table II;
(iii) a nucleic acid construct which confers the expression of (i) or (ii); or
(iv) a vector comprising (i), (ii) or (iii) and further comprising
(a) a promoter regulating constitutive expression of an operably linked polynucleotide in a plant;
(b) a promoter regulating tissue-specific expression of an operably linked polynucleotide in a plant;
(c) a promoter regulating expression of an operably linked polynucleotide in a syncytia site of a plant upon nematode infection; or
(d) a promoter regulating pathogen-inducible expression of an operably linked polynucleotide
and which shows due to the transformation an increased biotic stress resistance to pathogenic fungi as compared to a corresponding non-transformed wild type control host cell.

14. A plant tissue, propagation material, seed, harvested material, or plant comprising the host cell of claim 13.

15. The method of claim 1, whereby additionally abiotic stress resistance, water deficiency resistance, or drought resistance is conferred.

16. A host cell, plant tissue, propagation material, seed, harvested material, or plant which has been transformed stably or transiently with
(i) the nucleic acid molecule of claim 10;
(ii) a nucleic acid molecule encoding a polypeptide shown in column 5 of Table II; or
(iii) a nucleic acid construct which confers the expression of (i) or (ii);
and which shows due to the transformation an increased biotic stress resistance to pathogenic fungi and an increased abiotic stress resistance as compared to a corresponding non-transformed wild type control host cell, plant tissue, propagation material, seed, harvested material or plant.

17. The method of claim 1 wherein an increase in the content of a fine chemical selected from the group consisting of:
3,4-dihydroxyphenylalanine (dopa), alanine, a-linolenic acid (c18:cis[9,12,15]3), a-linolenic acid, c18:3 (c9,c12,c15), alpha-linolenic acid, alpha-tocopherol, arginine, aspartic acid, beta-carotene, beta-sitosterol, campesterol, cerotic acid (c26:0), citrulline, coenzyme q10, coenzyme q9, ferulic acid, fructose, fumarate, fumaric acid, gamma-tocopherol/beta-tocopherol/2,3-dimethyl-5-phytyl-quinol, gamma-tocopherol/beta-tocopherol, gamma-tocopherol/beta-tocopherol/2,3-dimethyl-5-phytylquinol, glucose, glutamate, glyceric acid, glycerol, glycine, hexadeca-dienoic acid (c16:cis [7,10]2), hexadeca-trienoic acid (c16:cis [7,10,13]3), homoserine, isoleucine, isopentenyl pyrophosphate, lacton of trihydroxybutyric acid, leucine, lignoceric acid (c24:0), linoleic acid (c18:cis[9,12]2), linoleic acid c18:2 (c9,c12), lutein, malic acid, methylgalactopyranosid, myo-inositol, palmitic acid (c16:0), phenylalanine, proline, putrescine, raffinose, salicylic acid, serine, shikimic acid, sinapic acid, stearic acid (c18:0), succinate, succinic acid, threonine, trihydroxybutanoic acid, tryptophan, tyrosine, valine and zeaxanthin, is conferred.

18. A host cell, plant tissue, propagation material, seed, harvested material or plant which has been transformed stably or transiently with
(i) the nucleic acid molecule of claim 10;
(ii) a nucleic acid molecule encoding a polypeptide shown in column 5 of Table II;
(iii) a nucleic acid construct which confers expression of the nucleic acid molecule of (i) or (ii), wherein said nucleic acid construct comprises one or more regulatory element and expression of the nucleic acid in a host cell results in increased biotic stress resistance to pathogenic fungi as compared to a corresponding non-transformed wild type control host cell; or
(iv) a vector comprising (i), (ii), or (iii) and further comprising
(a) a promoter regulating constitutive expression of an operably linked polynucleotide in a plant;
(b) a promoter regulating tissue-specific expression of an operably linked polynucleotide in a plant;
(c) a promoter regulating expression of an operably linked polynucleotide in a syncytia site of a plant upon nematode infection; or
(d) a promoter regulating pathogen-inducible expression of an operably linked polynucleotide
and which shows due to the transformation an increase in the content of a fine chemical selected from the group consisting of:
3,4-dihydroxyphenylalanine (dopa), alanine, a-linolenic acid (c18:cis[9,12,15]3), a-linolenic acid, c18:3 (c9,c12,c15), alpha-linolenic acid, alpha-tocopherol, arginine, aspartic acid, beta-carotene, beta-sitosterol, campesterol, cerotic acid (c26:0), citrulline, coenzyme q10, coenzyme q9, ferulic acid, fructose, fumarate, fumaric acid, gamma-tocopherol/beta-tocopherol/2,3-dimethyl-5-phytyl-quinol, gamma-tocopherol/beta-tocopherol, gamma-tocopherol/beta-tocopherol/2,3-dimethyl-5-phytylquinol, glucose, glutamate, glyceric acid, glycerol, glycine, hexadeca-dienoic acid (c16:cis [7,10]2), hexadeca-trienoic acid (c16:cis [7,10,13]3), homoserine, isoleucine, isopentenyl pyrophosphate, lacton of trihydroxybutyric acid, leucine, lignoceric acid (c24:0), linoleic acid (c18:cis[9,12]2), linoleic acid c18:2 (c9,c12), lutein, malic acid, methylgalactopyranosid, myo-inositol, palmitic acid (c16:0), phenylalanine, proline, putrescine, raffinose, salicylic acid, serine, shikimic acid, sinapic acid, stearic acid (c18:0), succinate, succinic acid, threonine, trihydroxybutanoic acid, tryptophan, tyrosine, valine and zeaxanthin,
as compared to a corresponding non-transformed wild type control host cell, plant tissue, propagation material, seed, harvested material or plant.

19. A host cell, plant tissue, propagation material, seed, harvested material, or plant which has been transformed stably or transiently with the vector of claim 12 and which shows due to the transformation an increased biotic stress resistance to pathogenic fungi and an increased abiotic stress resistance compared to a corresponding non-transformed wild type control host cell, plant tissue, propagation material, seed, harvested material or plant.

20. The host cell, plant tissue, propagation material, seed, harvested material, or plant of claim 16 which shows due to the transformation an increase in the content of a fine chemical selected from the group consisting of:
3,4-dihydroxyphenylalanine (dopa), alanine, a-linolenic acid (c18:cis[9,12,15]3), a-linolenic acid, c18:3 (c9,c12,c15), alpha-linolenic acid, alpha-tocopherol, arginine, aspartic acid, beta-carotene, beta-sitosterol, campesterol, cerotic acid (c26:0), citrulline, coenzyme q10, coenzyme q9, ferulic acid, fructose, fumarate, fumaric acid, gamma-tocopherol/beta-tocopherol/2,3-dimethyl-5-phytyl-quinol, gamma-tocopherol/beta-tocopherol, gamma-tocopherol/beta-tocopherol/2,3-dimethyl-5-phytylquinol, glucose, glutamate, glyceric acid, glycerol, glycine, hexadeca-dienoic acid (c16:cis [7,10]2), hexadeca-trienoic acid (c16:cis [7,10,13]3), homoserine, isoleucine, isopentenyl pyrophosphate, lacton of trihydroxybutyric acid, leucine, lignoceric acid (c24:0), linoleic acid (c18:cis[9,12]2), linoleic acid c18:2 (c9,c12), lutein, malic acid, methylgalactopyranosid, myo-inositol, palmitic acid (c16:0), phenylalanine, proline, putrescine, raffinose, salicylic acid, serine, shikimic acid, sinapic acid, stearic acid (c18:0), succinate, succinic acid, threonine, trihydroxybutanoic acid, tryptophan, tyrosine, valine and zeaxanthin,
as compared to a corresponding non-transformed wild type control host cell, plant tissue, propagation material, seed, harvested material, or plant.
